United States Patent Application Publication US 2020/0109395 A1 - sequence listing, part 2

SEQ ID NO: 1985 - protein, 1080 aa, Escherichia coli P0299917.3
MLKRLLSRLTGNRQQIERHLRNQYQVEENGLSFPLSLVDDSQLWTLASWLEQLAEEDYLISLTDRWLLSWDALYRLLEDEDHASSLPLISVPEVLPLRASLSSRGALSDSDFRVWISEWATVPARKPIRFSRTGAILTHDNQQYLLSRENWALLQATEQLSAQQIQTPGETTNQLGWAAIRKCAKLAAAKFDDYLEKTHVVKPTSLSLRLRKATVADTAVIEIEPHFEDQPANWLGSFDKNSQVHDSYRIPGENGELSHVIIPPEVKEVLNSIHSIPGRRVAGSEALSFVRNPYTFLGEDAAGVIAPEEHEQALFDAKIFFHHFRLMPQLNAENKIAEVTLVLEPVSPVPQPEITFVFSAPWELEKFIQQLGISVAAQMPAGSWQGYELELSQFTEQQWHDCQALLTRWQQEIEGKEFSDVLDIAKYGDRVIGIGEFEKISSPWLTKAHSENWIPDDIDFSAFSVETLAGWQPENLHHFDELQERITQAEAADETHITAPWNDSQLPLDAAKTFSKHWEKQQSTANESQGNVADKTARAVLKIEQNIEEAAYIKQRRNSLLNARHAEPEIPLSLKEHIRLKDHQREGVAWLQQLFLRSPEETAGCLLADDMGLGKTLQILSFLVWFIEKFPQEPPSLIVAPVSLLDNWERELDNFFYTAGIPVLKLYGETIKAVKYPKQAIPAHLQSQGIKNLLKPGWQGEAKIILTTYETLRDQEFSLARQPWSIMVCDEAQKIKNPAALITHAANAVQARFKVACTGTPVENTLVDLWSLFDFAQPGLLGALNEFGKHYVRPIENETGRDTGRLERLRALIEPQTLRRTKEEVARDLPQKIEVESCKQLTLSGVQKQLYLSSVANWQQQQALSEGMQQAGTGMLGLLHRLKLICAHPAVVNPEPRFRDNSPKLNWLLKILAEIKHTTKDKVIIFTELRDLQRELQHAIHQKFGFRPVIINGDTSTKSHSQNSRQRLIDDFQAQPGFGVIILSTVAVGFGVNVQKANHVIHFTRCWNPAKEDQATDRAYRIGQTKDVYVYYPTVRDTEITTFEETLDDLLQRRRALARDMLCATPDLSGADFEAILKGA

SEQ ID NO: 1986 - protein, 729 aa, Escherichia coli P0299917.4; identical to SEQ ID NO: 1974

SEQ ID NO: 1987 - protein, 246 aa, Escherichia coli P0299917.4; identical to SEQ ID NO: 1975

SEQ ID NO: 1988 - protein, 504 aa, Escherichia coli P0299917.4
MRLAALRRFRLAQELTEREWRMVFYGLADNDPSYPDQPVLLEDDTFFPRVSSAIKKRLETKTLKRRDWAALCSSYFAYQHESPETNPHWCVLRGHIAQGYLVVKAAIRREKSWMKTIEFYHDIFTPQAGGVISRQLLAGESNSLSSLEKIAQIPDSSWLWRRIFTVLLAQLDTLDDPQFLEKISWLLGLAAQWVRFRDDIMTATLTRYYHSGYRDQAHSALKQAALEYWDNPQLKSQQNKWHQYVSEPVAAMVRGWLAKQDLTHFFELLRGNGDVDQARLHYWLRFANQMGFTRIVMGSDAWQDPGSDFVKFREENKGRLSYLRGGRNFDNAMIMQINDYLFVEFSGTGNAMYAYRIGHAPFNPESRTLDINIHLKDKGRCALRLPHTPRAEGYNKVRITGWMLKYDDELRQLGIRWMAEEPVKFVDKKASPPVSLSAIKIINPLRDTAIQHLVEGSSCIVSDNRQKGGVLSVQLNTPDDTIERELLRLGFAPVAKEPHRYWIK

SEQ ID NO: 1989 - protein, 1080 aa, Escherichia coli P0299917.4
MLKRLLSRLTGNRQQIERHLRNQYQVEENGLSFPLSLVDDSQLWTLASWLEQLAEEDYLISLTDRWLLSWDALYRLLEDEDHASSLPLISVPEVLPLRASLSSRGALSDSDFRVWISEWATVPARKPIRFSRTGAILTHDNQQYLLSRENWALLQATEQLSAQQIQTPGETTNQLGWAAIRKCAKLAAAKFDDYLEKTHVVKPTSLSLRLRKATVADTAVIEIEPHFEDQPANWLGSFDKNSQVHDSYRIPGENGELSHVIIPPEVKEVLNSIHSIPGRRVAGREALSFVRNPYTFLGEDAAGVIAPEEHEQALFDAKIFFHHFRLMPQLNAENKIAEVTLVLEPVSPVPQPEITFVFSAPWELEKFIQQLGISVAAQMPAGSWQGYELELSQFTEQQWHDCQALLTRWQQEIEGKEFSDVLDIAKYGDRVIGIGEFEKISSPWLTKAHSENWIPDDIDFSAFSVETLAGWQPENLHHFDELQERITQAEAADETHITAPWNDSQLPLDAAKTFSKHWEKQQSTANESQGNVADKTARAVLKIEQNIEEAAYIKQRRNSLLNARHAEPEIPLSLKEHIRLKDHQREGVAWLQQLFLRSPEETAGCLLADDMGLGKTLQILSFLVWFIEKFPQEPPSLIVAPVSLLDNWERELDNFFYTAGIPVLKLYGETIKAVKYPKQAIPAHLQSQGIKNLLKPGWQGEAKIILTTYETLRDQEFSLARQPWSIMVCDEAQKIKNPAALITHAANAVQARFKVACTGTPVENTLVDLWSLFDFAQPGLLGALNEFGKHYVRPIENETGRDTGRLERLRALIEPQTLRRTKEEVARDLPQKIEVESCKQLTLSGVQKQLYLSSVANWQQQQALSEGMQQAGTGMLGLLHRLKLICAHPAVVNPEPRFRDNSPKLNWLLKILAEIKHTTKDKVIIFTELRDLQRELQHAIHQKFGFRPVIINGDTSTKSHSQNSRQRLIDDFQAQPGFGVIILSTVAVGFGVNVQKANHVIHFTRCWNPAKEDQATDRAYRIGQTKDVYVYYPTVRDTEITTFEETLDDLLQRRRALARDMLCATPDLSGADFEAILKGA

SEQ ID NO: 1990 - protein, 729 aa, Escherichia coli P0299917.5; identical to SEQ ID NO: 1974

SEQ ID NO: 1991 - protein, 246 aa, Escherichia coli P0299917.5; identical to SEQ ID NO: 1975

SEQ ID NO: 1992 - protein, 504 aa, Escherichia coli P0299917.5; identical to SEQ ID NO: 1976

SEQ ID NO: 1993 - protein, 1080 aa, Escherichia coli P0299917.5; identical to SEQ ID NO: 1985

SEQ ID NO: 1994 - protein, 729 aa, Escherichia coli P0299917.6; identical to SEQ ID NO: 1974

SEQ ID NO: 1995 - protein, 246 aa, Escherichia coli P0299917.6; identical to SEQ ID NO: 1975

SEQ ID NO: 1996 - protein, 504 aa, Escherichia coli P0299917.6; identical to SEQ ID NO: 1976

SEQ ID NO: 1997 - protein, 1080 aa, Escherichia coli P0299917.6; identical to SEQ ID NO: 1985

SEQ ID NO: 1998 - protein, 729 aa, Escherichia coli P0299917.7; identical to SEQ ID NO: 1974

SEQ ID NO: 1999 - protein, 246 aa, Escherichia coli P0299917.7; identical to SEQ ID NO: 1975

SEQ ID NO: 2000 - protein, 504 aa, Escherichia coli P0299917.7; identical to SEQ ID NO: 1976

SEQ ID NO: 2001 - protein, 1080 aa, Escherichia coli P0299917.7; identical to SEQ ID NO: 1985

SEQ ID NO: 2002 - protein, 729 aa, Escherichia coli P0299917.9; identical to SEQ ID NO: 1974

SEQ ID NO: 2003 - protein, 246 aa, Escherichia coli P0299917.9; identical to SEQ ID NO: 1975

SEQ ID NO: 2004 - protein, 504 aa, Escherichia coli P0299917.9; identical to SEQ ID NO: 1976

SEQ ID NO: 2005 - protein, 1080 aa, Escherichia coli P0299917.9
MLKRLLSRLTGNRQQIERHLRNQYQVEENGLSFPLSLVDDSQLWTLASWLEQLAEEDYLISLTDRWLLSWDALYRLLEDEDHASSLPLISVPEVLPLRASLSSRGALSDSDFRVWISEWATVPARKPIRFSRTGAILTHDNQQYLLSRENWALLQATEQLSAQQIQTPGETTNQLGWAAIRKCAKLAAAKFDDYLEKTHVVKPTSLSLRLRKATVADTAVIEIEPHFEDQPANWLGSFDKNSQVHDSYRIPGENGELSHVIIPPEVKEVLNSIHSIPGRRVAGSEALSFVRNPYTFLGEDAAGVIAPEEHEQALFDAKIFFHHFRLMPQLNAENKIAEVTLVLEPVSPVPQPEITFVFSAPWELEKFIQQLGISVAAQMPAGSWQGYELELSQFTEQQWHDCQALLTRWQQEIEGKEFSDVLDIAKYGDRVIGIGEFEKISSPWLTKAHSENWIPDDIDFSAFSVETLAGWQPENLHHFDELQERITQAEAADETHITAPWNDSQLPLDAAKTFSKHWEKQQSTANESQGNVADKTARAVLKIEQNIEEAAYIKQRRNSLLNARHAEPEIPLSLKEHIRLKDHQREGVAWLQQLFLRSPEETAGCLLADDMGLGKTLQILSFLVWFIEKFPQEPPSLIVAPVSLLDNWERELDNFFYTAGIPVLKLYGETIKAVKYPKQAIPAHLQSQGIKNLLKPGWQGEAKIILTTYETLRDQEFSLARQPWSIMVCDEAQKIKNPAALIPHAANAVQARFKVACTGTPVENTLVDLWSLFDFAQPGLLGALNEFGKHYVRPIENETGRDTGRLERLRALIEPQTLRRTKEEVARDLPQKIEVESCKQLTLSGVQKQLYLSSVANWQQQQALSEGMQQAGTGMLGLLHRLKLICAHPAVVNPEPRFRDNSPKLNWLLKILAEIKHTTKDKVIIFTELRDLQRELQHAIHQKFGFRPVIINGDTSTKSHSQNSRQRLIDDFQAQPGFGVIILSTVAVGFGVNVQKANHVIHFTRCWNPAKEDQATDRAYRIGQTKDVYVYYPTVRDTEITTFEETLDDLLQRRRALARDMLCATPDLSGADFEAILKGA

SEQ ID NO: 2006 - protein, 729 aa, Escherichia coli P0304799.3
MSWLNSILVTLTSVEPYKVPVTVIVTVTFAFVCFIFFYLLRSIRIIYGLKKYTRSINSIEKSAPEVQLEHLKSLFQRSELKHAWNEFEESLHSQYELENGEEKIVRIRATAPSASFFSEQQLVDIPLNTEFFKHLPGILTGMGIIGTFYGLMIGLNHFDPSTPEQVSSSVNNLLRDVLYAFLGSAFAIFASILVTWLEKLSIAKSYKYLEKFTAALDSLYDSGVGEEYLASLVKSSNESATQARHLKESLVTDLRDMLLHLAESQKIESERLANTLSATYRESGSQFADQVSGAIENSLKSPLDKIAGAVQTASGDQSGMVQNMLQDVLTAFMAKLDTTFGQQFTNLNEMMRQTVGAIQTMQTGFSALLQDMRQVSDDSRQGSAQLIEQLLSEMKSGQQALQAGMNDMLTSLQASVAKIGAEGEGAGERIARQLEKMFADSEAREKAQAEHMAAFVEAIQNSVQQGQSATMEKMAASVGALGEQLGSLFGQIDKGQQQISATQQANQQSLHEQTQRVMSEVDDQIKQLVETVASQHQGTTETLRLLAEQTNRQIQDMQAGADKMRLAAERFEHAGERVSEANHLTADVLNKAQSAGSSLSLATSELTSVVADYRNNREAVSKSIAMLELLAANTQSEQTTRNQFIADLKQHGERLQSYNREAQVFMENVSDVLGKGFEDFSEGVSRSLDKTLGKLDVEMAKASNLLAGSVEQLGESVSELDDVLSRVRT

SEQ ID NO: 2007 - protein, 246 aa, Escherichia coli P0304799.3
MFGNAFDVKKRRSDEAEKPFWISYADLMTAMMVLFLVVMVASLSSVTQRIQRAEQGEKARGQDISRLCERLELHARNVNKNIVVDCHDNRISFGEAGRFAHNQFFLNAEGQKALQDVVPLVLEASNSEEGKKWFKQIVIEGFTDTDGSYLYNLHLSLQRSEWVMCSLLDSRSPLQKNISAEQQLQIRKLFLAGGVSFNNAKESKEASRRVELRMQFFGLKDKRDKADEVDFPPVVNKEVCQLVMPL

SEQ ID NO: 2008 - protein, 560 aa, Escherichia coli P0304799.3
MIPALNSLSQRIAARLSSSQRDDHYLHNDFHALTAATLDMEKRFDRAERIPSPPQEMRLEALRRFRLAQELTEREWRMVFYGLADNDPLYPDQPILLEDDTFFPRVNSAIKKRIETKTLKRRDWAALCSSYFAYQHQSPETNPHWCVLRGHIAQGYLVVKAAIRREKSWMKTIEFYHDIFTPQAGGVISRQLLAGENNSLSSLEKIAQIPDSSWLWKRIFTVLLAQLDTLDDPQFLSKISWLLGLAAQWVRFRDDIMTATLTRYYHSGYRDQSHPALKQAALEYWDNPQLKSQQNKWHQYVSESVAAMVRGWLAKQDLTHFFELLRGNGDVDQARLHYWLRFANQMGFTRIIMGSDAWQDRGSDFVKFREENKGRLSYLRGGRNFDNAMIMQINDYLFVEFSGTGNAMYAYQIGHAPFNPESRTLDINIHLKDQGRCALRLPHAPRAEGYNKVRITGWMLKYDDELRKLGIRWMAEEPVRFVDKKVPPPVAMSDIKIINPLRDTAIQHLVKCSSCIVSDNRHKGGILSVQLITPDDTVERELLRLGFAPVAKEPHRYWIK

SEQ ID NO: 2009 - protein, 1080 aa, Escherichia coli P0304799.3
MLKRLLSKLTGNRQQIEHHLKNQYQVEENGLSFPLSLVDDSQLWALASWLEQLAEEDYLISLTDRWLLSWEALYRLLEDEEHASSLPLIGVPDVLPLRANLSSRGALSDSYFRVWIAEWATFPARKPIRFSRTGAILTHENQQYLLSRENWALLQATEQLSAQQIQTPGETTNQLGWAAIRKCAKLAAAKFDDYLEKTHVIKPTSLSLRLRKATVADTAVIEIEPHFEDQPANWLGSFDKNLQVHDSYRIPGENGELSHVIIPPEVKEVLNSIHSIPGRRVAGSEALSFVRNPYTFLGEDAASVIAPEEHEQALFDARIFFHHFRLIPQLNAENKIAEVTLILEPVSPVPQPEITFVFSAPWELDKFIQQLGISVAAQMPAGSWQGYELELSQFTEQQWHDCQALLTRWQQEIEGKEFSDVLDIAKYGDRVIGIGEFEKISSPWLTKAQSENWLPDDIDFSAFSIETLSGWQPENPHHFDELQEKITQAEAAGETYITTPWNDSQLPLDAAKTFSKNWEKQQITANEYQGNVADKTARAVLKIEQNIEETAYIKQRRNSLLNARHAEPEIPLSLKEHIRLKDHQREGVAWLQQLFLRSPEETAGCLLADDMGLGKTLQILSFLVWFIEKFPQEPPNLIVAPVSLLDNWERELNNFFYTAGIPVLKLYGETIKAVKYPKQAIPAHLQSKGIKNLLKPGWQGEAKIILTTYETLRDQEFSLARQPWSIMVCDEAQKIKNPAALITHAANAVQARFKVACTGTPVENTLVDLWSLFDFAQPGLLGALNEFGKHYVRPIENEDGRDTERLESLRALIEPQTLRRTKEEVARDLPQKIEVESCKQLTLSGVQKQLYLSSVANWQQQQALREGMQQAGTGMLGLLHRLKLICAHPAIVNPEPRFRDNSPKLNWLLKILAEIKHTSKDKVIIFTELRDLQRELQHAIHQNFGFRPVIINGDSSTKSQSQNSRQRLIDDFQAQPGFGVIILSTVAVGFGVNVQKANHVIHFTRCWNPAKEDQATDRAYRIGQTKDVYVYYPTVRDTEITTFEETLDDLLQRRRALARDMLCATPDLNCADFETILKGA

SEQ ID NO: 2010 - protein, 729 aa, Escherichia coli P0299917.8; identical to SEQ ID NO: 1974

SEQ ID NO: 2011 - protein, 246 aa, Escherichia coli P0299917.8; identical to SEQ ID NO: 1975

SEQ ID NO: 2012 - protein, 504 aa, Escherichia coli P0299917.8; identical to SEQ ID NO: 1976

SEQ ID NO: 2013 - protein, 1080 aa, Escherichia coli P0299917.8; identical to SEQ ID NO: 1985

SEQ ID NO: 2014 - protein, 851 aa, Escherichia coli KTE33
MFSLTSFLDTLTSVNPENVPIYVAIVVGVLLLGFIVRYAIPSFRVSARFKQKAKAIRGLGNEKPAQQLEKLDALFSDKFFAHPWSEFKESLHRQFEFDENSGQKKISAIRSTAPASAWFTEPLLVEIPLYTEAFKHLPGILTGIGIIGTFSGLMIGLHHFDPSTPEQVSASVANLLRDVLYAFLGSAFAITFSILVTMFEKWRLAQCYKNLELLTASIDQLFEGGVGEDYLSQLLSSTKENTTHARQLKDGLVTDLREMLQNLVDSQMRENQKLAETLSTTYRESGQQFAEQVSGAIETSLKNPLDKIAGVVQTASGDQSHRVQSMLENVLTAFMSKMDNTFGQQFTTMQEMMGRSVEAIQSMQSGFSTLLQDMRQAGDDSRQGSAQLISQLLSEMKSGQQEMQAGMNEMLRSLQESVARIGAEGEGAGERMAQQLEKIFADSEAREKAMAEQMRAFIEAIQSSVQQGQNETMEKMAASVDTLGSHMATLFAQLENGQQQLNQQQNQAQNLLMGNMSKGVETLTQNLAGVFSQLESGQKQMSQTQEQGQRVLHEETQQLLARSEVREQAAAEQQQQFMTSLQQTMHSSQDALREKMTSGIDHLGSQLGNLFGQLEEGQKSLSQQQQSAQSALQQEAQRIIGQLESQVESLMQMLREQQSASGELLQRMAKNTTRHLEEIQTGADKMRVAADRFEAAGDRVAEANQLTAEVLNGTQQAGRTLSSASAELGALIADYRNTREVVANAITALETLINRSHDEQSSRSRFVDDLKAYSERLQQYNREAQEFLHNIAEVMGTSFESFTTGVENGLNRSLQEMDTQLTKAAGALSSSVEIIGESVDTLETVLRHRRA

SEQ ID NO: 2015 - protein, 244 aa, Escherichia coli KTE33
MFNRVFNGRQRRSDEAEKPFWISYADLMTAMMVLFLVVMVASLSSVTQRIQQAEAGEKSRGHDIARLCEKLELQAKNLNKTIQVDCHDNRISFGEAGRFEHNRFALNAEGLQALQDVVPLVLEAANSDEGKKWFKQIVIEGFTDTDGSYLYNLHLSLQRSEWVMCSLLDSRSALQQKITPEQQVQIRKLFLAGGVSFNNAKESKEASRRVELRMQFFGLKDKKHDESMDVVPGISQETCQLGAM

SEQ ID NO: 2016 - protein, 595 aa, Escherichia coli KTE33
MTSAIEKLKTRLLPYREQNVQPTVSHAFHYLQRVIAQLERKVDARAVQMVPPLEKRRQAIARLRAGEMPGPFEWKMIFFGLNDVAEGDLFEIALIDDATNFARIIAEIEQKIAQQRLTRREWLALCTSYFGHSSDTPEKNPQWLQLRTQIARGFQQLKESAPRQMSWMSVIDTYSDIFTDNAGFLLGQQLGRGEITDISVLEKVAQIPQTSWLWRKIVNHLVNEIFCLTDDDFQQKINSLIALSRQLTRFKDNILAAMLTRYYQSAFKHQTHFELKQLALEYWGNPQLTSRNKSWQVHVENPVLLMVQGWFAKDDLKLFFELLKGNRDVDHARLFYWLRFANQMSYTRIVLGEDALRSKDADYVEFRAKNAGRLSRLQGSGSRDNNAMIMRIGDYLFVEFSKVGAMYAYHMGNAPFNPETGILDIDYDLKDKRNNRRKVRLRLPHLSPVFLYSLNRIEGWMSRYDEELRKLGIDYVAEDINQSSVTLDISRFNASKTVSRPEPASLPEHEVSDAKSDREEQIKIIASSLKAKKELPGREQQIREIIRSVDCKVMDKRGLGGAIHIQFNEPDHEAAQKLLSLGFKPVLGKFTYWSK

SEQ ID NO: 2017 - protein, 1079 aa, Escherichia coli KTE33
MFKKLLGKFIKENTSLPTSFVPLYVMKEEGFAFPFSLADSEDNWPVASCLEQLHEEDYVSHWSDCWFLSWDDFYRIRKNDDYASSLAIFAFPPQRNLTAHLAATGSISDDTFRVFIDKWTQPDDYRPVEITCTGASFSSAEGTFVLSEENWQLLDALQQLRLQQRQTPGETVNQTSWAKIRRQAKKAGAKLDDYLAKTIVIRPESLQLKLRKSLVVDTPVLEIEPVFDEQPANWLQSFDRTQQVQDRYCVLGDDGVLNHVILSPEVKDVLTSVHAITGRRVAGDDALSFVRNPYTWIGEEASQVLDPDVYEQNLQDAGIYFYDFRLEPQIDENRQIASVTLLLSPRTEQSVADETYIFKRPGELAALLSELEQKLAAQLPAGVWQGYDLELSRFSQEELQGYQALLENWQHQAAGMNFTHVLDLNKYSDRVIGIGEFEKISSPYLVKSESEKWLPENLAQEMCEAMFSGWDLDNHQHFQELEERLEEAKATDAPEVAMPWNDNLLPREEAEIFHDKWKKKIDGETNDGVSSEPVSRAVLLIEQNIEQALYVKQRRDSLLGAHQAEVELPMILKTSIQLREHQRKGVAWLQQLYLKSPTETAGCLLADDMGLGKTLQILTFLIWHRERFPDAPPSLIVAPVSLLDNWEREVGNFFLREQVSILKLYGNELKAKKCAKESIPQALKSKGIKNLLQSDWVGDAHIVLTTYETLRDQEFSLARQPWSIMVCDEAQKIKNPAALITQSAKAIQAQFKVACTGTPVENTLVDLWCLFDFVQPGLLGALNNFGKDYLRPIEQQNDNAVLESLRKLIEPQTLRRTKEEVAKDLPDKIEDQRCKQLNMLPLQRDLYTHSVASWQNQQEISEGLDQRGSGMLGLLHRLKLICAWPYSVSADLRLRNDAPKVKWLLETLNTIRQSSDDKVIIFTELRDIQRELQHLIAQHFGFKPFIINGDTSTKSGSDQNRQSLIDAFQSTPGFNVIILSTIAVGFGVNVQKANHVIHFTRCWNPAKEDQATDRAYRIGQQKDVYVYYPTVRDSQLMTFEETLDELLNRRRALARDMLKGATDLTAADFEAVLAGTPQA

SEQ ID NO: 2018 - protein, 729 aa, Escherichia coli KOEGE 3 (4a); identical to SEQ ID NO: 1966

SEQ ID NO: 2019 - protein, 246 aa, Escherichia coli KOEGE 3 (4a); identical to SEQ ID NO: 1931

SEQ ID NO: 2020 - protein, 560 aa, Escherichia coli KOEGE 3 (4a); identical to SEQ ID NO: 1968

SEQ ID NO: 2021 - protein, 1080 aa, Escherichia coli KOEGE 3 (4a)
MLKRLLSKLTGNRQQIEHHLKNQYQVEENGLSFPLSLVDDSQLWALASWLEQLAEEDYLISLTDRWLLSWDALYRLLEDEEHASSLPLIGVPDVLPLRASLSSRGALSDSDFRVWIAEWATLPARKPFRFSRTGAILTHENQQYLLSRENWALLQATEQLSAQKNQTPGETTNQLGWAAIRKCAKQAAAKFDDYLEKTHVVKPTSLSLRLRKATVADTAVIEIEPHFEDQPANWLGSFDKNSQVHDSYRIPGENGELSHVIIPPEVKEVLNSIHSIPGRRVAGSEALSFVRNPYTFLGEDAASVIAPEEHEQALFDARIFFHHFRLIPQLNAENKIAEVTLVLEPVSPVPQPEITFGFSAPRELDKFIQQLGISVAAQMPAGSWQGYELELSQFTEQQWHDCQALLTRWQQEIEGKEFSDVLDIAKYGDRVIGIGEFEKISSPWLTKAQSENWLPDDIDFSAFSVETLSGWQPENLHHFDELQERITQAEAVGETHITAPWNDSQLPLDAAKTFSKNWEKQQSTANESQGNVADKTARAVLKIEQNIEETAYIKQRRNSLLNARHAEPEIPLSLKEHIRLKDHQREGVAWLQQLFLRSPEETAGCLLADDMGLGKTLQILSFLVWFIEKFPQEPPSLIVAPVSLLDNWERELDNFFYTAGIPVLKLYGETIKAVKYPKQAIPAHLQSQGIKNLLKPGWQGEAKIILTTYETLRDQEFSLARQPWSIMVCDEAQKIKNPAALITHAANAVQARFKVACTGTPVENTLVDLWSLFDFAQPGLLGALNEFGKHYVRPIENEDGRDTERLESLRALIEPQTLRRTKEEVARDLPQKIEVESCKQLTLSGVQKQLYLSSVANWQQQQALSEGMQQAGTGMLGLLHRLKLICAHPAVVNPEPRFRDNSPKLNWLLKILAELKHTTKDKVIIFTELRDLQRELQHAIHQKFGFRPVIINGDTSTKSQSQNSRQRLIDDFQAQPGFGVIILSTVAVGFGVNVQKANHVIHFTRCWNPAKEDQATDRAYRIGQTKDVYVYYPTVKDTEITTFEETLDDLLQRRRALARDMLCATPDLSGADFEAILKGA

SEQ ID NO: 2022 - protein, 851 aa, Escherichia coli KOEGE 71 (186a)
MFSLTSFLDTLTSVNPENVPIYVAIVVGVLLLGFIVRYAIPSFRVSARFKQKAKAIRGLGNEKPAQQLEKLDALFSDKFFAHPWSEFKESLHRQFEFDENSGQKKISAIRSTAPASAWFTEPLLVEIPLYTEAFKHLPGILTGIGIIGTFSGLMIGLHHFDPSTPEQVSASVANLLRDVLYAFLGSAFAITFSILVTMFEKWRLAQCYKNLELLTASIDQLFEGGVGEDYLSQLLSSTKENTTHARQLKDGLVTDLREMLQNLVDSQMRENQKLAETLSTTYRESGQQFAEQVSGAIETSLKNPLDKIAGVVQTASGDQSHRVQSMLENVLTAFMSKMDNTFGQQFTTMQEMMGRSVEAIQSMQSGFSTLLQDMRQAGDDSRQGSAQLISQLLSEMKSGQQEMQAGMNEMLRSLQESVARIGAEGEGAGERMAQQLEKIFADSEAREKAMAEQMRAFIEAIQSSVQQGQNETMEKMAASVDTLGSHMATLFAQLENGQQQLNQQQNQAQNLLMGNMSKGVETLTQNLAGVFSQLESGQKQMSQTQEQGQCVLHEETQQLLARSEAREQAAAEQQQQFMTSLQQTMHSSQDALREKMTSGIDHLGSQLGNLFGQLEEGQKSLSQQQQSAQSALQQEAQRIIGQLESQVESLMQMLREQQSASGELLQRMAKNTTRHLEEIQTGADKMRVAADRFEAAGDRVAEANQLTAEVLNGTQQAGRTLSSASAELGALIADYRNTREVVANAITALETLINRSHDEQSSRSRFVDDLKAYSERLQQYNREAQEFLHNIAEVMGTSFESFTTGVENGLNRSLQEMDTQLTKAAGALSSSVEIIGESVDTLETVLRHRRA

SEQ ID NO: 2023 - protein, 244 aa, Escherichia coli KOEGE 71 (186a); identical to SEQ ID NO: 2015

SEQ ID NO: 2024 - protein, 595 aa, Escherichia coli KOEGE 71 (186a)
MTSAIEKLKTRLLPYREQNVQPTVSHAFHYLQRVIAQLERKVDARAVQMVPPLEKRRQAIARLRAGEMPGPFEWKMIFFGLNDVAEGDLFEIALIDDATNFARIIAEIEQKIAQQRLTRREWLALCTSYFGHSSDTPEKNPQWLQLRTQIARGFQQLKESAPRQMSWMSVIDTYSDIFTDNAGFLLGQQLGRGEITDISVLEKVAQIPQTSWLWRKIVNHLVNEIFCLTDDDFQQKINSLIALSRQLTRFKDNILAAMLTRYYQSAFKHQTHFELKQLALEYWGNPQLTSRNKSWQVHVENPVLLMVQGWFAKDDLKLFFELLKGNRDVDHARLFYWLRFANQMSYTRIVLGEDALRSKDADYVEFRAKNAGRLSRLQGSGSRDNNAMIMRIGDYLFVEFSKVGAMYAYHMGNAPFNPETGILDIDYDLKDKRNNRRKVRLRLPHLSPVFLYSLNRIEGWMSRYDEELRKLGIDYVAEDINQSSVTLDISRFNASKTVSRPESASLPEHEVSDAKSDREEQIKIIASSLKAKKELPGREQQIREIIRSVDCKVMDKRGLGGAIHIQFNEPDHEAAQKLLSLGFKPVLGKFTYWSK

SEQ ID NO: 2025 - protein, 1079 aa, Escherichia coli KOEGE 71 (186a)
MFKKLLGKFIKENTSLPASFVPLYVMKEEGFAFPFSLADSEDNWPVASCLEQLHEEDYVSHWSDCWFLSWDDFYRIRKNDDYASSLAIFAFPPQRNLTAHLAATGSISDDTFRVFIDKWTLPDDYRPVEITSTGASFSSAEGTFVLSEENWQLLDALQQLRLQQRQTPGETVNQTSWAKIRRQAKKAGAKLDDYLAKTIVIRPESLQLKLRKSLVVDTPVLEIEPVFDEQPANWLQSFDRTQQVQDRYRVLGDDGVLNHVILSPEVKDVLTSVHAITGRRVAGDDALSFVRNPYTWIGEEASQVLDPDVYEQNLQDAGIYFYDFRLEPQIDENRQIASVTLLLSPRTEQSVADETYIFKRPGELAALLSELEQKLAAQLPAGVWQGYDLELSRFSQEELQGYQALLENWQHQAAGMNFTHVLDLNKYSDRVIGIGEFEKISSPYLVKSESEKWLPENLAQEMCEAMFSGWDLDNHQHFQELEERLEEAKATDAPEVAMPWNDNLLPREEAEIFHDKWKKKIDGETNDGVSSEPVSRAVLLIEQNIEQALYVKQRRDSLLGAHQAEVELPMILKTSIQLREHQRKGVAWLQQLYLKSPTETAGCLLADDMGLGKTLQILTFLIWHRERFPDAPPSLIVAPVSLLDNWEREVGNFFLREQVSILKLYGNELKAKKCAKESIPQALKSKGIKNLLQSDWVGDAHIVLTTYETLRDQEFSLARQPWSIMVCDEAQKIKNPAALITQSAKAIQAQFKVACTGTPVENTLVDLWCLFDFVQPGLLGALNNFGKDYLRPIEQQNDNAVLESLRKLIEPQTLRRTKEEVAKDLPDKIEDQRCKQLNMLPLQRDLYTHSVASWQNQQEISEGLDQRGSGMLGLLHRLKLICAWPYSVSADLRLRNDAPKVKWLLETLNTIRQSSDDKVIIFTELRDIQRELQHLIAQHFGFKPFIINGDTSTKSGSDQNRQSLIDAFQSTPGFNVIILSTIAVGFGVNVQKANHVIHFTRCWNPAKEDQATDRAYRIGQQKDVYVYYPTVRDSQLMTFEETLDELLNRRRALARDMLKGATDLTAADFEAVLAGTPQA

SEQ ID NO: 2026 - protein, 729 aa, Escherichia coli KOEGE 118 (317a); identical to SEQ ID NO: 1970

SEQ ID NO: 2027 - protein, 246 aa, Escherichia coli KOEGE 118 (317a); identical to SEQ ID NO: 1971

SEQ ID NO: 2028 - protein, 560 aa, Escherichia coli KOEGE 118 (317a); identical to SEQ ID NO: 1972

SEQ ID NO: 2029 - protein, 1084 aa, Escherichia coli KOEGE 118 (317a); identical to SEQ ID NO: 1973

SEQ ID NO: 2030 - protein, 729 aa, Escherichia coli UMEA 3151-1
MSWLNSVLLALTSVQPYMVPATVIGLVSFAFLCFIFFYFFRAVKIINGLKKYTQSINDIENNEPGNQLQHLQSLFVQPELKHAWNEFEESLHSQYELEDGEEKIVRIRATAPSASFFSEQQLVDIPLNTEFFKHLPGILTGVGIIGTFYGLMIGLNHFDPSTPEQVSSSVNNLLRDVLYAFLGSAFAITFSILITWLEKFCLAKCYKYLEKFTAALDALYDSGVGEEYLASLVKSSNESATQARHLKESLVTDLRDMLLHLANSQKVENERLATTLSTTYRETGQQFAEQVSGAIENSLKSPLDKIAGAVQTASGDQSGMVQNMLQDVLTAFMAKLDTTFGQQFTNLNEMMGQTVGAIQTMQTGFGALLQDMRQVSDDSRQGSAQLIEQLLSEMKSGQQAMQAGMNDMLTSLQTSVAKIGAEGEGAGERMARQLEKMFADSEAREKAQAEHMTAFIEAIQNSVQQGQSATMEKMAASVESLGEQLGSLFGQIDKGQQQISANQQANQQSLHEQTQRVMSEVDDQIKQLVETVASQHQGTTETLRLLAEQTNRQIQDMHTGADKMRLAAERFEHAGDRVSEANHLTADVLNKAQSAGSSLSLATSELTSVVADYRNNREAVSKSIAMLELLAANTQSEQTTRTQFIADLKQHGERLQSYNREAQAFMENVSDVLGKGFEDFSEGVSRSLDKTLGKLDVEMAKASTLLAGSVEQIGESVSELDDVLSRVRA

SEQ ID NO: 2031 - protein, 246 aa, Escherichia coli UMEA 3151-1; identical to SEQ ID NO: 1931

SEQ ID NO: 2032 - protein, 560 aa, Escherichia coli UMEA 3151-1; identical to SEQ ID NO: 1968

SEQ ID NO: 2033 - protein, 1080 aa, Escherichia coli UMEA 3151-1; identical to SEQ ID NO: 1969

SEQ ID NO: 2034 - protein, 729 aa, Escherichia coli UMEA 3899-1
MSWLNSVLLALTSVQPYMVPATVIGLVSFAFLCFIFFYFFRAVKIINGLKKYTQSINGIENNEPGNQLQHLQSLFVQPELKHAWNEFEESLHSQYELEDGEEKIVRIRATAPSASFFSEQQLVDIPLNTEFFKHLPGILTGVGIIGTFYGLMIGLNHFDPSTPEQVSSSVNNLLRDVLYAFLGSAFAITFSILITWLEKFCLAKCYKYLEKFTAALDALYDSGVGEEYLASLVKSSNESATQARHLKESLVTDLRDMLLHLANSQKVENERLATTLSTTYRETGQQFAEQVSGAIENSLKSPLDKIAGAVQTASGDQSGMVQNMLQDVLTAFMAKLDTTFGQQFTNLNEMMGQTVGAIQTMQTGFGALLQDMRQVSDDSRQGSAQLIEQLLSEMKSGQQAMQAGMNDMLTSLQASVAKIGAEGEGAGERMARQLEKMFADSEAREKAQAEHMTAFIEAIQNSVQQGQSATMEKMAASVESLGEQLGSLFGQIDKGQQQISANQQANQQSLHEQTQRVMSEVDDQIKQLVETVASQHQGTTETLRLLAEQTNRQIQDMHTGADKMRLAAERFEHAGDRVSEANHLTADVLNKAQSAGSSLSLATSELTSVVADYRNNREAVSKSIAMLELLAANTQSEQTTRTQFIADLKQHGERLQSYNREAQAFMENVSDVLGKGFEDFSEGVSRSLDKTLGKLDVEMAKASTLLAGSVEQIGESVSELDDVLSRVRA

SEQ ID NO: 2035 - protein, 246 aa, Escherichia coli UMEA 3899-1
MFGNAFGVKKRRSDEAEKPFWISYADLMTAMMVLFLVVMVASLSSVTQRIQRAEQGEKTRGQDIFRLCERLELHARNVNKTIVVDCHDNRISFGEAGRFDHNQFFLNAEGQKALQDVVPLVLEASNSEEGKKWFKQIVIEGFTDTDGSYLYNLHLSLQRSEWVMCSLLDSRSPLQKNISAEQQLQIRKLFLAGGVSFNNAKESKEASRRVELRMQFFGLKDKRDKADEVDFPPVVNKEVCQLVMPL

SEQ ID NO: 2036 - protein, 560 aa, Escherichia coli UMEA 3899-1
MTPALNSLSQRIAARLSSSQRDDHYLHNDFHALASAALDMEKRFDKAEKIPLPPQKMRLAALRRLRLAQELTEREWRMVFYGLADNDPSYPDQPVLLEDDTFFPEVNNAIKKRLETKTLKRRDWAALCSSYFAYQNPSPETNPHWCVLRGHIAQGYMVVKAAIRREKSWMKTIEFYHDIFTPQAGGVISRQLLAGESNSLSSLEKIAQIPDSSWLWKRIFTVLLAQLDTLDDPQFLDKISWLLGLAAQWVRFRDDIMTATLTRYYHSIYRDQAHSALKQAALEYWDNPQLKSQQNKWHQYVSEPVAAMVRGWLAKQDLMHFFELLRGNGDVDQARLHYWLRFANQMGFTRIVMGTDAWQDRGSDFVKFREENKGRLSYLRGGRNFDNAMIMQINDYLFVEFSGTGNAMYAYRIGHAPFNPESRTLDINIHLKDKGRCVLRLPHTPRAEGYNKVRITGWMLKYDDELRQLGIRWMTEEAIKFVDKKASSPASMSDIKIINPLRDTAIQHLVEGSSCIVSDNRQKGGVLSVQLNTPDDTIERELLRLGFAPVAKEPHRYWIK

SEQ ID NO: 2037 - protein, 1080 aa, Escherichia coli UMEA 3899-1
MLKRLLSKLTGNRQQIEHHLKNQYQVEENGLSFPLSLVDDSQLWALASWLEQLAEEDYLISLTDRWLLSWDALYRLLEDEEHASSLPLIGVPDVLPLRASLSSRGALSDSDFRVWIAEWATLPARKPIRFSRTGAILTHENQQYLLSRENWALLQATEQLSAQKNQTPGETTNQLGWAAIRKCAKQAAAKFDDYLEKTHVVKPTSLSLRLRKATVADTAVIEIEPHFEDQPANWLGSFDKNSQVHDSYRIPGENGELSHVIIPPEVKEVLNSIHSIPGRRVAGSEALSFVRNPYTFLGEDAASVIAPEEHEQALFDARIFFHHFRLIPQLNAENKIAEVTLVLEPVSPVPQPEITFGFSAPRELDKFIQQLGISVAAQMPAGSWQGYELELSQFTEQQWHDCQALLTRWQQEIEGKEFSDVLDIAKYGDRVIGIGEFEKISSPWLTKSQSENWLPDDIDFSAFSVETLSGWQPENLHHFDELQERITQAEAVGETHITAPWNDSQLPLDAAKTFSKNWEKQQSTANEPQGNVADKTARAVLKIEQNIEETAYIKQRRNSLLNARHAEPEIPLSLKEHIRLKDHQREGVAWLQQLFLRSPEETAGCLLADDMGLGKTLQILSFLVWFIEKFPQEPPSLIVAPVSLLDNWERELDNFFYTAGIPVLKLYGETIKAVKYPKQAIPAHLQSQGIKNLLKPGWQGEAKIILTTYETLRDQEFSLARQPWSIMVCDEAQKIKNPAALITHAANAVQARFKVACTGTPVENTLVDLWSLFDFAQPGLLGALNEFGKHYVRPIENEDGRDTERLESLRALIEPQTLRRTKEEVARDLPQKIEVESCKQLTLSGVQKQLYLSSVANWQQQQALSEGMQQAGTGMLGLLHRLKLICAHPAVVNPEPRFRDNSPKLNWLLKILAELKHTTKDKVIIFTELRDLQRELQHAIHQKFGFRPVIINGDTSTKSQSQNSRQRLIDDFQAQPGFGVIILSTVAVGFGVNVQKANHVIHFTRCWNPAKEDQATDRAYRIGQTKDVYVYYPTVKDTEITTFEETLDDLLQRRRALARDMLCATPDLSGADFEAILKGA

SEQ ID NO: 2038 - protein, 729 aa, Escherichia coli B26-2; identical to SEQ ID NO: 1934

SEQ ID NO: 2039 - protein, 246 aa, Escherichia coli B26-2; identical to SEQ ID NO: 1935

SEQ ID NO: 2040 - protein, 483 aa, Escherichia coli B26-2; identical to SEQ ID NO: 1936

SEQ ID NO: 2041 - protein, 1080 aa, Escherichia coli B26-2; identical to SEQ ID NO: 1941

SEQ ID NO: 2042 - protein, 729 aa, Escherichia coli B102; identical to SEQ ID NO: 1934

SEQ ID NO: 2043 - protein, 246 aa, Escherichia coli B102; identical to SEQ ID NO: 1935

SEQ ID NO: 2044 - protein, 483 aa, Escherichia coli B102; identical to SEQ ID NO: 1936

SEQ ID NO: 2045 - protein, 1080 aa, Escherichia coli B102; identical to SEQ ID NO: 1941

SEQ ID NO: 2046 - protein, 729 aa, Escherichia coli B107; identical to SEQ ID NO: 1934

SEQ ID NO: 2047 - protein, 246 aa, Escherichia coli B107; identical to SEQ ID NO: 1935

SEQ ID NO: 2048 - protein, 483 aa, Escherichia coli B107; identical to SEQ ID NO: 1936

SEQ ID NO: 2049 - protein, 1080 aa, Escherichia coli B107; identical to SEQ ID NO: 1941

SEQ ID NO: 2050 - protein, 729 aa, Escherichia coli B26-1; identical to SEQ ID NO: 1934

SEQ ID NO: 2051 - protein, 246 aa, Escherichia coli B26-1; identical to SEQ ID NO: 1935

SEQ ID NO: 2052 - protein, 483 aa, Escherichia coli B26-1; identical to SEQ ID NO: 1936

SEQ ID NO: 2053 - protein, 1080 aa, Escherichia coli B26-1; identical to SEQ ID NO: 1941

SEQ ID NO: 2054 - protein, 729 aa, Escherichia coli B103; identical to SEQ ID NO: 1934

SEQ ID NO: 2055 - protein, 246 aa, Escherichia coli B103; identical to SEQ ID NO: 1935

SEQ ID NO: 2056 - protein, 504 aa, Escherichia coli B103; identical to SEQ ID NO: 1940

SEQ ID NO: 2057 - protein, 1080 aa, Escherichia coli B103; identical to SEQ ID NO: 1941

SEQ ID NO: 2058 - protein, 175 aa, Escherichia coli B104
MTAMMVLFLVVMVASLSSVTQRIQRAEQGEKARGQDISRLCERLELHARNVNKNIDEPYQLFPERRGEKALQDVVPLVLEASNSEEGRSGLSRSLLKGPLIKKFASWLCHYDPALNSLSQRIAARLSSSQRDDHYLHNDFHALTAATLDMEKRLIKNPRHKKCGWRLSVPVSEQN

SEQ ID NO: 2059 - protein, 307 aa, Escherichia coli B104
MLGLAAQWVRFRDDIMTATLTRYYHSGYRDQSHPALKKSQQNKWHQYVSESVAAMVRGWLAKQDLTHFFELLRGNGDVDQARLHYWLRFANQMGFTRIIMGSDAWQDRGSDFVKFREENKGRLSYLRGGRNFDNAMVMQINDYLFVEFSGTGNAMYAYQIGHAPFNPESRTLDINIHLKDQGRCALRLPHAPRAEGYNKVRITGWMLKYDDELRKLGIRWMAEEPVRFVDKKVPPPVAMSDIKIINPLRDTAIQRLVKCSSCIVSDNRHKGGILSVQLITPDDTVERELLRLGFAPVAKEPHRYWIK

SEQ ID NO: 2060 - protein, 111 aa, Escherichia coli B104
MLKRLLSKLTGNRQQIEHHLKNQYQVEENGLSFPLSLVDDSQLWALASWLEQLAEEDYLISLTDRWLLSWEALYRLLEDEEHASSLPLIGVPDILPLRASLSSRGALSDII

SEQ ID NO: 2061 - protein, 729 aa, Escherichia coli B105; identical to SEQ ID NO: 1934

SEQ ID NO: 2062 - protein, 246 aa, Escherichia coli B105; identical to SEQ ID NO: 1935

SEQ ID NO: 2063 - protein, 483 aa, Escherichia coli B105; identical to SEQ ID NO: 1936

SEQ ID NO: 2064 - protein, 1080 aa, Escherichia coli B105; identical to SEQ ID NO: 1941

SEQ ID NO: 2065 - protein, 729 aa, Escherichia coli B106; identical to SEQ ID NO: 1934

SEQ ID NO: 2066 - protein, 246 aa, Escherichia coli B106; identical to SEQ ID NO: 1935

SEQ ID NO: 2067 - protein, 483 aa, Escherichia coli B106; identical to SEQ ID NO: 1936

SEQ ID NO: 2068 - protein, 1080 aa, Escherichia coli B106; identical to SEQ ID NO: 1941

SEQ ID NO: 2069 - protein, 729 aa, Escherichia coli B40-1; identical to SEQ ID NO: 1934

SEQ ID NO: 2070 - protein, 246 aa, Escherichia coli B40-1; identical to SEQ ID NO: 1935

SEQ ID NO: 2071 - protein, 483 aa, Escherichia coli B40-1; identical to SEQ ID NO: 1936

SEQ ID NO: 2072 - protein, 1080 aa, Escherichia coli B40-1; identical to SEQ ID NO: 1941

SEQ ID NO: 2073 - protein, 729 aa, Escherichia coli B40-2; identical to SEQ ID NO: 1934

SEQ ID NO: 2074 - protein, 246 aa, Escherichia coli B40-2; identical to SEQ ID NO: 1935

SEQ ID NO: 2075 - protein, 504 aa, Escherichia coli B40-2; identical to SEQ ID NO: 1940

SEQ ID NO: 2076 - protein, 1080 aa, Escherichia coli B40-2; identical to SEQ ID NO: 1941

SEQ ID NO: 2077 - protein, 729 aa, Escherichia coli B49-2; identical to SEQ ID NO: 1934

SEQ ID NO: 2078 - protein, 246 aa, Escherichia coli B49-2; identical to SEQ ID NO: 1935

SEQ ID NO: 2079 - protein, 483 aa, Escherichia coli B49-2; identical to SEQ ID NO: 1936

SEQ ID NO: 2080 - protein, 1080 aa, Escherichia coli B49-2; identical to SEQ ID NO: 1941

SEQ ID NO: 2081 - protein, 729 aa, Escherichia coli B83; identical to SEQ ID NO: 1934

SEQ ID NO: 2082 - protein, 246 aa, Escherichia coli B83; identical to SEQ ID NO: 1935

SEQ ID NO: 2083 - protein, 483 aa, Escherichia coli B83; identical to SEQ ID NO: 1936

SEQ ID NO: 2084 - protein, 1080 aa, Escherichia coli B83; identical to SEQ ID NO: 1941

SEQ ID NO: 2085 - protein, 729 aa, Escherichia coli B84; identical to SEQ ID NO: 1934

SEQ ID NO: 2086 - protein, 246 aa, Escherichia coli B84; identical to SEQ ID NO: 1935

SEQ ID NO: 2087 - protein, 483 aa, Escherichia coli B84; identical to SEQ ID NO: 1936

SEQ ID NO: 2088 - protein, 1080 aa, Escherichia coli B84; identical to SEQ ID NO: 1941

SEQ ID NO: 2089 - protein, 729 aa, Escherichia coli B85; identical to SEQ ID NO: 1934

SEQ ID NO: 2090 - protein, 246 aa, Escherichia coli B85; identical to SEQ ID NO: 1935

SEQ ID NO: 2091 - protein, 483 aa, Escherichia coli B85; identical to SEQ ID NO: 1936

SEQ ID NO: 2092 - protein, 1080 aa, Escherichia coli B85; identical to SEQ ID NO: 1941

SEQ ID NO: 2093 - protein, 729 aa, Escherichia coli B86; identical to SEQ ID NO: 1934

SEQ ID NO: 2094 - protein, 246 aa, Escherichia coli B86; identical to SEQ ID NO: 1935

SEQ ID NO: 2095 - protein, 504 aa, Escherichia coli B86; identical to SEQ ID NO: 1940

SEQ ID NO: 2096 - protein, 1080 aa, Escherichia coli B86; identical to SEQ ID NO: 1941

SEQ ID NO: 2097 - protein, 729 aa, Escherichia coli; identical to SEQ ID NO: 1970

SEQ ID NO: 2098 - protein, 246 aa, Escherichia coli; identical to SEQ ID NO: 1971

SEQ ID NO: 2099 - protein, 560 aa, Escherichia coli; identical to SEQ ID NO: 1972

SEQ ID NO: 2100 - protein, 1084 aa, Escherichia coli; identical to SEQ ID NO: 1973

SEQ ID NO: 2101 - protein, 729 aa, Escherichia coli; identical to SEQ ID NO: 1970

SEQ ID NO: 2102 - protein, 246 aa, Escherichia coli; identical to SEQ ID NO: 1971

SEQ ID NO: 2103 - protein, 560 aa, Escherichia coli; identical to SEQ ID NO: 1972

SEQ ID NO: 2104 - protein, 1084 aa, Escherichia coli; identical to SEQ ID NO: 1973

SEQ ID NO: 2105 - protein, 729 aa, Escherichia coli; identical to SEQ ID NO: 1970

SEQ ID NO: 2106 - protein, 246 aa, Escherichia coli; identical to SEQ ID NO: 1971

SEQ ID NO: 2107 - protein, 560 aa, Escherichia coli; identical to SEQ ID NO: 1972

SEQ ID NO: 2108 - protein, 1084 aa, Escherichia coli; identical to SEQ ID NO: 1973

SEQ ID NO: 2109 - protein, 698 aa, Escherichia coli 1-176-05_S3_C2
MIGLHHFDPSTPEQVSASVANLLRDVLYAFLGSAFAITFSILVTMFEKWRLAQCYKNLELLTASIDQLFEGGVGEDYLSQLLSSTKENTTHARQLKDGLVTDLREMLQNLVDSQVRENQKLAETLSTTYRESGQQFAEQVSGAIETSLKNPLDKIAGVVQTASGDQSHRVQSMLENVLTAFMSKMDNTFGQQFTTMQEMMGRSVEAIQSMQSGFSTLLQDMRQAGDDSRQGSAQLISQLLSEMKSGQQEMQAGMNEMLRSLQESVARIGAEGEGAGERMAQQLEKIFADSEAREKAMAEQMRAFIEAIQSSVQQGQNETMEKMAASVDTLGSHMATLFAQLENGQQQLNQQQNQAQNLLMGNMSKGIETLTQNLAGVFSQLESGQKQMSQTQEQGQRVLHEETQQLLARSEAREQAAAEQQQQFMTSLQQTMHSGQDALREKMTSGIDHLGSQLGNLFGQLEEGQKSLSQQQQSAQSALQQEAQRIIGQLESQVESLMQMLREQQSASGDLLQRMAQNTTRHLEEIQTGADKMRVAADRFEAAGDRVAEANQLTAEVLNGTQQAGRTLSSASAELGALIADYRNTREVVANAITALETLINRSHDEQTSRSRFVDDLKAYSERLQQYNREAQEFLHNIAEVMGTSFESFTTGVENGLNRSLQEMDTQLTKAAGALSSSVEIIGESVDTLETVLRHRRA

SEQ ID NO: 2110 - protein, 245 aa, Escherichia coli 1-176-05_S3_C2
MFNRVFNGRQRRSDEAEKPFWISYADLMTAMMVLFLVVMVASLSSVTQRIQQAEAGEKSRGHDIARLCEKLELQAKNLNKTIQVDCHDNRISFGEAGRFEHNRFALNAEGLQALQDVVPLVLEAANSDEGKKWFKQIVIEGFTDTDGSYLYNLHLSLQRSEWVMCSLLDSRSALQQKITPEQQVQIRKLFLAGGVSFNNAKESKEASRRVELRMQFFGLKDKKRDESMDVVPGISQETCQLGAMQ

SEQ ID NO: 2111 - protein, 595 aa, Escherichia coli 1-176-05_S3_C2
MTSAIEKLKTRLLPYREQNVQPTVSHAFHYLQRVIAQLERKVDARAVQMVPPLEKRRQAIARLRAGDTPKPFEWKMIFFGLNDVAEGDLFEIALIDDATNFARIIAEIEQKIAQQRLTRREWLALCTSYFGHSSDTPEKNPQWLQLRTQIARGFQQLKESALRQMSWMSVIDTYSDIFTDNAGFLLGQQLGRGEITDISVLEKVAQIPQTSWLWRKIVNHLVNEIFCLTDDDFQQKIHSLIALSRQLTRFKDNILAATLTRYYQSAFKHQTHFELKQLALEYWGNPQLTSRNKSWQVHVENPVLLMVQGWFAKDDLKLFFELLKGNRDVDHARLFYWLRFANQMSYTRIVLGEDALRSKDADYVEFRAKNAGRLSRLQGSGSRDNNAMIMRIGDYLFVEFSKVGAMYAYHMGNAPFNPETGILDIDYDLKDKRNNRHKVRLRLPHLSPVFLYSLNRIEGWMSRYDEELRKLGIDYVAEDLNQSSVTLDISRFNASKTVSRPESASLSEHEVSDAKSDREEQIKIIASSLKAKKDLPDREQQIREIIRSVDCKVMDKRGLGGAIHIQFNEPDHEAAQKLLSLGFKPVLGKFTYWSK

SEQ ID NO: 2112 - protein, 1079 aa, Escherichia coli 1-176-05_S3_C2
MFKKLLGKFIKENTSLPASFAPLYVMKEEGFAFPFSLADSEDNWPVASCLEQLHEEDYVSHWSDCWFLSWDDFYRIRKNDDYASSLAIFAFPSQRNLTAHLAATGSISDDTFRVFIDKWTLPDDYRPVEITCTGASFSSAEGTFVLSEENWQLLDALQQLRLQQRQTPGETVNQTRWAKIRRQAKKAGAKLDDYLAKTIVIRPESLQLKLRKSLVVDTPVLEIEPVFDEQPANWLQSFDRTQQVQDRYRVLGDDGVLNHVILSPEVKDVLTSVHAITGRRVAGDDALSFVRNPYTWIGEEASLVLDPDVYEQNLQDAGIYFYDFRLEPQIDENRQIAAVTLLLSPRTEQSVADETYIFKRPGELAALLSELEQKLAVQLPAGVWQGYDLELSRFSQEELQGYQALLENWQHQAAGMNFTHVLDLNKYSDRVIGIGEFEKISSPYLVKSESEKWLPENLAQEMCEAMFSGWDLDNHQHFQELEERLEEAKATDAPEVAMPWNDNLLPREEAEIFHDKWKKKIDGETNDGVSSEPVSRAVLLIEQNIEQALYVKQRRDSLLGAHQAEVELPMILKTSIQLREHQRKGVAWLQQLYLKSPIETAGCLLADDMGLGKTLQILTFLIWHRERFPDAPPSLIVAPVSLLDNWEREVGNFFLREQVSILKLYGNELKAKKCAKESIPQALKSKGIKNLLQSDWVGDAHIVLTTYETLRDQEFSLARQPWSIMVCDEAQKIKNPAALITQSAKAIQAQFKVACTGTPVENTLVDLWCLFDFVQPGLLGALNNFGKDYLRPIEQQNDNAVLESLRKLIEPQTLRRTKEEVAKDLPDKIEDQRCKQLNMLPLQRDLYTHSVASWQNQQEISEGLDQRGSGMLGLLHRLKLICAWPYSVSADLRLRNDAPKVKWLLETLNTIRQSSDDKVIIFTELRDIQRELQHLIAQHFGFKPFIINGDTSTKSGSDQNRQSLIDTFQSTPGFNVIILSTIAVGFGVNVQKANHVIHFTRCWNPAKEDQATDRAYRIGQQKDVYVYYPTVRDSQLMTFEETLDELLNRRRALARDMLKGATDLSAADFEAVLAGTPLA

SEQ ID NO: 2113 - protein, 729 aa, Escherichia coli O157:H7 str. 2011EL-2114; identical to SEQ ID NO: 1934

SEQ ID NO: 2114 - protein, 246 aa, Escherichia coli O157:H7 str. 2011EL-2114; identical to SEQ ID NO: 1935

SEQ ID NO: 2115 - protein, 560 aa, Escherichia coli O157:H7 str. 2011EL-2114
MIPALNSLSQRIAARLSSSQRDDHYLHNDFHALTAATLDMEKRFDRAERIPSPPQEMRLEALRRFRLAQELTEREWRMVFYGLADNDPLYPDQPILLEDDTFFPRVNSAIKKRIETKTLKRRDWAALCSSYFAYQHQSPETNPHWCVLRGHIAQGYLVVKAAIRREKSWMKTIEFYHDIFTPQAGGVISRQLLAGENNSLSSLEKIAQIPDSSWLWKRIFTVLLAQLDTLDDPQFLSKISWLLGLAAQWVRFRDDIMTATLTRYYHSGYRDQSHPALKQAALEYWDNPQLKSQQNKWHQYVSESVAAMVRGWLAKQDLTHFFELLRGNGDVDQARLHYWLRFANQMGFTRIIMGSDAWQDRGSDFVKFREENKGRLSYLRGGRNFDNAMVMQINDYLFVEFSGTGNAMYAYQIGHAPFNPESRTLDINIHLKDQGRCALRLPHAPRAEGYNKVRITGWMLKYDDELRKLGIRWMAEEPVRFVDKKVPPPVAMSDIKIINPLRDTAIQRLVKCSSCIVSDNRHKGGILSVQLITPDDTVERELLRLGFAPVAKEPHRYWIK

SEQ ID NO: 2116 - protein, 1080 aa, Escherichia coli O157:H7 str. 2011EL-2114; identical to SEQ ID NO: 1941

SEQ ID NO: 2117 - protein, 729 aa, Escherichia coli O157:H7 str. 2011EL-2113; identical to SEQ ID NO: 1934

SEQ ID NO: 2118 - protein, 246 aa, Escherichia coli O157:H7 str. 2011EL-2113; identical to SEQ ID NO: 1935

SEQ ID NO: 2119 - protein, 560 aa, Escherichia coli O157:H7 str. 2011EL-2113; identical to SEQ ID NO: 2115

SEQ ID NO: 2120 - protein, 1080 aa, Escherichia coli O157:H7 str. 2011EL-2113; identical to SEQ ID NO: 1941

SEQ ID NO: 2121 - protein, 729 aa, Escherichia coli O157:H7 str. F7350; identical to SEQ ID NO: 1934

SEQ ID NO: 2122 - protein, 246 aa, Escherichia coli O157:H7 str. F7350; identical to SEQ ID NO: 1935

SEQ ID NO: 2123 - protein, 560 aa, Escherichia coli O157:H7 str. F7350; identical to SEQ ID NO: 2115

SEQ ID NO: 2124 - protein, 1080 aa, Escherichia coli O157:H7 str. F7350; identical to SEQ ID NO: 1941

SEQ ID NO: 2125 - protein, 729 aa, Escherichia coli O157:H7 str. 2011EL-2103; identical to SEQ ID NO: 1934

SEQ ID NO: 2126 - protein, 246 aa, Escherichia coli O157:H7 str. 2011EL-2103; identical to SEQ ID NO: 1935

SEQ ID NO: 2127 - protein, 560 aa, Escherichia coli O157:H7 str. 2011EL-2103; identical to SEQ ID NO: 2115

SEQ ID NO: 2128 - protein, 1080 aa, Escherichia coli O157:H7 str. 2011EL-2103; identical to SEQ ID NO: 1941

SEQ ID NO: 2129 - protein, 729 aa, Escherichia coli O157:H7 str. 2011EL-2104; identical to SEQ ID NO: 1934

SEQ ID NO: 2130 - protein, 246 aa, Escherichia coli O157:H7 str. 2011EL-2104; identical to SEQ ID NO: 1935

SEQ ID NO: 2131 - protein, 560 aa, Escherichia coli O157:H7 str. 2011EL-2104; identical to SEQ ID NO: 2115

SEQ ID NO: 2132 - protein, 1080 aa, Escherichia coli O157:H7 str. 2011EL-2104; identical to SEQ ID NO: 1941

SEQ ID NO: 2133 - protein, 729 aa, Escherichia coli O157:H7 str. 2011EL-2105; identical to SEQ ID NO: 1934

SEQ ID NO: 2134 - protein, 246 aa, Escherichia coli O157:H7 str. 2011EL-2105; identical to SEQ ID NO: 1935

SEQ ID NO: 2135 - protein, 560 aa, Escherichia coli O157:H7 str. 2011EL-2105; identical to SEQ ID NO: 2115

SEQ ID NO: 2136 - protein, 1080 aa, Escherichia coli O157:H7 str. 2011EL-2105; identical to SEQ ID NO: 1941

SEQ ID NO: 2137 - protein, 729 aa, Escherichia coli O157:H7 str. 2011EL-2106; identical to SEQ ID NO: 1934

SEQ ID NO: 2138 - protein, 246 aa, Escherichia coli O157:H7 str. 2011EL-2106; identical to SEQ ID NO: 1935

SEQ ID NO: 2139 - protein, 560 aa, Escherichia coli O157:H7 str. 2011EL-2106; identical to SEQ ID NO: 2115

SEQ ID NO: 2140 - protein, 1080 aa, Escherichia coli O157:H7 str. 2011EL-2106; identical to SEQ ID NO: 1941

SEQ ID NO: 2141 - protein, 729 aa, Escherichia coli O157:H7 str. 2011EL-2107; identical to SEQ ID NO: 1934

SEQ ID NO: 2142 - protein, 246 aa, Escherichia coli O157:H7 str. 2011EL-2107; identical to SEQ ID NO: 1935

SEQ ID NO: 2143 - protein, 560 aa, Escherichia coli O157:H7 str. 2011EL-2107; identical to SEQ ID NO: 2115

SEQ ID NO: 2144 - protein, 1080 aa, Escherichia coli O157:H7 str. 2011EL-2107; identical to SEQ ID NO: 1941

SEQ ID NO: 2145 - protein, 729 aa, Escherichia coli O157:H7 str. 2011EL-2108; identical to SEQ ID NO: 1934

SEQ ID NO: 2146 - protein, 246 aa, Escherichia coli O157:H7 str. 2011EL-2108; identical to SEQ ID NO: 1935

SEQ ID NO: 2147 - protein, 560 aa, Escherichia coli O157:H7 str. 2011EL-2108; identical to SEQ ID NO: 2115

SEQ ID NO: 2148 - protein, 1080 aa, Escherichia coli O157:H7 str. 2011EL-2108; identical to SEQ ID NO: 1941

SEQ ID NO: 2149 - protein, 729 aa, Escherichia coli O157:H7 str. 2011EL-2109; identical to SEQ ID NO: 1934

SEQ ID NO: 2150 - protein, 246 aa, Escherichia coli O157:H7 str. 2011EL-2109; identical to SEQ ID NO: 1935

SEQ ID NO: 2151 - protein, 560 aa, Escherichia coli O157:H7 str. 2011EL-2109; identical to SEQ ID NO: 2115

SEQ ID NO: 2152 - protein, 1080 aa, Escherichia coli O157:H7 str. 2011EL-2109; identical to SEQ ID NO: 1941

SEQ ID NO: 2153 - protein, 729 aa, Escherichia coli O157:H7 str. 2011EL-2111; identical to SEQ ID NO: 1934

SEQ ID NO: 2154 - protein, 246 aa, Escherichia coli O157:H7 str. 2011EL-2111; identical to SEQ ID NO: 1935

SEQ ID NO: 2155 - protein, 560 aa, Escherichia coli O157:H7 str. 2011EL-2111; identical to SEQ ID NO: 2115

SEQ ID NO: 2156 - protein, 1080 aa, Escherichia coli O157:H7 str. 2011EL-2111; identical to SEQ ID NO: 1941

SEQ ID NO: 2157 - protein, 729 aa, Escherichia coli O157:H7 str. 2011EL-2112; identical to SEQ ID NO: 1934

SEQ ID NO: 2158 - protein, 246 aa, Escherichia coli O157:H7 str. 2011EL-2112; identical to SEQ ID NO: 1935

SEQ ID NO: 2159 - protein, 560 aa, Escherichia coli O157:H7 str. 2011EL-2112; identical to SEQ ID NO: 2115

SEQ ID NO: 2160 - protein, 1080 aa, Escherichia coli O157:H7 str. 2011EL-2112; identical to SEQ ID NO: 1941

SEQ ID NO: 2161 - protein, 729 aa, Escherichia coli O111:NM str. 2010C-4735; identical to SEQ ID NO: 1934

SEQ ID NO: 2162 - protein, 246 aa, Escherichia coli O111:NM str. 2010C-4735; identical to SEQ ID NO: 1935

SEQ ID NO: 2163 - protein, 560 aa, Escherichia coli O111:NM str. 2010C-4735; identical to SEQ ID NO: 2115

SEQ ID NO: 2164 - protein, 1080 aa, Escherichia coli O111:NM str. 2010C-4735; identical to SEQ ID NO: 1941

SEQ ID NO: 2165 - protein, 729 aa, Escherichia coli O157:H7 str. F7377; identical to SEQ ID NO: 1934

SEQ ID NO: 2166 - protein, 246 aa, Escherichia coli O157:H7 str. F7377; identical to SEQ ID NO: 1935

SEQ ID NO: 2167 - protein, 560 aa, Escherichia coli O157:H7 str. F7377; identical to SEQ ID NO: 2115

SEQ ID NO: 2168 - protein, 1080 aa, Escherichia coli O157:H7 str. F7377; identical to SEQ ID NO: 1941

SEQ ID NO: 2169 - protein, 729 aa, Escherichia coli O123:H11 str. 2009C-3307; identical to SEQ ID NO: 1934

SEQ ID NO: 2170 - protein, 246 aa, Escherichia coli O123:H11 str. 2009C-3307; identical to SEQ ID NO: 1935

SEQ ID NO: 2171 - protein, 560 aa, Escherichia coli O123:H11 str. 2009C-3307; identical to SEQ ID NO: 2115

SEQ ID NO: 2172 - protein, 1080 aa, Escherichia coli O123:H11 str. 2009C-3307; identical to SEQ ID NO: 1941

SEQ ID NO: 2173 - protein, 729 aa, Escherichia coli 3-105-05_S1_C2
MSWLNSVLLALTSVQPYMVPATVIGLVSFAFLCFIFFYFFRAVKIINGLKKYTQSINVIENNEPGNQLQHLQSLFVQPELKHAWNEFEESLHSQYELEDGEEKIVRIRATAPSASFFSEQQLVDIPLNTEFFKHLPGILTGVGIIGTFYGLMIGLNHFDPSTPEQVSSSVNNLLRDVLYAFLGSAFAITFSILITWLEKFCLAKCYKYLEKFTAALDALYDSGVGEEYLASLVKSSNESATQARHLKESLVTDLRDMLLHLANSQKVENERLATTLSTTYRETGQQFAEQVSGAIENSLKSPLDKIAGAVQTASGDQSGMVQNMLQDVLTAFMAKLDTTFGQQFTNLNEMMGQTVGAIQTMQTGFGALLQDMRQVSDDSRQGSAQLIEQLLSEMKSGQQAMQAGMNDMLTSLQTSVAKIGAEGEGAGERMARQLEKMFADSEAREKAQAEHMTAFIEAIQNSVQQGQSATMEKMAASVESLGEQLGSLFGQIDKGQQQISANQQANQQSLHEQTQRVMSEVDDQIKQLVETVASQHQGTTETLRLLAEQTNRQIQDMHTGADKMRLAAERFEHAGDRVSEANHLTADVLNKAQSAGSSLSLATSELTSVVADYRNNREAVSKSIAMLELLAANTQSEQTTRTQFIADLKQHGERLQSYNREAQAFMENVSDVLGKGFEDFSEGVSRSLDKTLGKLDVEMAKASTLLAGSVEQIGESVSELDDVLSRVRA

SEQ ID NO: 2174 - protein, 246 aa, Escherichia coli 3-105-05_S1_C2; identical to SEQ ID NO: 1931

SEQ ID NO: 2175 - protein, 560 aa, Escherichia coli 3-105-05_S1_C2; identical to SEQ ID NO: 1968

SEQ ID NO: 2176 - protein, 1080 aa, Escherichia coli 3-105-05_S1_C2; identical to SEQ ID NO: 1969

SEQ ID NO: 2177 - protein, 729 aa, Escherichia coli; identical to SEQ ID NO: 1934

SEQ ID NO: 2178 - protein, 246 aa, Escherichia coli; identical to SEQ ID NO: 1935

SEQ ID NO: 2179 - protein, 560 aa, Escherichia coli; identical to SEQ ID NO: 2115

SEQ ID NO: 2180 - protein, 1080 aa, Escherichia coli
MLKRLLSKLTGNRQQIEHHLKNQYQVEENGLSFPLSLVDDSQLWALASWLEQLAEEDYLISLTDRWLLSWEALYRLLEDEEHASSLPLIGVPDILPLRASLSSRGALSDSDFRVWIAEWATFPARKPIRFSRTGAILTHDNQQYLLSRENWALLQETEQLSAQQIQTPGETTNQLGWAAIRKCAKLAAAKFDDYLEKTHVIKPTSLSLRLRKATVADTAVIEIEPHFEDQPANWLGSFDKNLQVHDSYRIPGENGELSHVIIPPEVKEVLNSIHSIPGRRVAGSEALSFVRNPYTFLGEDAASVIAPEEHEQALFDARIFFHHFRLIPQLNAENKIAEVTLILEPVSPVPQPEITFVFSAPWELDKFIQQLGISVAAQMPAGSWQGYELELSQFTEQQWHDCQALLTRWQQEIEGKEFSDVLDIAKYGDRVIGIGEFEKISSPWLTKAQSENWLPDDIDFSAFSIETLSGWQPENPHHFDELQEKITQAEAAGETYITTPWNDSQLPLDAAKTFSKNWEKQQITANEYQGNVADKTARAVLKIEQNIEETAYIKQRRNSLLNARHAEPEIPLSLKEHIRLKDHQREGVAWLQQLFLRSPEETAGCLLADDMGLGKTLQILSFLVWFIEKFPQEPPNLIVAPVSLLDNWERELNNFFYTAGIPVLKLYGETIKAVKYPKQAIPAHLQSKGIKNLLKPGWQGEAKIILTTYETLRDQEFSLARQPWSIMVCDEAQKIKNPAALITHAANAVQARFKVACTGTPVENTLVDLWSLFDFAQPGLLGALNEFGKQYVRPIENEDGRDTERLESLRALIEPQTLRRTKEEVARDLPQKIEVESCKQLTLSGVQKQLYLSSVANWQQQQALREGMQQAGTGMLGLLHRLKLICAHPAIVNPEPRFRDNSPKLNWLLKILTEIKHTSKDKVIIFTELRDLQRELQHAIHQNFGFRPVIINGDSSTKSQSQNSRQRLIDDFQAQPGFGVIILSTVAVGFGVNVQKANHVIHFTRCWNPAKEDQATDRAYRIGQTKNVYVYYPTVRDTEITTFEETLDDLLQRRRALARDMLCATPDLNCADFETILKGA

SEQ ID NO: 2181 - protein, 729 aa, Escherichia coli; identical to SEQ ID NO: 1934

SEQ ID NO: 2182 - protein, 246 aa, Escherichia coli; identical to SEQ ID NO: 1935

SEQ ID NO: 2183 - protein, 560 aa, Escherichia coli; identical to SEQ ID NO: 2115

SEQ ID NO: 2184 - protein, 1080 aa, Escherichia coli
MLKRLLSKLTGNRQQIEHHLKNQYQVEENGLSFPLSLVDDSQLWALASWLEQLAEEDYLISLTDRWLLSWEALYRLLEDEEHASSLPLIGVPDILPLRASLSSRGALSDSDFRVWIAEWATFPARKPIRFSRTGAILTHDNQQYLLSRENWALLQATEQLSAQQIQTPGETTNQLGWAAIRKCAKLAAAKFDDYLEKTHVIKPTSLSLRLRKATVADTAVIEIEPHFEDQPANWLGSFDKNLQVHDSYRIPGENGELSHVIIPPEVKEVLNSIHSIPGRRVAGSEALSFVRNPYTFLGEDAASVIAPEEHEQALFDARIFFHHFRLIPQLNAENKIAEVTLILEPVSPVPQPEITFVFSAPWELDKFIQQLGISVAAQMPAGSWQGYELELSQFTEQQWHDCQALLTRWQQEIEGKEFSDVLDIAKYGDRVIGIGEFEKISSPWLTKAQSENWLPDDIDFSAFSIETLSGWQPENPHHFDELQEKITQAEAAGETYITTPWNDSQLPLDAAKTFSKNWEKQQITANEYQGNVADKTARAVLKIEQNIEETAYIKQRRNSLLNARHAEPEIPLSLKEHIRLKDHQREGVAWLQQLFLRSPEETAGCLLADDMGLGKTLQILSFLVWFIEKFPQEPPNLIVAPVSLLDNWERELNNFFYTAGIPVLKLYGETIKAVKYPKQAIPAHLQSKGIKNLLKPGWQGEAKIILTTYETLRDQEFSLARQPWSIMVCDEAQKIKNPAALITHAANAVQARFKVACTGTPVENTLVDLWSLFDFAQPGLLGALNEFGKQYVRPIENEDGRDTERLESLRALIEPQTLRRTKEEVARDLPQKIEVESCKQLTLSGVQKQLYLSSVANWQQQQALREGMQQAGTGMLGLLHRLKLICAHPAIVNPEPRFRDNSPKLNWLLKILTEIKHTSKDKVIIFTELRDLQRELQHAIHQNFGFRPVIINGDSSTKSQSQNSRQRLIDDFQAQPGFGVIILSTVAVGFGVNVQKANHVIHFTRCWNPAKEDQATDRAYRIGQTKNVYVYYPTVRDTEITTFEETLDDLLQRRRALARDMLCATPDLNCADFETILKGA

SEQ ID NO: 2185 - protein, 729 aa, Escherichia coli; identical to SEQ ID NO: 1934

SEQ ID NO: 2186 - protein, 246 aa, Escherichia coli; identical to SEQ ID NO: 1935

SEQ ID NO: 2187 - protein, 560 aa, Escherichia coli
MIPALNSLSQRIAARLSSSQRDDHYLHNDFHALTAATLDMEKRFDRAERIPSPPQEMRLEALRRFRLAQELTEREWRMVFYGLADNDPLYPDQPILLEDDTFFPRVNSAIKKRIETKTLKRRDWAALCSSYFAYQHQSPETNPHWCVLRGHIAQGYLVVKAAIRREKSWMKTIEFYHDIFTPQAGGVISRQLLAGENNSLSSLEKIAQIPDSSWLWKRIFTVLLAQLDTLDDPQFLSKISWLLGLAAQWVRFRDDIMTATLTRYYHSGYRDQSHPALKQAALEYWDNPQLKSQQNKWHQYVSESVAAMVRGWLAKQDLTHFFELLRGNGDVDQARLHYWLRFANQMGFTRIIMGSDAWQDRGSDFVKFREENKGRLSYLRGGRNFDNAMVMQINDYLFVEFSGTGNAMYAYQIGHAPFNPESRTLDINIHLKDQGRCALRLPHAPRAEGYNKVRITGWMLKYDDELRKLGIRWMAEEPVRFVDKKVPPPVAMSDIKIINPLRDTAIQHLVKCSSCIVSDNRHKGGILSVQLITPDDTVEKELLRLGFAPVAKEPHRYWIK

SEQ ID NO: 2188 - protein, 1080 aa, Escherichia coli; identical to SEQ ID NO: 1941

SEQ ID NO: 2189 - protein, 729 aa, Escherichia coli; identical to SEQ ID NO: 1934

SEQ ID NO: 2190 - protein, 246 aa, Escherichia coli; identical to SEQ ID NO: 1935

SEQ ID NO: 2191 - protein, 560 aa, Escherichia coli; identical to SEQ ID NO: 2187

SEQ ID NO: 2192 - protein, 1080 aa, Escherichia coli
MLKRLLSKLTGNRQQIEHHLKNQYQVEENGLSFPLSLVDDSQLWALASWLEQLAEEDYLISLTDRWLLSWEALYRLLEDEEHASSLPLIGVPDILPLRASLSSRGALSDSDFRVWIAEWATFPARKPIRFSRTGAILTHDNQQYLLSRENWALLQATEQLSAQQIQTPGETTNQLGWAAIRKCAKLAAAKFDDYLEKTHVIKPTSLSLRLRKATVADTAVIEIEPHFEDQPANWLGSFDKNLQVHDSYRIPGENGELSHVIIPPEVKEVLNSIHSIPGRRVAGSEALSFVRNPYTFLGEDAASVIAPEEHEQALFDARIFFHHFRLIPQLNTENKITEVTLILEPVSPVPQPEITFVFSAPWELDKFIQQLGISVAAQMPAGSWQGYELELSQFTEQQWHDCQALLTRWQQEIEGKEFSDVLDIAKYGDRVIGIGEFEKISSPWLTKAQSENWLPDGIDFSAFSIETLSGWQPENPLHFDELQEIITQAEAAGETYITTPWNDSQLPLDAAKTFSKNWEKQQITANEYQGNVADKTARAVLKIEQNIEETAYIKQRRNSLLNERHAEPEIPLSLKEHIRLKDHQREGVAWLQQLFLRSPEETAGCLLADDMGLGKTLQILSFLVWFIEKFPQEPPNLIVAPVSLLDNWERELNNFFYTAGIPVLKLYGETIKAVKYPKQAIPAHLQSKGIKNLLKPGWQGEAKIILTTYETLRDQEFSLARQPWSIMVCDEAQKIKNPAALITHAANAVQARFKVACTGTPVENTLVDLWSLFDFAQPGLLGALNEFGKQYVRPIENEDGRDTERLESLRALIEPQTLRRTKEEVARDLPQKIEVESCKQLTLSGVQKQLYLSSVANWQQQQALREGMQQAGTGMLGLLHRLKLICAHPAIVNPEPRFRDNSPKLNWLLKILAEIKHTSKDKVIIFTELRDLQRELQHAIHQNFGFRPVIINGDSSTKSQSQNSRQRLIDDFQAQPGFGVIILSTVAVGFGVNVQKANHVIHFTRCWNPAKEDQATDRAYRIGQTKNVYVYYPTVRDTEITTFEETLDDLLQRRRALARDMLCATPDLNCADFETILKGA

SEQ ID NO: 2193 - protein, 729 aa, Escherichia coli; identical to SEQ ID NO: 1934

SEQ ID NO: 2194 - protein, 246 aa, Escherichia coli; identical to SEQ ID NO: 1935

SEQ ID NO: 2195 - protein, 560 aa, Escherichia coli; identical to SEQ ID NO: 2187

SEQ ID NO: 2196 - protein, 1080 aa, Escherichia coli; identical to SEQ ID NO: 2192

SEQ ID NO: 2197 - protein, 729 aa, Escherichia coli; identical to SEQ ID NO: 2173

SEQ ID NO: 2198 - protein, 246 aa, Escherichia coli; identical to SEQ ID NO: 1931

SEQ ID NO: 2199 - protein, 560 aa, Escherichia coli; identical to SEQ ID NO: 1968

SEQ ID NO: 2200 - protein, 1080 aa, Escherichia coli; identical to SEQ ID NO: 1969

SEQ ID NO: 2201 - protein, 729 aa, Escherichia coli; identical to SEQ ID NO: 2173

SEQ ID NO: 2202 - protein, 246 aa, Escherichia coli; identical to SEQ ID NO: 1931

SEQ ID NO: 2203 - protein, 560 aa, Escherichia coli; identical to SEQ ID NO: 1968

SEQ ID NO: 2204 - protein, 1080 aa, Escherichia coli; identical to SEQ ID NO: 1969

SEQ ID NO: 2205 - protein, 729 aa, Escherichia coli; identical to SEQ ID NO: 1934

SEQ ID NO: 2206 - protein, 246 aa, Escherichia coli; identical to SEQ ID NO: 1935

SEQ ID NO: 2207 - protein, 560 aa, Escherichia coli; identical to SEQ ID NO: 2187

SEQ ID NO: 2208 - protein, 1080 aa, Escherichia coli; identical to SEQ ID NO: 1941

SEQ ID NO: 2209 - protein, 729 aa, Escherichia coli; identical to SEQ ID NO: 1934

SEQ ID NO: 2210 - protein, 246 aa, Escherichia coli; identical to SEQ ID NO: 1935

SEQ ID NO: 2211 - protein, 560 aa, Escherichia coli; identical to SEQ ID NO: 2187

SEQ ID NO: 2212 - protein, 1080 aa, Escherichia coli; identical to SEQ ID NO: 2192

SEQ ID NO: 2213 - protein, 729 aa, Escherichia coli; identical to SEQ ID NO: 1934

SEQ ID NO: 2214 - protein, 246 aa, Escherichia coli; identical to SEQ ID NO: 1935

SEQ ID NO: 2215 - protein, 560 aa, Escherichia coli; identical to SEQ ID NO: 2187

SEQ ID NO: 2216 - protein, 1080 aa, Escherichia coli; identical to SEQ ID NO: 1941

SEQ ID NO: 2217 - protein, 729 aa, Escherichia coli; identical to SEQ ID NO: 1934

SEQ ID NO: 2218 - protein, 246 aa, Escherichia coli; identical to SEQ ID NO: 1935

SEQ ID NO: 2219 - protein, 560 aa, Escherichia coli; identical to SEQ ID NO: 2115

SEQ ID NO: 2220 - protein, 1080 aa, Escherichia coli; identical to SEQ ID NO: 1941

SEQ ID NO: 2221 - protein, 729 aa, Escherichia coli; identical to SEQ ID NO: 2034

SEQ ID NO: 2222 - protein, 246 aa, Escherichia coli; identical to SEQ ID NO: 2035

SEQ ID NO: 2223 - protein, 560 aa, Escherichia coli; identical to SEQ ID NO: 1968

SEQ ID NO: 2224 - protein, 1080 aa, Escherichia coli
MLKRLLSKLTGNRQQIEHHLKNQYQVEENGLSFPLSLVDDSQLWALASWLEQLAEEDYLISLTDRWLLSWDALYRLLEDEEHASSLPLIGVPDVLPLRASLSSRGALSDSDFRVWIAEWATLPARKPIRFSRTGAILTHENQQYLLSRENWALLQATEQLSAQKNQTPGETTNQLGWAAIRKCAKQAAAKFDDYLEKTHVVKPTSLSLRLRKATVADTAVIEIEPHFEDQPANWLGSFDKNSQVHDSYRIPGENGELSHVIIPPEVKEVLNSIHSIPGRRVAGSEALSFVRNPYTFLGEDAASVIAPEEHEQALFDARIFFHHFRLIPQLNAENKIAEVTLVLEPVSPVPQPEITFGFSAPRELDKFIQQLGISVAAQMPAGSWQGYELELSQFTEQQWHDCQALLTRWQQEIEGKEFSDVLDIAKYGDRVIGIGEFEKISSPWLTKSQSENWLPDDIDFSAFSVETLSGWQPENLHHFDELQERITQAEAVGETHITAPWNDSQLPLDAAKTFSKNWEKQQSTANESQGNVADKTARAVLKIEQNIEETAYIKQRRNSLLNARHAEPEIPLSLKEHIRLKDHQREGVAWLQQLFLRSPEETAGCLLADDMGLGKTLQILSFLVWFIEKFPQEPPSLIVAPVSLLDNWERELDNFFYTAGIPVLKLYGETIKAVKYPKQAIPAHLQSQGIKNLLKPGWQGEAKIILTTYETLRDQEFSLARQPWSIMVCDEAQKIKNPAALITHAANAVQARFKVACTGTPVENTLVDLWSLFDFAQPGLLGALNEFGKHYVRPIENEDGRDTERLESLRALIEPQTLRRTKEEVARDLPQKIEVESCKQLTLSGVQKQLYLSSVANWQQQQALSEGMQQAGTGMLGLLHRLKLICAHPAVVNPEPRFRDNSPKLNWLLKILAELKHTTKDKVIIFTELRDLQRELQHAIHQKFGFRPVIINGDTSTKSQSQNSRQRLIDDFQAQPGFGVIILSTVAVGFGVNVQKANHVIHFTRCWNPAKEDQATDRAYRIGQTKDVYVYYPTVKDTEITTFEETLDDLLQRRRALARDMLCATPDLSGADFEAILKGA

SEQ ID NO: 2225 - protein, 729 aa, Escherichia coli; identical to SEQ ID NO: 1934

SEQ ID NO: 2226 - protein, 246 aa, Escherichia coli; identical to SEQ ID NO: 1935

SEQ ID NO: 2227 - protein, 560 aa, Escherichia coli; identical to SEQ ID NO: 2115

SEQ ID NO: 2228 - protein, 1080 aa, Escherichia coli; identical to SEQ ID NO: 1941

SEQ ID NO: 2229 - protein, 729 aa, Escherichia coli; identical to SEQ ID NO: 1970

SEQ ID NO: 2230 - protein, 246 aa, Escherichia coli; identical to SEQ ID NO: 1971

SEQ ID NO: 2231 - protein, 560 aa, Escherichia coli; identical to SEQ ID NO: 1972

SEQ ID NO: 2232 - protein, 1084 aa, Escherichia coli; identical to SEQ ID NO: 1973

SEQ ID NO: 2233 - protein, 729 aa, Escherichia coli
MSWLNSILVTLTSVEPYKVPVTVIVTVTFAFVCFIFFYLLRSIRIIYGLKKYTRSINSIEKSAPEVQLEHLKSLFQQSELKHAWNEFEESLHSQYELENGEEKIVRIRATAPSASFFSEQQLVDIPLNTEFFKHLPGILTGMGIIGTFYGLMIGLNHFDPSTPEQVSSSVNNLLRDVLYAFLGSAFAIFASILVTWLEKLSIAKSYKYLEKFTAALDSLYDSGVGEEYLASLVKSSNESATQARHLKESLVTDLRDMLLHLAESQKIESERLANTLSATYRESGSQFADQVSGAIENSLKSPLDKIAGAVQTASGDQSGMVQNMLQDVLTAFMAKLDTTFGQQFTNLNEMMRQTVGAIQTMQTGFSALLQDMRQVSDDSRQGSAQLIEQLLSEMKSGQQALQAGMNDMLTSLQASVAKIGAEGEGAGERIARQLEKMFADSEAREKAQAEHMAAFVEAIQNSVQQGQSATMEKMAASVGALGEQLGSLFGQIDKGQQQISATQQANQQSLHEQTQRVMSEVDDQIKQLVETVASQHQGTTETLRLLAEQTNRQIQDMQAGADKMRLAAERFEHAGERVSEANHLTADVLNKAQSAGSSLSLATSELTSVVADYRNNREAVSKSIAMLELLAANTQSEQTTRNQFIADLKQHGERLQSYNREAQVFMENVSDVLGKGFEDFSEGVSRSLDKTLGKLDVEMAKASNLLAGSVEQLGESVSELDDVLSRVRT

SEQ ID NO: 2234 - protein, 246 aa, Escherichia coli; identical to SEQ ID NO: 1935

SEQ ID NO: 2235 - protein, 560 aa, Escherichia coli
MTPALNSLSQRIAARLSSSQRDDHYLHNDFHALTAATLDMEKRFDRAERIPSPPQEMRLEALRRFRLAQELTEREWRMVFYGLADNDPLYPDQPILLEDDTFFPRVNSAIKKRIETKTLKRRDWAALCSSYFAYQHQSPETNPHWCVLRGHIAQGYLVVKAAIRREKSWMKTIEFYHDIFTPQAGGVISRQLLAGENNSLSSLEKIAQIPDSSWLWKRIFTVLLAQLDTLDDPQFLSKISWLLGLAAQWVRFRDDIMTATLTRYYHSGYRDQSHPALKQAALEYWDNPQLKSQQNKWHQYVSESVAAMVRGWLAKQDLTHFFELLRGNGDVDQARLHYWLRFANQMGFTRIIMGSDAWQDRGSDFVKFREENKGRLSYLRGGRNFDNAMIMQINDYLFVEFSGTGNAMYAYQIGHAPFNPESRTLDINIHLKDQGRCALRLPHAPRAEGYNKVQITGWMLKYDDELRKLGIRWMAEEPVKFVDKKVSPPVAMSDIKIINPLRDTAIQHLVKCSSCIVSDNRHKGGILSVQLITPDDTVERELLRLGFAPVAKEPHRYWIK

SEQ ID NO: 2236 - protein, 1080 aa, Escherichia coli
MLKRLLSKLTGNRQQIEHHLKNQYQVEENGLSFPLSLVDDSQLWALASWLEQLAEEDYLISLTDRWLLSWEALYRLLEDEEHASSLPLIGVPDVLPLRASLSSRGALSDSDFRVWIAEWATFPARKPIRFSRTGAILTHENQQYLLSRENWALLQATEQLSAQQNQTPGETTNQLGWAAIRKCAKQAAAKFDDYLEKTHVIKPTSLSLRLRKATVADTAVIEIEPHFEDQPANWLGSFDKNLQVHDSYRIPGENGELSHVIIPPEVKEVLNSIHSIPGRRVAGSEALSFVRNPYTFLGEDAASVIAPEEHEQALFDARIFFHHFRLIPQLNAENKIAEVTLILEPVSPVPQPEITFVFSAPWELDKFIQQLGISVAAQMPAGSWQGYELELSQFTEQQWHDCQALLTRWQQEIEGKEFSDVLDIAKYGDRVIGIGEFEKISSPWLTKAQSENWLPDDIDFSAFSIETLSGWQPENPHHFDELQEKITQAEAAGETYITTPWNDSQLPLDAAKTFSKNWEKQQITANEYQGNVADKTARAVLKIEQNIEETAYIKQRRNSLLNARHAEPEIPLSLKEHIRLKDHQREGVAWLQQLFLRSPEETAGCLLADDMGLGKTLQILSFLVWFIEKFPQEPPNLIVAPVSLLDNWEHELNNFFYTAGIPVLKLYGETIKAVKYPKQAIPAHLQSKGIKNLLKPGWQGEAKIILTTYETLRDQEFSLARQPWSIMVCDEAQKIKNPAALITHAANAVQARFKVACTGTPVENTLVDLWSLFDFAQPGLLGALNEFGKQYVRPIENEDGRDTERLESLRALIEPQTLRRTKEEVARDLPQKIEVESCKQLTLSGVQKQLYLSSVANWQQQQALREGMQQAGTGMLGLLHRLKLICAHPAIVNPEPRFRDNSPKLNWLLKTLAEIKHTSKDKVIIFTELRDLQRELQHTIHQNFGFRPVIINGDTSTKSQSQNNRQRLIDDFQAQPGFGVIILSTVAVGFGVNVQKANHVIHFTRCWNPAKEDQATDRAYRIGQTKDVYVYYPTVRDTEITTFEETLDDLLQRRRALARDMLCATPDLNCADFETILKGA

SEQ ID NO: 2237 - protein, 729 aa, Escherichia coli; identical to SEQ ID NO: 1934

SEQ ID NO: 2238 - protein, 246 aa, Escherichia coli; identical to SEQ ID NO: 1935

SEQ ID NO: 2239 - protein, 560 aa, Escherichia coli; identical to SEQ ID NO: 2115

SEQ ID NO: 2240 - protein, 1080 aa, Escherichia coli; identical to SEQ ID NO: 1941

SEQ ID NO: 2241 - protein, 729 aa, Escherichia coli; identical to SEQ ID NO: 1934

SEQ ID NO: 2242 - protein, 246 aa, Escherichia coli; identical to SEQ ID NO: 1935

SEQ ID NO: 2243 - protein, 560 aa, Escherichia coli; identical to SEQ ID NO: 2115

SEQ ID NO: 2244 - protein, 1080 aa, Escherichia coli
MLKRLLSKLTGNRQQIEHHLKNQYQVEENGLSFPLSLVDDSQLWALASWLEQLAEEDYLISLTDRWLLSWEALYRLLEDEEHASSLPLIGVPDILPLRASLSSRGALSDSDFRVWIAEWATFPARKPIRFSRTGAILTHDNQQYLLSRENWALLQATEQLSAQQIQTPGETTNQLGWAAIRKCAKLAAAKFDDYLEKTHVIKPTSLSLRLRKATVADTAVIEIEPHFEDQPANWLGSFDKNLQVHDSYRIPGENGELSHVIIPPEVKEVLNSIHSIPGRRVAGSEALSFVRNPYTFLGEDAASVIAPEEHEQALFDARIFFHHFRLIPQLNTENKITEVTLILEPVSPVPQPEITFVFSAPWELDKFIQQLGISVAAQMPAGSWQGYELELSQFTEQQWHDCQALLTRWQQEIEGKEFRDVLDIAKYGDRVIGIGEFEKISSPWLTKAQSENWLPDGIDFSAFSIETLSGWQPENPLHFDELQEIITQAEAAGETYITTPWNDSQLPLDAAKTFSKNWEKQQITANEYQGNVADKTARAVLKIEQNIEETAYIKQRRNSLLNARHAEPEIPLSLKEHIRLKDHQREGVAWLQQLFLRSPEETAGCLLADDMGLGKTLQILSFLVWFIEKFPQEPPNLIVAPVSLLDNWERELNNFFYTAGIPVLKLYGETIKAVKYPKQAIPAHLQSKGIKNLLKPGWQGEAKIILTTYETLRDQEFSLARQPWSIMVCDEAQKIKNPAALITHAANAVQARFKVACTGTPVENTLVDLWSLFDFAQPGLLGALNEFGKQYVRPIENEDGRDTERLESLRALIEPQTLRRTKEEVARDLPQKIEVESCKQLTLSGVQKQLYLSSVANWQQQQALREGMQQAGTGMLGLLHRLKLICAHPAIVNPEPRFRDNSPKLNWLLKILAEIKHTSKDKVIIFTELRDLQRELQHAIHQNFGFRPVIINGDSSTKSQSQNSRQRLIDDFQAQPGFGVIILSTVAVGFGVNVQKANHVIHFTRCWNPAKEDQATDRAYRIGQTKNVYVYYPTVRDTEITTFEETLDDLLQRRRALARDMLCATPDLNCADFETILKGA

SEQ ID NO: 2245 - protein, 729 aa, Escherichia coli; identical to SEQ ID NO: 1934

SEQ ID NO: 2246 - protein, 246 aa, Escherichia coli; identical to SEQ ID NO: 1935

SEQ ID NO: 2247 - protein, 560 aa, Escherichia coli; identical to SEQ ID NO: 2115

SEQ ID NO: 2248 - protein, 1080 aa, Escherichia coli; identical to SEQ ID NO: 1941

SEQ ID NO: 2249 - protein, 729 aa, Escherichia coli; identical to SEQ ID NO: 1934

SEQ ID NO: 2250 - protein, 246 aa, Escherichia coli; identical to SEQ ID NO: 1935

SEQ ID NO: 2251 - protein, 560 aa, Escherichia coli; identical to SEQ ID NO: 2115

SEQ ID NO: 2252 - protein, 1080 aa, Escherichia coli; identical to SEQ ID NO: 1941

SEQ ID NO: 2253 - protein, 729 aa, Escherichia coli; identical to SEQ ID NO: 1966

SEQ ID NO: 2254 - protein, 246 aa, Escherichia coli; identical to SEQ ID NO: 1931

SEQ ID NO: 2255 - protein, 560 aa, Escherichia coli; identical to SEQ ID NO: 1968

SEQ ID NO: 2256 - protein, 1080 aa, Escherichia coli; identical to SEQ ID NO: 1969

SEQ ID NO: 2257 - protein, 729 aa, Escherichia coli; identical to SEQ ID NO: 1934

SEQ ID NO: 2258 - protein, 246 aa, Escherichia coli; identical to SEQ ID NO: 1935

SEQ ID NO: 2259 - protein, 560 aa, Escherichia coli
MIPALNSLSQRIAARLSSSQRDDHYLHNDFHALTAATLDMEKRFDRAERIPSPPQEMRLEALRRFRLAQELTEREWRMVFYGLADNDPLYPDQPILLEDDTFFPRVNSAIKKRIETKTLKRRDWAALCSSYFAYQHQSPETNPHWCVLRGHIAQGYLVVKAAIRREKSWMKTIEFYHDIFTPQAGGVISRQLLAGENNSLSSLEKIAQIPDSSWLWKRIFTVLLAQLDTLDDPQFLSKISWLLGLAAQWVRFRDDIMTATLTRYYHSGYRDQSHPALKQAALEYWDNPQLKSQQNKWHQYVSESVAAMVRGWLAKQDLTHFFELLRGNGDVDQARLHYWLRFANQMGFTRIIMGSDAWQDRGSDFVKFREENKGRLSYLRGGRNFDNAMVMQINDYLFVEFSGTGNAMYAYQIGHAPFNPESRTLDINIHLKDQGRCALRLPHAPRAEGYNKVRITGWMLKYDDELRKLGIRWMAEEPVRFVDKKVPPPVAMSDIKIINPLRDTAIQHLVKCSSCIVSDNRHKGGILSVQLITPDDTVERELLRLGFAPVAKEPHRYWIK

SEQ ID NO: 2260 - protein, 1080 aa, Escherichia coli; identical to SEQ ID NO: 1941

SEQ ID NO: 2261 - protein, 729 aa, Escherichia coli; identical to SEQ ID NO: 1974

SEQ ID NO: 2262 - protein, 246 aa, Escherichia coli; identical to SEQ ID NO: 1975

SEQ ID NO: 2263 - protein, 560 aa, Escherichia coli
MTPALNSLSQRIAARLSSSQRDDHYLHNDFHALTSAALDMEKQFDKAERIPSPPQEMRLAALRRFRLAQELTEREWRMVFYGLADNDPSYPDQPVLLEDDTFFPRVSSAIKKRLETKTLKRRDWAALCSSYFAYQHESPETNPHWCVLRGHIAQGYLVVKAAIRREKSWMKTIEFYHDIFTPQAGGVISRQLLAGESNSLSSLEKIAQIPDSSWLWRRIFTVLLAQLDTLDDPQFLEKISWLLGLAAQWVRFRDDIMTATLTRYYHSGYRDQAHSALKQAALEYWDNPQLKSQQNKWHQYVSEPVAAMVRGWLAKQDLTHFFELLRGNGDVDQARLHYWLRFANQMGFTRIVMGSDAWQDPGSDFVKFREENKGRLSYLRGGRNFDNAMIMQINDYLFVEFSGTGNAMYAYRIGHAPFNPESRTLDINIHLKDKGRCALRLPHTPRAEGYNKVRITGWMLKYDDELRQLGIRWMAEEPVKFVDKKASSPVSLSAIKIINPLRDTAIQHLVEGSSCIVSDNRQKGGVLSVQLNTPDDTIERELLRLGFAPVAKEPHRYWIK

SEQ ID NO: 2264 - protein, 1080 aa, Escherichia coli
MLKRLLSRLTGNRQQIERHLRKMYQVEENGLSFPLSLVDDSQLWTLASWLEQLAEEDYLISLTDRWLLSWDALYRLLEDEDHASSLPLISVPEVLPLRASLSSRGALSDSDFRVWISEWATVPARKPIRFSRTGAILTHDNQQYLLSRENWALLQATEQLSAQQIQTPGETTNQLGWAAIRKCAKLAAAKFDDYLEKTHVVKPTSLSLRLRKATVADTAVIEIEPHFEDQPANWLGSFDKNSQVHDSYRIPGENGELSHVIIPPEVKEVLNSIHSIPGRRVAGSEALSFVRNPYTFLGEDAAGVIAPEEHEQALFDAKIFFHHFRLMPQLNAENKIAEVTLVLEPVSPVPQPEITFVFSAPWELEKFIQQLGISVAAQMPAGSWQGYELELSQFTEQQWHDCQALLTRWQQEIEGKEFSDVLDIAKYGDRVIGIGEFEKISSPWLTKAHSENWIPDDIDFSAFSVETLAGWQPENLHHFDELQERITQAEAADETHITAPWNDSQLPLDAAKTFSKHWEKQQSTANESQGNVADKTARAVLKIEQNIEEAAYIKQRRNSLLNARHAEPEIPLSLKEHIRLKDHQREGVAWLQQLFLRSPEETAGCLLADDMGLGKTLQILSFLVWFIEKFPQEPPSLIVAPVSLLDNWERELDNFFYTAGIPVLKLYGETIKAVKYPKQAIPAHLQSQGIKNLLKPGWQGEAKIILTTYETLRDQEFSLARQPWSIMVCDEAQKIKNPAALITHAANAVQARFKVACTGTPVENTLVDLWSLFDFAQPGLLGALNEFGKHYVRPIENETGRDTGRLERLRALIEPQTLRRTKEEVARDLPQKIEVESCKQLTLSGVQKQLYLSSVANWQQQQALSEGMQQAGTGMLGLLHRLKLICAHPAVVNPEPRFRDNSPKLNWLLKILAEIKHTTKDKVIIFTELRDLQRELQHAIHQKFGFRPVIINGDTSTKSHSQNSRQRLIDDFQAQPGFGVIILSTVAVGFGVNVQKANHVIHFTRCWNPAKEDQATDRAYRIGQTKDVYVYYPTVRDTEITTFEETLDDLLQRRRALARDMLCATPDLSGADFEAILKGA

SEQ ID NO: 2265 - protein, 729 aa, Escherichia coli; identical to SEQ ID NO: 1934

SEQ ID NO: 2266 - protein, 246 aa, Escherichia coli; identical to SEQ ID NO: 1935

SEQ ID NO: 2267 - protein, 560 aa, Escherichia coli
MIPALNSLSQRIAARLSSSQRDDHYLHNDFHALTAATLDMEKRFDRAERIPSPPQEMRLEALRRFRLAQELTEREWRMVFYGLADNDPLYPDQPILLEDDTFFPRVNSAIKKRIETKTLKRRDWAALCSSYFAYQHQSPETNPHWCVLRGHIAQGYLVVKAAIRREKSWMKTIEFYHDIFTPQAGGVLSRQLLAGENNSLSSLEKIAQIPDSSWLWKRIFTVLLAQLDTLDDPQFLSKISWLLGLAAQWVRFRDDIMTATLTRYYHSGYRDQSHPALKQAALEYWDNPQLKSQQNKWHQYVSESVAAMVRGWLAKQDLTHFFELLRGNGDVDQARLHYWLRFANQMGFTRIIMGSDAWQDRGSDFVKFREENKGRLSYLRGGRNFDNAMVMQINDYLFVEFSGTGNAMYAYQIGHAPFNPESRTLDINIHLKDQGRCALRLPHAPRAEGYNKVRITGWMLKYDDELRKLGIRWMAEEPVRFVDKKVPPPVAMSDIKIINPLRDTAIQHLVKCSSCIVSDNRHKGGILSVQLITPDDTVERELLRLGFAPVAKEPHRYWIK

SEQ ID NO: 2268 - protein, 1080 aa, Escherichia coli
MLKRLLSKLTGNRQQIEHHLKNQYQVEENGLSFPLSLVDDSQLWALVSWLEQLAEEDYLISLTDRWLLSWEALYRLLEDEEHASSLPLIGVPDILPLRASLSSRGALSDSDFRVWIAEWATFPARKPIRFSRTGAILTHDNQQYLLSRENWALLQATEQLSAQQIQTPGETTNQLGWAAIRKCAKLAAAKFDDYLEKTHVIKPTSLSLRLRKATVADTAVIEIEPHFEDQPANWLGSFDKNLQVHDSYRIPGENGELSHVIIPPEVKEVLNSIHSIPGRRVAGSEALSFVRNPYTFLGEDAASVIAPEEHEQALFDARIFFHHFRLIPQLNAENKITEVTLILEPVSPVPQPEITFVFSAPWELDKFIQQLGISVAAQMPAGSWQGYELELSQFTEQQWHDCQALLTRWQQEIEGKEFSDVLDIAKYGDRVIGIGEFEKISSPWLTKAQSENWLPDGIDFSAFSIETLSGWQPENPLHFDELQEIITQAEAAGETYITTPWNDSQLPLDAAKTFSKNWEKQQITANEYQGNVADKTARAVLKIEQNIEETAYIKQRRNSLLNARHAEPEIPLSLKEHIRLKDHQREGVAWLQQLFLRSPEETAGCLLADDMGLGKTLQILSFLVWFIEKFPQEPPNLIVAPVSLLDNWERELNNFFYTAGIPVLKLYGETIKAVKYPKQAIPAHLQSKGIKNLLKPGWQGEAKIILTTYETLRDQEFSLARQPWSIMVCDEAQKIKNPAALITHAANAVQARFKVACTGTPVENTLVDLWSLFDFAQPGLLGALNEFGKQYVRPIENEDGRDTERLESLRALIEPQTLRRTKEEVARDLPQKIEVESCKQLTLSGVQKQLYLSSVANWQQQQALREGMQQAGTGMLGLLHRLKLICAHPAIVNPEPRFRDNSPKLNWLLKILAEIKHTSKDKVIIFTELRDLQRELQHAIHQNFGFRPVIINGDSSTKSQSQNSRQRLIDDFQAQPGFGVIILSTVAVGFGVNVQKANHVIHFTRCWNPAKEDQATDRAYRIGQTKNVYVYYPTVRDTEITTFEETLDDLLQRRRALARDMLCATPDLNCADFETILKGA

SEQ ID NO: 2269 - protein, 729 aa, Escherichia coli; identical to SEQ ID NO: 1934

SEQ ID NO: 2270 - protein, 246 aa, Escherichia coli; identical to SEQ ID NO: 1935

SEQ ID NO: 2271 - protein, 560 aa, Escherichia coli
MTPALNSLSQRIAARLSSSQRDDHYLHNDFHALTAATLDMEKRFDRAERIPSPPQEMRLEALRRFRLAQELTEREWRMVFYGLADNDPLYPDQPILLEDDTFFPRVNSAIKKRIETKTLKRRDWAALCSSYFAYQHQSPETNPHWCVLRGHIAQGYLVVKAAIRREKSWMKTIEFYHDIFTPQAGGVISRQLLAGENNSLSSLEKIAQIPDSSWLWKRIFTVLLAQLDTLDDPQFLSKISWLLGLAAQWVRFRDDIMTATLTRYYHSGYRDQSHPALKQAALEYWDNPQLKSQQNKWHQYVSESVAAMVRGWLAKQDLTHFFELLRGNGDVDQARLHYWLRFANQMGFTRIIMGSDAWQDRGSDFVKFREENKGRLSYLRGGRNFDNAMVMQINDYLFVEFSGTGNAMYAYQIGHAPFNPESRTLDINIHLKDQGRCALRLPHAPRAEGYNKVRITGWMLKYDDELRKLGIRWMAEEPVRFVDKKVPPPVAMSDIKIINPLRDTAIQHLVKCSSCIVSDNRHKGGILSVQLITPDDTVERELLRLGFAPVAKEPHRYWIK

SEQ ID NO: 2272 - protein, 1080 aa, Escherichia coli; identical to SEQ ID NO: 1941

SEQ ID NO: 2273 - protein, 729 aa, Escherichia coli; identical to SEQ ID NO: 1974

SEQ ID NO: 2274 - protein, 246 aa, Escherichia coli; identical to SEQ ID NO: 1975

SEQ ID NO: 2275 - protein, 560 aa, Escherichia coli; identical to SEQ ID NO: 2263

SEQ ID NO: 2276 - protein, 1080 aa, Escherichia coli; identical to SEQ ID NO: 2264

SEQ ID NO: 2277 - protein, 729 aa, Escherichia coli; identical to SEQ ID NO: 1934

SEQ ID NO: 2278 - protein, 246 aa, Escherichia coli; identical to SEQ ID NO: 1935

SEQ ID NO: 2279 - protein, 560 aa, Escherichia coli; identical to SEQ ID NO: 2267

SEQ ID NO: 2280 - protein, 1080 aa, Escherichia coli; identical to SEQ ID NO: 2268

SEQ ID NO: 2281 - protein, 716 aa, Escherichia fergusonii ECD227
MEPHWVPFTVIGLVTFAFVCFIFFYLLRSIRIIYGLKKYTRSITSIEKSAPEVQLEHLKSLFQRPELRHAWNEFEESLHSQYELEDGEEKIVRIRATAPSASFFSEQQLVDIPLNTEFFKHLPGILTGMGIIGTFYGLMIGLNHFDPSTPEQVSSSVNNLLRDVLYAFLGSAFAIFASILVTWLEKLSIAKCYKYLEKFTASLDSLYDSGVGEEYLASLVKSSNESATQARHLKESLVTDLRDMLLHLAESQKVENERLANTLSATYRESGSQFADQVSGAIENSLKSPLDKIAGAVQTASGDQSGMVQNMLQDVLTAFMSKLDTTFGQQFTNLNEMMGQTVGAIQTMQTGFATLLQDMRQVSDDTRQGSAQLIEQLLSEMKSGQQAMQAGMNDMLTSLQASVAKIGAEGEGAGERMARQLEKMFADSEAREKAQAEHMTAFIEAFQNSVQQGQSATMEKMAASVESLSEQLGSLFGQIDKGQQQISATQQANQQSLHEQTQRVMSEVDDQIKQLIDTVASQHQGTTETLRLLAEQTNRQIQDMQTGADKMRLAAERFEHAGDRVSEANHLTADVLNKAQSAGSSLSLATSELTSVVADYRNNREAVSKSIAMLELLAANTQSEQTTRNQFIADLKQHGERLQSYNREAQAFMENVSDVLGKGFEDFSEGVSRSLDKTLGKLDVEMAKASSLLAGSVEQIGESVSELDDVLSRVRA

SEQ ID NO: 2282 - protein, 246 aa, Escherichia fergusonii ECD227
MFGNAFGVKKRRGDEAEKPFWISYADLMTAMMVLFLVVMVASLSSVTQRIQRAEQGEKTRGQDISRLCERLELHARNVNKTIVVDCHDNRISFGEAGRFDHNQFFLNAEGQKALQDVVPLVLEASNSEEGKKWFKQIVIEGFTDTDGSYLYNLHLSLQRSEWVMCSLLDSRSPLQKNISAEQQLQIRKLFLAGGVSFNNAKESKEASRRVELRMQFFGLKDKRDKADEVDFPPVVNKEVCQLVMPL

SEQ ID NO: 2283 - protein, 560 aa, Escherichia fergusonii ECD227
MTPALNSLSQRIAARLSSSQRDDHYLHNDFHALASAALDMEKRFDKAEKIPLPPQKMRLAALRRLRLAEELTEREWRMVFYGLADNDPSYPDRPILLEDDVFFPEVDNAIKKRLESKELKRKDWAALCSSYFAYQNPSPETNPHWCVLRGHIAQGYLVVKAAIRREKSWMKTIEFYHDIFTPQAGGVISRQLLAGESNSLSSLEKIAQIPDSSWLWKRIFTVLLAQLDTLDDPQFLDKISWLLGLAAQWVRFRDDIITAILTRYYHSIYRDQAHSALKQAALEYWDNPQLKSQQNKWHQYVSEPVAAMVRGWLAKQDLMHFFELLRGNGDVDQARLYYWLRFANQMGFTRIVMGTDAWQDRGSDFVKFREENKGRLSYLLGGRSLDNAMIMQINDYLFVEFSGTGNAMYAYRVGQAPFNPESGSLDINIHLKDKFRNVLRLPHIPRAEGYNRVRLTGWMLKYDDELRKLGIRWMAEEPVKFVDKKASSPASMSDIKIINPLRDTAIQHLVEGSSCIVSDNRQKGGVLSVQLNTPDDTIERELLRLGFAPVAKEPHRYWIK

SEQ ID NO: 2284 - protein, 1080 aa, Escherichia fergusonii ECD227
MLKRLLSRLTGNRQQIEHHLMNQYQVEENGLSFPLSLVDDSQLWALASWLEQLAEEDYLISLTDRWLLSWDALYRLLEDEEHASSLPLIGVPEVLPLRASLSSRGALSDRDFRVWIAEWVTLPARKPIRFSRTGAILTHENKQHLLSQENWALLQATEQLSAQQNQSPGETTNQLGWAAIRKCAKQAAAKFDDYLEKTHVVKPTSLSLRLRKATVADTAVIEIEPHFEDQPANWLGSFDKNSQVHDSYRIPGENGELSHVIIPPEVKEVLNSIHSIPGRRVAGSEALSFVRNPYTFLGEDAASVIAPEEHEQALFDARIFFHHFRLIPQLNAENKIAEVTLVLEPVSPVPQPEITFVFSAPWELEKFIQQLGISVAAQMPAGSWQGYELELSQFTEQQWHDCQALLTRWQQEIEGKEFSDVLDIAKYGDRVIGIGEFEKISSPWLTKAQSENWLPDDIDFSAFSVETLTGWQPENLHHFDELQERITQAEAVGETHITAPWNDSQLPLDAAKTFSKNWEKQQSTANESQGNVADKTARAVLKIEQNIEETAYIKQRRNSLLNARHAEPEIPLSLKEHIRLKDHQREGVAWLQQLFLRSPEETAGCLLADDMGLGKTLQILSFLVWFIEKFPQEPPSLIVAPVSLLDNWERELDNFFYTAGIPVLKLYGETIKAVKYPKQAIPAHLQSQGIKNLLKPGWQGEAKIILTTYETLRDQEFSLARQPWSIMVCDEAQKIKNPAALITHAANAVQARFKVACTGTPVENTLVDLWSLFDFAQPGLLGALNEFGKHYVRPIENEDSRDTERLESLRALIEPQTLRRTKEEVARDLPQKIEVESCKQLTLSGVQKQLYLSSVANWQQQQALSEGMQQAGTGMLGLLHRLKLICAHPAVVNPEPRFRDNSPKLNWLLKILAEIKHTTKDKVIIFTELRDLQRELQHAIHQKFGFRPVIINGDTSTKSHSQNSRQRLIDDFQAQPGFGVIILSTVAVGFGVNVQKANHVIHFTRCWNPAKEDQATDRAYRIGQTKDVYVYYPTVRDSEITTFEETLDDLLQRRRALAKDMLCATPDLSSVDFEVILKGA

SEQ ID NO: 2285 - protein, 729 aa, Escherichia hermannii NBRC 105704
MSWLNSFLMTLTSVEPHNVPFTVISIVCLAVACFIFFYLLRAIKIINSLKKYTRSINSIESSSPEEQLAHLQNLFKRPELKHAWNEFKESLHPQSELEDGEEKIVRIRATAPSSSYFSEQQLVDIPLNTEFFKHLPGILTGVGIIGTFYGLMIGLNHFDPSTPEQVTSSVNNLLHDVLYAFLGSAVAIAASIFVTWLEKLSIAKCYKYLEKFTAAIDKLYVSGVGEEYLASLVKSSNESATQARQLKESLVTDLRDMLLSLAESQKVENERLAKTLSATYRDSGAQFADQVSGAIENSLKSPLEKIAGAVQTASGDQSGMVQNMLQDVLTAFMAKLDTTFGQQFTNLNDMMGQTVGAIQTMQTGFATLLQDMRQVSDDSRQGSAQLIEQLLSEMKSGQQAMQAGMNDMLTSLQASVAKIGAEGEGAGERMARQLEKMFADSEAREKAQAEHMTAFIEAIQNSVQQGQSATMEKMAASVESLSEQLGSLFGQIDKGQQQISATQQANQQSLHEQTQRVMSEVDDQIKQLIDTVAQQHQGTTETLNNLAEQTNRQIQDMQNGADKMRVAAERFEEAGERVSQANHITADVLNKAQTAGSSLSGATSELASVVADYRNNREAVSKSIAMLELLAANTQSEQTTRSKFIADLQLHGERLQGYNREAQAFMENVSDVLGKGFEDFSEGVLRSLDKTLGKLDVEMAKASTLLAGSVEQIGESINELDDVLSRVRA

SEQ ID NO: 2286 - protein, 246 aa, Escherichia hermannii NBRC 105704
MFGNAFGVKKRRSDEAEKPFWISYADLMTAMMVLFLVVMVASLSSVTQRIQRAEEGEKIRGHDIARLCERLELHARNLNKTIVVDCHDNRISFGEAGRFDHNRFFLNAEGQKALQDVVPLVLEASESEEGKKWFKQIVIEGFTDTDGSYLYNLHLSLQRSEWVMCSLLDSRSPLQKSISAQQQIKIRKLFLAGGVSFNNAKESKEASRRVELRMQFFGLKDKRDGEEAVNFPPVVNKEVCQLVMPL

SEQ ID NO: 2287 - protein, 560 aa, Escherichia hermannii NBRC 105704
MTSALHSLSQRIAATLTASQQSDTFLKNGFHALTLAVNEMEKRFDKADKIPSPPHETRLKALRRFRLAEELNEREWRMVFYGLADNDPLHPKQPVLLEDDTLFPKVDSEIKKRLASKDLKRKDWAALCASYFAYRNEKPEQNPHWCVLRGHIAKGYLVVKAAIRREKPWMKTIEFYHDIFTPQAGGVISRQLLAGEKNSLSSLEKIAQIPDSSWLWKRIFTVLLAQLDTLDDPQYLDKISWLLGLAAQWVRFRDDIMTATLTRYYHSTYRDQAHSALKQAALEYWDNPQLKSQQNKWHQYVSEPVAAMVRGWLAKQDLMHFFELLRGNGDVDQARLFYWLRFANQMGFTRIVMGPDAWHDRGSDFVKFREENKGRLSYLLGGRNLDNAMIMQINDYLFVEFSGTGNAMYAYRVGQAPFNPESESLDINIHLKDKFRNVLRLPHIPRAEGYNRVRLTGWMLKYDDELRQLGIRWMAEEPVKFVDKKAPSPASVSDIKIINPLRDTAIQRLVESTSCIVSDNRQKGGVLSVQLKIPDDTTERELLRLGFAPVTKEPHRYWIK

SEQ ID NO: 2288 - protein, 627 aa, Escherichia hermannii NBRC 105704
MLKRLLSKLAGNRQQIERHLKKQYQAEENGLSFPQSLVDDPELWALASWLEQLAEEDYLISLTDRWLLSWDALYRLLEDEEHASSLPLIGIPDILPLRASLSSRSALSDSDFRVWIAEWATLPARKPIRFSRTGAILTHENQQYLLSRENWALIQATEQLSAQQYQTPGETTNQLGWAAIRKCAKQAAAKFDDYLEKTHVVKPTSLSLRLRKATIADTAVIEIEPHFEDQPANWLGSFDKNSQVHDSYRIPGKNGELSHIILPPEVKEVLNSIHSIPGRRVAGSEALSFVRNPYTFLGEDAASVIAPEEHEQALFDAHIFFHHFRLQLQINDENKIESITLVLEPVSPVPQPEVSFLLSAPWELEKFVQAVGISVAAQMPAGSWQGYELELSQFTEQQWHDCQSLLSRWQQEVEGKEFNDVLDLGKYGDRVIGIGEFEKISSPWLTKAQSENWLPDGIDFSEFSVETLDGWQPDNLQHFDELQQRITQAEASGETHIISPWNETKLPLDAAKTFSKNWEKQQNAAHESEGNVVEKAARAVLKIEQNIEEAAYIKQRRDSLLDARHAEPEIPLGLKEHIRLKDHQREGLAWLQQLFLRSPEETAGCLLADDMGLGKTLQILSFLVWFI

SEQ ID NO: 2289 - protein, 729 aa, Hafnia alvei ATCC 51873
MSWLNSILVALTSVQPFMVPATVIGLVTLAFLCFILFYLFRAVKIVNGLKKYTQSINSIEKNEPEAQLQHLQNLFIQPELKHAWSEFEESLHLQHELVGSEERIAQIRATAPSASYFSEQQLVDIPLNTEFFKHLPGILTGVGIIGTFYGLMIGLNHFDPSTPEQVTSSVNNLLHDVLYAFLGSAVAIFASIVVTWLEKFSLAKCYKYLEKFTASIDKLYISGVGEEYLASLVKSSNESATQARHLKESLVTDLRDMLLHLAESQKVENERLANTLSTTYRESSSQFADQVSGAIENSLKSPLDKIAGAVQTASGDQSGMVQNMLQDVLTAFMAKLDTTFGQQFTNLNEMMGQTVGAIQTMQSGFSALLQDMRQVSDDSRQGSAQLMEQLLSEMKSGQQAMQAGMNDMLSSLQTSVAKIGAEGEGAGERMARQLEKMFADSEAREKAQAEHMSAFIEAIQNSVQQGQSATMEKMATSVEALGEQLGSLFGQIDKGQQQISANQQVNQQSLHEQTQRVMSEVDDQIKQLIETVASQHQGTTETLNKLAEQTNRQIQDMQNGADKMRIAAERFEHAGDRVSEANHLTADVLNKAQSAGSSLSLATNELTSVVADYRNNREAVSKSITMLELLAANTQSEQTTRSQFITDLKQHGERLQSYNREAQTFMENVSDVLGKGFEDFSEGVSRSLDKTLGKLDVEMAKASNLLAGSVEQIGESVSELDDVLSRVRA

SEQ ID NO: 2290 - protein, 246 aa, Hafnia alvei ATCC 51873
MFGNAFGVKKRRGDEAEKPFWISYADLMTAMMVLFLVVMVASLSSVTQRIQRAEQGEKTRGQDISRLCERLELHARSVNKTIVVDCHDNRISFGEAGRFDHNQFFLNAEGQKALQDVVPLVLEASDSEEGKKWFKQIVIEGFTDTDGSYLYNLHLSLQRSEWVMCSLIDSRSPLQKSISAKQQIQIRKLFLAGGVSFNNAKESKEASRRVELRMQFFGLKDKHDAADEVDFPPVVNKEVCQLVMPQ

SEQ ID NO: 2291 - protein, 560 aa, Hafnia alvei ATCC 51873
MTPALSSLSQRIAAKLSSSQQEDHYLRNDFHALASAGREMEKRFDKAEKIPTPPHEMRLAALLRFRLAEELSEREWRMVFYGLADTDPLDPERPVLLEDDTFFPHVDNAIKKQIESKTLKRKDWAALCSSYFAYKHESPEINPHWCVLRGHIAQGYPVVKAAIRREKSWMRTIEFYHDIFTPQAGGVISQQLLSGESNSLSSLEKIAQIPDSSWLWKRIFTVLLAQLDTLDDPQYLDKISWLLGLAAQWVRFRDDIMTATLTRYYHSTYRDQAHSSLKQAALEYWDNPQLKSQQNKWHQYVSEPVAAMVRGWLAKQDLMHFFELLRGNGDVDQARLHYWLRFANQMGFTRIVMGPDAWHDRGSDFIKFREENRGRLSHLRGGRSFDNAMIMQINDYIFVEFSGTGNAMYAYRVGQAPFNPESHSLDINIQLKDKYRNVLRLPHTPRAEGYNKTRITGWMLKYDDELRQLGIRWMAEEPVKFIDKKAPSPASVSDIKIINPLRDTAIQRLVENTSCIVSDNRQKGGVLSVQLKAPDDITERELLRLGFTPVTKEPHRYWIK

SEQ ID NO: 2292 - protein, 1080 aa, Hafnia alvei ATCC 51873
MLKRLLSKLTGNRQQIERHLKNQYQAEENGLSFPQSLVDDPELWALASWLEQLAEEDYLISLTDRWLLSWEALYRLLEDEEHASSLPLIGVPEVLPLRASMSSRGALSDSDFRVWIAEWATLPSRQTIRFSRTGAIFTHKNQQHLLSRENWALLQSTEQLSIQQTQTPGETTNQLGWAAIRKCAKQAAAKFDDYLEKTHVVKPTSLSLRLRKATVADTAVIEIEPHFEDQPANWLGSFDKNSLVHDSYRIPGENGELSHIIIPPEVKEVLNSIHSIPGRRVAGSEALSFVRNPYTFLGEDAASVIAPEEHEQALFDAHIFFHHFRLQPQINDENKIESITLVLEPVSPVPQPETSFLFSAPWELDKFIQALGISVAAQMPAGSWQGYELELSQFTEQQWHDCQSLLLRWQQEVEGKEFNDVLDLGKYGDRVIGIGEFEKISSPWLTKAQSENWLPDGIDLSEFSVETLDGWQPDNLQHFDELQERIIQAEATGETHIISPWNETELPLDAAKTFSKNWEKQQNAAHESGGNVVEKAVRAVLKIEQNIEEAVYIKQRRNSLLNARHAEPEIPLSLKEHIQLKDHQREGVAWLQQLFLRSPKETAGCLLADDMGLGKTLQILSFLVWFLEKFPDEPPSLIVAPVSLLDNWERELDNFFYTSGISVMKLYGDTIKAVKYPKQAIPAHLQSQGIKNLLKPGWQGEAKIILTTYETLRDQEFSLARQPWSIMVCDEAQKIKNPAALITHAANAIQARFKVACTGTPVENTLVDLWSLFDFAQPGLLGALNEFGKHYVRPIENEAGRDTGQLESLRALIEPQTLRRTKEEVARDLPLKIEVVSCKQLPLSGPQKQLYLSSIANWQQQQALSEGMQQAGAGMLGLLHRLKLICAHPAVVNPEPRYREGSPKLNWMLKTLDEIKHTSKDKVIIFTELRDLQREIQHAIQQRFGFRPVIINGDTSTKSQSQNSRQRLIDDFQSQPGFGVIILSTVAVGFGVNVQKANHVIHFTRCWNPAKEDQATDRAYRIGQTKDVYVYYPTVMDSEITTFEETLDELLQRRRALARDMLCSAPDLSSADFENILKGT

SEQ ID NO: 2293 - protein, 729 aa, Klebsiella pneumoniae subsp. pneumoniae WGLW2
MSWLNSFLVTLTSVEPHNVPFTVISIVSLAVACFLFFYLFRAIKIVNSLKKYTRSITSIESSSPEEQLAHLQNLFKRPELKHAWNEFEESLHPQRELEGGEEKIVRIRATAPSSSYFSEQQLVDIPLNTEFFKHLPGILTGVGIIGTFYGLMIGLNHFDPSTPEQVTSSVNNLLHDVLYAFLGSAVAIAASIFITWLEKLSIAKCYKYLEKFTAAIDKLYVSGVGEEYLASLVKSSNESATQARHLKESLVTDLRDMLLHLAESQKVENERLANTLSNTYRESGAQFADQVSGAIENSLKSPLDKIAGAVQTASGDQSGMVQNMLQDVLTAFMAKLDTTFGQQFTNLNEMMGQTVGAIQTMQSGFSALLQDMRQVSDDSRQGSAQLMEQLLSEMKSGQQAMQAGMNDMLSSLQASVAKIGAEGEGAGERMARQLEKMFADSEAREKAQAEHMSAFIEAIQNSVQQGQSATMEKMATSVEALGEQLGSLFGQIDKGQQQISANQQVNQQSLHEQTQRVMSEVDDQIKKLIETVANQHQGTTETLNKLAEQTSRQIQDMQNGADKMRVAAERFEHAGDRVSEANHLTADVLNKAQSAGSSLSLATSELTSVVADYRNNREAVSKSIAMLELLAANTQSEQTTRSQFITDLKQHGERLQSYNREAQTFMENVSDVLGKGFEDFSEGVSRSLDKTLGKLDVEMAKASNLLAGSVEQIGESVSELDDVLSRVRA

SEQ ID NO: 2294 - protein, 247 aa, Klebsiella pneumoniae subsp. pneumoniae WGLW2
MMFANAFGVKKRHSDEAEKPFWISYADLMTAMMVLFLVVMVASLSSVTQRIQRAEQGEKTRGQDISRLCERLELHARSVNKTIVVDCHDNRISFGEAGRFDHNRFFLNAEGQKALQDVVPLVLEASDSEEGKKWFKQIVIEGFTDTDGSYLYNLHLSLQRSEWVMCSLLDSRSPLQKSISAEQQIQIRKLFLAGGVSFNNAKESKEASRRVELRMQFFGLKDKRDGTEEVDFPPVVNKEVCQLVMPQ

SEQ ID NO: 2295 - protein, 560 aa, Klebsiella pneumoniae subsp. pneumoniae WGLW2
MTPALSSLAQRIAAKLSSSQQNDNFLRHDFHALTSAGLDMEKRFDKAEKIPAPPHEMRLAALRRFRLAEELTEREWRMVFYGLVDTDPLHPNQPILLEDEQLFPEVNSAIKKRIETKTLKRRDWAALCASYFAYRNETPESNPHWCVLRGHIAQGYLVVKSAIRREKSWMKTIEFYHDIFTPQAGGVISQQLLAGESNSLSSLEKIAQIPDSSWLWKRIFTVLLAQLDTLDDPHYLDKIIWLLGLAAQWVRFRDDIMTATLTRYYHSTYRDQAHSALKQAALEYWDNPQLKSQQNKWHQYVSEPVAAMVRGWLAKQDLMHFFELLRGNGDVDQARLHYWLRFANQMGFTRIVMGQDAWTDRDSDFVKFREENRGRLSHLRGGRSFDNAMIMQINDYIFVEFSGTGNAMYAYRIGEAPFNPESGSLEINVHLKSQGRCILRLPHAPRAYGYSNVRITGWMLKYDDELHKLGIRWMAEEPIKFVDKKESSPTSLSDVKIINPLRDTAIQRLLENISCIVSDNRQKGGVLSVQLKTPDDTTERELLRLGFTPVAKEPHRYWIK

SEQ ID NO: 2296 - protein, 1080 aa, Klebsiella pneumoniae subsp. pneumoniae WGLW2
MLKRLLSKLTGDRQQIERHLKNQYRAEENGLSFPQSLVDDPELWALASWLEQLAEEDYLISLTDRWLLSWEALYHLLEDEEHASSLPLIGIPEVLPLRASMSSRGALSDKDFRVWIAEWTTLPSRQTIRFSRTGAIFTHENQQHLLSRENWALLQATEQLSIQQTQAPGETTNQLGWATIRKCAKQAAAKFDDYLEKTHVIKPTSLSLRLRKATVADTAVIEIEPHFEDQPANWLGSFDKNAQVHDSYRIPGENGELSHVIIPPEVKEVLNSIHSIPGRRVAGSEALSFVRNPYTFLGEDAASVIAPEEHEQALFDAHIFFHHFRLQPSVNDENKINDITLVLEPVSPIPQPEVTFLFSAPWELDKFVQAVGISVAAQMPAGSWQGYELELSQFTEQQWHDCQSLLTRWQQEVEGKEFSDVLDLGKYGDRVIGIGEFEKISSPWLTKAQSENWLPVGIDFSEFSVETLDGWQPDNLQHFDELQERITYAEATGETHIISPWNETELPLDAAKTFSKNWEKQQNAAHESESNVVEKAARAVLKIEQNIEEAVYIKQRRNSLLNARNAEPEIPLSLKEHIRLKDHQREGVAWLQQLFLRSPQETAGCLLADDMGLGKTLQILTFLVWFIEKFPDEPPSLIVAPVSLLDNWERELDNFFYTSGISVMKLYGDTIKAVKYPKQAIPAHLQSQGIKNLLKPGWQGEAKIILTTYETLRDQEFSLARQPWSIMVCDEAQKIKNPAALITHAANAIQARFKVACTGTPVENTLVDLWSLFDFAQPGLLGALNEFGRHYVRPIENEAGRDTGQLESLRALIEPQTLRRTKEEVARDLPQKIEVVSCKQLPLSGPQKQLYLSSIANWQQQQALSEGMQQAGAGMLGLLHRLKLICAHPAVVNPEPRYREGSPKLNWMLKTLDEIKHTSKDKVIIFTELRDLQREIQHAIQQRFGFRPVIINGDTSTKSHSQNSRQRLIDNFQSQSGFGVIILSTVAVGFGVNVQKANHVIHFTRCWNPAKEDQATDRAYRIGQTKDVYVYYPTVMDSEITTFEETLDELLQRRRALARDMLCSTPELSSADFENILKGT

SEQ ID NO: 2297 - protein, 729 aa, Klebsiella pneumoniae subsp. pneumoniae WGLW2
MSWLNSLLVALTSVEPHWVPVTVIVLVSFAVICFIFFYLSRAIKIVNGLKKYTKSISSVENSAPEAQLEHLKSLFQRPELRHAWNEFKESLHPQRELENGEEKIVRIRATAPSASFFSEQQLVDIPLNTEFFKHLPGILTGVGIIGTFYGLMIGLNHFDPSTPEQVSSSVNNLLHDVLYAFLGSAFAIFASIIVTWLEKLSIAKCYKYLEKFTAALDSLYDSGVGEEYLASLVKSSNESATQARHLKESLVTDLRDMLLQLADNQKVENERLAATLSTTYRESGQQFAEQVSGAIENSLKSPLDKIAGAVQTASGDQSGMVQNMLQDVLTAFMAKLDTTFGQQFTNLNDMMGQTIGVIQTMQTGFAALLQDMRQVSDDSRQGSAQLIEQLLSEMKSGQQAMQAGMNDMLTSLQASVAKIGAEGEGAGERMARQLEKMFADSEAREKAQAEHMAAFIEAIQSSVQQGQSATMEKMATSVEALGEQLGSLFGQIDKGQQQISANQQANQQSLHEQTQRVMSEADDQIKQLIETVASQHQGTTETLRLLAEQTNRQIQDMQNGADKMRQAAERFEHAGERVSEANHLTADVLNKAQSAGSSLSLATSELASVVADYRNNREAVSKSIAMLELLAANTQSEQTTRSQFIADLKQHGEHLQSYNREAQTFMENVSDVLGKGFEDFSEGVSRSLDKTLGKLDVEMAKASNLLASSVEQLGESVSELDDVLSRVRA

SEQ ID NO: 2298 - protein, 246 aa, Klebsiella pneumoniae subsp. pneumoniae WGLW2
MFGNAFGVKKRRSDEAEKPFWISYADLMTAMMVLFLVVMVASLSSVTQRIQRAEQGEKTRGQDISRLCERLELHARNVNKTIVVDCHDNRISFGEAGRFDHNRFFLNTEGQKALQDVVPLVLDAADSEEGKKWFKQIVIEGFTDTDGSYLYNLHLSLQRSEWVMCSLLDSRSPLQKSISAEQQIQIRKLFLAGGVSFNNAKESKEASRRVELRMQFFGLKDKRDKADEVDFPPVVNKEVCQLVMPQ

SEQ ID NO: 2299 - protein, 560 aa, Klebsiella pneumoniae subsp. pneumoniae WGLW2
MTPALNSLSQRIAVKLSSIQRDDDYLRNDFHTLTSAALDMERRFDKAERIPSPPQEMRLEALRRLRLAEELTEREWRMVFYSLADNDPLYPDRPILLEDDIFFPEVDNAIKTRLESKELKRKDWTALCSSYFAYQHESPEKNPHWCILRGHIAQGYFVVKAAIRREKSWMKTIELYHDIFTPQAGGVISRQLLAGENNSLSSLDKIAQIPDSSWLWKRIFAVLLAQLDTLDDPQFLEKISWLLGLASQWVRFRDDIMTETLTRYYYSVYRDQEHSALKQAALEFWDNPQLKSQQNKWHQYVSEPVAAMVRGWLAKQDLTHFFELLRGNGDVDQARLHYWLRFANQMGFTRIVMGPDAWQDRGSDFVKFREENKGRLSYLRGGRSFDNAMIMQINDYLFVEFSGTGNAMYAYRIGHAPFNPESRTIDINIHLKDQGRCALRLPHAPRAEGYNKVRITGWMLKYDDELRKLGVRWMAEEPVKFVDKKASSPASLSGIKIINPLRDTAIQSLVEGASCVVSDNRQKGGVLSVLLNTPDDTIERELLRLGFTPVAKEPHRYWIK

SEQ ID NO: 2300 - protein, 1082 aa, Klebsiella pneumoniae subsp. pneumoniae WGLW2
MLKRLLSKLTGNRQQIEHNLKNQYQVEENGLSFPLSLVDDSQLWALASWLEQLAEEDYLISLTDRWLLSWDALYSLLDDDEHASSLPLIGVPEILPLRASLSSRGALSDSDFRIWIAEWATLPERHPIRFSRTGAIFTFENQQYLLSRENWVLIQATERLSAQQSQVPGETTNQLGWAAIRKCAKQASAKFDDYLEKTHVVKPTSLSLRLRKATVADTAVIEIEPHFEEQPANWLGSFDKNSQVHDSYRIPGENGELSHVIITPEVKEVLNSIHSIPGRRVAGSEALSFVRNPYSFLGEDAADVLAPEEHEQALFDARIFFHHFRLIPQQSDENKIIEVTLVLEPISPVPQPEVTFVFSAPWELEKFIQQLGISVAAQMPAGSWQGYELELSQFTEQQWYDCQDLFTRWQQEIEGEEFSDVLDIAKYGDRVIGIGEFEKISSPWLTKAQSENWLPDDIDFSVFSGEVLTGWQPENLHHLGELQERITQAEAAGETHIAAPWNDSQLPLDTAKTFIKNWAKQQSTENGSQDNVADKAVRAVLKIEQNIEEAAYIKQRRDSLLSARNAEPEIPLSLKENIRLKDHQREGVAWLQQLFLRSPEETAGCLLADDMGLGKTLQILIFLVWFIEKFPQEPPSLIVAPVSLLDNWERELDNFFYTAGIPVLKLYGETIKVVKYPKQAIPAHLQSQGIKNLLKPGWQGEAKIILTTYETLRDQEFSLARQPWSIMVCDEAQKIKNPAALITHAANAIQARFKVACTGTPVENTLVDLWSLFDFAQPGLLGALNEFGKHYVRPIENEAGRDTERLERLRALIEPQTLRRTKEEVARDLPQKIEVESCKQLMLSGVQKQLYLSSVANWQQQQALSEGMQQAGTGMLGLLHRLKLICAHPAVVNPEPRFRDNSPKLNWLLKILAEIKSTTKDKVIIFTELRDLQRELQHAIHQKFGIRPVIINGDTSTKSNSQNSRQRLIDDFQVHPGFGVIILSTVAVGFGVNVQKANHVIHFTRCWNPAKEDQATDRAYRIGQIKDVYVYYPTVRDPEITTFEETLDDLLLRRRSLARDMLCATPDLSGADFEDILKGALD

SEQ ID NO: 2301 - protein, 711 aa, Klebsiella pneumoniae JHCK1
MPFTVISIVSLAVACFLFFYLFRAIKIVNSLKKYTRSITSIESSSPEEQLAHLQNLFKRPELKHAWNEFEESLHPQRELEGGEEKIVRIRATAPSSSYFSEQQLVDIPLNTEFFKHLPGILTGVGIIGTFYGLMIGLNHFDPSTPEQVTSSVNNLLHDVLYAFLGSAVAIAASIFITWLEKLSIAKCYKYLEKFTAAIDKLYVSGVGEEYLASLVKSSNESATQARHLKESLVTDLRDMLLHLAESQKVENERLANTLSNTYRESGAQFADQVSGAIENSLKSPLDKIAGAVQTASGDQSGMVQNMLQDVLTAFMAKLDTTFGQQFTNLNEMMGQTVGAIQTMQSGFSALLQDMRQVSDDSRQGSAQLMEQLLSEMKSGQQAMQAGMNDMLSSLQASVAKIGAEGEGAGERMARQLEKMFADSEAREKAQAEHMSAFIEAIQNSVQQGQSATMEKMATSVEALGEQLGSLFGQIDKGQQQISANQQVNQQSLHEQTQRVMSEVDDQIKKLIETVANQHQGTTETLNKLAEQTSRQIQDMQNGADKMRVAAERFEHAGDRVSEANHLTADVLNKAQSAGSSLSLATSELTSVVADYRNNREAVSKSIAMLELLAANTQSEQTTRSQFITDLKQHGERLQSYNREAQTFMENVSDVLGKGFEDFSEGVSRSLDKTLGKLDVEMAKASNLLAGSVEQIGESVSELDDVLSRVRA

SEQ ID NO: 2302 - protein, 246 aa, Klebsiella pneumoniae JHCK1
MFANAFGVKKRHSDEAEKPFWISYADLMTAMMVLFLVVMVASLSSVTQRIQRAEQGEKTRGQDISRLCERLELHARSVNKTIVVDCHDNRISFGEAGRFDHNRFFLNAEGQKALQDVVPLVLEASDSEEGKKWFKQIVIEGFTDTDGSYLYNLHLSLQRSEWVMCSLLDSRSPLQKSISAEQQIQIRKLFLAGGVSFNNAKESKEASRRVELRMQFFGLKDKRDGTEEVDFPPVVNKEVCQLVMPQ

SEQ ID NO: 2303 - protein, 483 aa, Klebsiella pneumoniae JHCK1
MVFYGLVDTDPLHPNQPILLEDEQLFPEVNSAIKKRIETKTLKRRDWAALCASYFAYRNETPESNPHWCVLRGHIAQGYLVVKSAIRREKSWMKTIEFYHDIFTPQAGGVISQQLLAGESNSLSSLEKIAQIPDSSWLWKRIFTVLLAQLDTLDDPHYLDKIIWLLGLAAQWVRFRDDIMTATLTRYYHSTYRDQAHSALKQAALEYWDNPQLKSQQNKWHQYVSEPVAAMVRGWLAKQDLMHFFELLRGNGDVDQARLHYWLRFANQMGFTRIVMGQDAWTDRDSDFVKFREENRGRLSHLRGGRSFDNAMIMQINDYIFVEFSGTGNAMYAYRIGEAPFNPESGSLEINVHLKSQGRCILRLPHAPRAYGYSNVRITGWMLKYDDELHKLGIRWMAEEPIKFVDKKESSPTSLSDVKIINPLRDTAIQRLLENISCIVSDNRQKGGVLSVQLKTPDDTTERELLRLGFTPVAKEPHRYWIK

SEQ ID NO: 2304 - protein, 470 aa, Klebsiella pneumoniae JHCK1
MGLGKTLQILTFLVWFIEKFPDEPPSLIVAPVSLLDNWERELDNFFYTSGISVMKLYGDTIKAVKYPKQAIPAHLQSQGIKNLLKPGWQGEAKIILTTYETLRDQEFSLARQPWSIMVCDEAQKIKNPAALITHAANAIQARFKVACTGTPVENTLVDLWSLFDFAQPGLLGALNEFGRHYVRPIENEAGRDTGQLESLRALIEPQTLRRTKEEVARDLPQKIEVVSCKQLPLSGPQKQLYLSSIANWQQQQALSEGMQQAGAGMLGLLHRLKLICAHPAVVNPEPRYREGSPKLNWMLKTLDEIKHTSKDKVIIFTELRDLQREIQHAIQQRFGFRPVIINGDTSTKSHSQNSRQRLIDNFQSQSGFGVIILSTVAVGFGVNVQKANHVIHFTRCWNPAKEDQATDRAYRIGQTKDVYVYYPTVMDSEITTFEETLDELLQRRRALARDMLCSTPELSSADFENILKGT

SEQ ID NO: 2305 - protein, 729 aa, Klebsiella pneumoniae JHCK1; identical to SEQ ID NO: 2297

SEQ ID NO: 2306 - protein, 246 aa, Klebsiella pneumoniae JHCK1; identical to SEQ ID NO: 2298

SEQ ID NO: 2307 - protein, 560 aa, Klebsiella pneumoniae JHCK1; identical to SEQ ID NO: 2299

SEQ ID NO: 2308 - protein, 1082 aa, Klebsiella pneumoniae JHCK1; identical to SEQ ID NO: 2300

SEQ ID NO: 2309 - protein, 701 aa, Klebsiella pneumoniae UHKPC57
MAVACFLFFYLFRAIKIVNSLKKYTRSITSIESSSPEEQLAHLQNLFKRPELKHAWNEFEESLHPQRELEGGEEKIVRIRATAPSSSYFSEQQLVDIPLNTEFFKHLPGILTGVGIIGTFYGLMIGLNHFDPSTPEQVTSSVNNLLHDVLYAFLGSAVAIAASIFITWLEKLSIAKCYKYLEKFTAAIDKLYVSGVGEEYLASLVKSSNESATQARHLKESLVTDLRDMLLHLAESQKVENERLANTLSNTYRESGAQFADQVSGAIENSLKSPLDKIAGAVQTASGDQSGMVQNMLQDVLTAFMAKLDTTFGQQFTNLNEMMGQTVGAIQTMQSGFSALLQDMRQVSDDSRQGSAQLMEQLLSEMKSGQQAMQAGMNDMLSSLQASVAKIGAEGEGAGERMARQLEKMFADSEAREKAQAEHMSAFIEAIQNSVQQGQSATMEKMATSVEALGEQLGSLFGQIDKGQQQISANQQVNQQSLHEQTQRVMSEVDDQIKKLIETVANQHQGTTETLNKLAEQTSRQIQDMQNGADKMRVAAERFEHAGDRVSEANHLTADVLNKAQSAGSSLSLATSELTSVVADYRNNREAVSKSIAMLELLAANTQSEQTTRSQFITDLKQHGERLQSYNREAQTFMENVSDVLGKGFEDFSEGVSRSLDKTLGKLDVEMAKASNLLAGSVEQIGESVSELDDVLSRVRA

SEQ ID NO: 2310 - protein, 247 aa, Klebsiella pneumoniae UHKPC57; identical to SEQ ID NO: 2294

SEQ ID NO: 2311 - protein, 560 aa, Klebsiella pneumoniae UHKPC57; identical to SEQ ID NO: 2295

SEQ ID NO: 2312 - protein, 1080 aa, Klebsiella pneumoniae UHKPC57; identical to SEQ ID NO: 2296

SEQ ID NO: 2313 - protein, 701 aa, Klebsiella pneumoniae UHKPC179; identical to SEQ ID NO: 2309

SEQ ID NO: 2314 - protein, 246 aa, Klebsiella pneumoniae UHKPC179; identical to SEQ ID NO: 2302

SEQ ID NO: 2315 - protein, 560 aa, Klebsiella pneumoniae UHKPC179; identical to SEQ ID NO: 2295

SEQ ID NO: 2316 - protein, 1080 aa, Klebsiella pneumoniae UHKPC179; identical to SEQ ID NO: 2296

SEQ ID NO: 2317 - protein, 711 aa, Klebsiella pneumoniae 303K; identical to SEQ ID NO: 2301

SEQ ID NO: 2318 - protein, 247 aa, Klebsiella pneumoniae 303K; identical to SEQ ID NO: 2294

SEQ ID NO: 2319 - protein, 560 aa, Klebsiella pneumoniae 303K; identical to SEQ ID NO: 2295

SEQ ID NO: 2320 - protein, 1080 aa, Klebsiella pneumoniae 303K; identical to SEQ ID NO: 2296

SEQ ID NO: 2321 - protein, 729 aa, Klebsiella pneumoniae MGH 46; identical to SEQ ID NO: 2293

SEQ ID NO: 2322 - protein, 247 aa, Klebsiella pneumoniae MGH 46; identical to SEQ ID NO: 2294

SEQ ID NO: 2323 - protein, 560 aa, Klebsiella pneumoniae MGH 46; identical to SEQ ID NO: 2295

SEQ ID NO: 2324 - protein, 1080 aa, Klebsiella pneumoniae MGH 46; identical to SEQ ID NO: 2296

SEQ ID NO: 2325 - protein, 497 aa, Klebsiella pneumoniae IS46
MKSSNESATQARHLKESLVTDLRDMLLHLAESQKVENERLANTLSNTYRESGAQFADQVSGAIENSLKSPLDKIAGAVQTASGDQSGMVQNMLQDVLTAFMAKLDTTFGQQFTNLNEMMGQTVGAIQTMQSGFSALLQDMRQVSDDSRQGSAQLMEQLLSEMKSGQQAMQAGMNDMLSSLQASVAKIGAEGEGAGERMARQLEKMFADSEAREKAQAEHMSAFIEAIQNSVQQGQSATMEKMATSVEALGEQLGSLFGQIDKGQQQISANQQVNQQSLHEQTQRVMSEVDDQIKKLIETVANQHQGTTETLNKLAEQTSRQIQDMQNGADKMRVAAERFEHAGDRVSEANHLTADVLNKAQSAGSSLSLATSELTSVVADYRNNREAVSKSIAMLELLAANTQSEQTTRSQFITDLKQHGERLQSYNREAQTFMENVSDVLGKGFEDFSEGVSRSLDKTLGKLDVEMAKASNLLAGSVEQIGESVSELDDVLSRVRA

SEQ ID NO: 2326 - protein, 247 aa, Klebsiella pneumoniae IS46; identical to SEQ ID NO: 2294

SEQ ID NO: 2327 - protein, 560 aa, Klebsiella pneumoniae IS46; identical to SEQ ID NO: 2295

SEQ ID NO: 2328 - protein, 729 aa, Klebsiella pneumoniae BIDMC 11; identical to SEQ ID NO: 2297

SEQ ID NO: 2329 - protein, 246 aa, Klebsiella pneumoniae BIDMC 11; identical to SEQ ID NO: 2298

SEQ ID NO: 2330 - protein, 560 aa, Klebsiella pneumoniae BIDMC 11; identical to SEQ ID NO: 2299

SEQ ID NO: 2331 - protein, 1082 aa, Klebsiella pneumoniae BIDMC 11; identical to SEQ ID NO: 2300

SEQ ID NO: 2332 - protein, 729 aa, Klebsiella pneumoniae BIDMC 11; identical to SEQ ID NO: 2293

SEQ ID NO: 2333 - protein, 247 aa, Klebsiella pneumoniae BIDMC 11; identical to SEQ ID NO: 2294

SEQ ID NO: 2334 - protein, 560 aa, Klebsiella pneumoniae BIDMC 11; identical to SEQ ID NO: 2295

SEQ ID NO: 2335 - protein, 1080 aa, Klebsiella pneumoniae BIDMC 11; identical to SEQ ID NO: 2296

SEQ ID NO: 2336 - protein, 729 aa, Klebsiella pneumoniae MGH 63; identical to SEQ ID NO: 2293

SEQ ID NO: 2337 - protein, 247 aa, Klebsiella pneumoniae MGH 63; identical to SEQ ID NO: 2294

SEQ ID NO: 2338 - protein, 560 aa, Klebsiella pneumoniae MGH 63; identical to SEQ ID NO: 2295

SEQ ID NO: 2339 - protein, 1080 aa, Klebsiella pneumoniae MGH 63; identical to SEQ ID NO: 2296

SEQ ID NO: 2340 - protein, 729 aa, Klebsiella pneumoniae MGH 75; identical to SEQ ID NO: 2293

SEQ ID NO: 2341 - protein, 247 aa, Klebsiella pneumoniae MGH 75; identical to SEQ ID NO: 2294

SEQ ID NO: 2342 - protein, 560 aa, Klebsiella pneumoniae MGH 75; identical to SEQ ID NO: 2295

SEQ ID NO: 2343 - protein, 1080 aa, Klebsiella pneumoniae MGH 75; identical to SEQ ID NO: 2296

SEQ ID NO: 2344 - protein, 729 aa, Klebsiella pneumoniae CHS 66; identical to SEQ ID NO: 2293

SEQ ID NO: 2345 - protein, 247 aa, Klebsiella pneumoniae CHS 66; identical to SEQ ID NO: 2294

SEQ ID NO: 2346 - protein, 560 aa, Klebsiella pneumoniae CHS 66; identical to SEQ ID NO: 2295

SEQ ID NO: 2347 - protein, 1080 aa, Klebsiella pneumoniae CHS 66; identical to SEQ ID NO: 2296

SEQ ID NO: 2348 - protein, 729 aa, Klebsiella pneumoniae MGH 65; identical to SEQ ID NO: 2293

SEQ ID NO: 2349 - protein, 247 aa, Klebsiella pneumoniae MGH 65; identical to SEQ ID NO: 2294

SEQ ID NO: 2350 - protein, 560 aa, Klebsiella pneumoniae MGH 65; identical to SEQ ID NO: 2295

SEQ ID NO: 2351 - protein, 1080 aa, Klebsiella pneumoniae MGH 65; identical to SEQ ID NO: 2296

SEQ ID NO: 2352 - protein, 729 aa, Klebsiella pneumoniae BIDMC 33B; identical to SEQ ID NO: 2293

SEQ ID NO: 2353 - protein, 247 aa, Klebsiella pneumoniae BIDMC 33B; identical to SEQ ID NO: 2294

SEQ ID NO: 2354 - protein, 560 aa, Klebsiella pneumoniae BIDMC 33B; identical to SEQ ID NO: 2295

SEQ ID NO: 2355 - protein, 1080 aa, Klebsiella pneumoniae BIDMC 33B; identical to SEQ ID NO: 2296

SEQ ID NO: 2356 - protein, 711 aa, Klebsiella pneumoniae subsp. pneumoniae PittNDM01; identical to SEQ ID NO: 2301

SEQ ID NO: 2357 - protein, 247 aa, Klebsiella pneumoniae subsp. pneumoniae PittNDM01; identical to SEQ ID NO: 2294

SEQ ID NO: 2358 - protein, 521 aa, Klebsiella pneumoniae subsp. pneumoniae PittNDM01
MEKRFDKAEKIPAPPHEMRLAALRRFRLAEELTEREWRMVFYGLVDTDPLHPNQPILLEDEQLFPEVNSAIKKRIETKTLKRRDWAALCASYFAYRNETPESNPHWCVLRGHIAQGYLVVKSAIRREKSWMKTIEFYHDIFTPQAGGVISQQLLAGESNSLSSLEKIAQIPDSSWLWKRIFTVLLAQLDTLDDPHYLDKIIWLLGLAAQWVRFRDDIMTATLTRYYHSTYRDQAHSALKQAALEYWDNPQLKSQQNKWHQYVSEPVAAMVRGWLAKQDLMHFFELLRGNGDVDQARLHYWLRFANQMGFTRIVMGQDAWTDRDSDFVKFREENRGRLSHLRGGRSFDNAMIMQINDYIFVEFSGTGNAMYAYRIGEAPFNPESGSLEINVHLKSQGRCILRLPHAPRAYGYSNVRITGWMLKYDDELHKLGIRWMAEEPIKFVDKKESSPTSLSDVKIINPLRDTAIQRLLENISCIVSDNRQKGGVLSVQLKTPDDTTERELLRLGFTPVAKEPHRYWIK

SEQ ID NO: 2359 - protein, 1080 aa, Klebsiella pneumoniae subsp. pneumoniae PittNDM01; identical to SEQ ID NO: 2296

SEQ ID NO: 2360 - protein, 729 aa, Klebsiella pneumoniae; identical to SEQ ID NO: 2293

SEQ ID NO: 2361 - protein, 247 aa, Klebsiella pneumoniae; identical to SEQ ID NO: 2294

SEQ ID NO: 2362 - protein, 560 aa, Klebsiella pneumoniae; identical to SEQ ID NO: 2295

SEQ ID NO: 2363 - protein, 1080 aa, Klebsiella pneumoniae; identical to SEQ ID NO: 2296

SEQ ID NO: 2364 - protein, 729 aa, Klebsiella pneumoniae; identical to SEQ ID NO: 2293

SEQ ID NO: 2365 - protein, 246 aa, Klebsiella pneumoniae; identical to SEQ ID NO: 2302

SEQ ID NO: 2366 - protein, 560 aa, Klebsiella pneumoniae; identical to SEQ ID NO: 2295

SEQ ID NO: 2367 - protein, 1080 aa, Klebsiella pneumoniae; identical to SEQ ID NO: 2296

SEQ ID NO: 2368 - protein, 729 aa, Klebsiella pneumoniae; identical to SEQ ID NO: 2293

SEQ ID NO: 2369 - protein, 247 aa, Klebsiella pneumoniae; identical to SEQ ID NO: 2294

SEQ ID NO: 2370 - protein, 560 aa, Klebsiella pneumoniae; identical to SEQ ID NO: 2295

SEQ ID NO: 2371 - protein, 1080 aa, Klebsiella pneumoniae; identical to SEQ ID NO: 2296

SEQ ID NO: 2372 - protein, 729 aa, Klebsiella pneumoniae; identical to SEQ ID NO: 2293

SEQ ID NO: 2373 - protein, 247 aa, Klebsiella pneumoniae; identical to SEQ ID NO: 2294

SEQ ID NO: 2374 - protein, 560 aa, Klebsiella pneumoniae; identical to SEQ ID NO: 2295

SEQ ID NO: 2375 - protein, 1080 aa, Klebsiella pneumoniae; identical to SEQ ID NO: 2296

SEQ ID NO: 2376 - protein, 729 aa, Klebsiella pneumoniae; identical to SEQ ID NO: 2293

SEQ ID NO: 2377 - protein, 247 aa, Klebsiella pneumoniae; identical to SEQ ID NO: 2294

SEQ ID NO: 2378 - protein, 560 aa, Klebsiella pneumoniae; identical to SEQ ID NO: 2295

SEQ ID NO: 2379 - protein, 1080 aa, Klebsiella pneumoniae; identical to SEQ ID NO: 2296

SEQ ID NO: 2380 - protein, 729 aa, Klebsiella pneumoniae
MSWLNSLLVALTSVEPHWVPVTVIVLVSFAVICFIFFYLSRAIKIVNGLKKYTKLISSVENSAPEAQLEHLKSLFQRPELRHAWNEFKESLHPQRELENGEEKIVRIRATAPSASFFSEQQLVDIPLNTEFFKHLPGILTGVGIIGTFYGLMIGLNHFDPSTPEQVSSSVNNLLHDVLYAFLGSAFAIFASIIVTWLEKLSIAKCYKYLEKFTAALDSLYDSGVGEEYLASLVKSSNESATQARHLKESLVTDLRDMLLQLADNQKVENERLAATLSTTYRESGQQFAEQVSGAIENSLKSPLDKIAGAVQTASGDQSGMVQNMLQDVLTAFMAKLDTTFGQQFTNLNDMMGQTVGVIQTMQTGFAALLQDMRQVSDDSRQGSAQLIEQLLSEMKSGQQAMQAGMNDMLTSLQASVAKIGAEGEGAGERMARQLEKMFADSEAREKAQAEHMAAFTEAIQSSVQQGQSATMEKMATSVEALGEQLGSLFGQIDKGQQQISANQQANQQSLHEQTQRVMSEADDQIKQLIETVASQHQGTTETLRLLAEQTNRQIQDMQNGADKMRQAAERFEHAGERVSEANHLTADVLNKAQSAGSSLSLATSELASVVADYRNNREAVSKSIAMLELLAANTQSEQTTRSQFIADLKQHGEHLQSYNREAQTFMENVSDVLGKGFEDFSEGVSRSLDKTLGKLDVEMAKASNLLASSVEQLGESVSELDDVLSRVRA

SEQ ID NO: 2381 - protein, 246 aa, Klebsiella pneumoniae
MFGNAFGVKKRRSDEAEKPFWISYADLMTAMMVLFLVVMVASLSSVTQRIQRAEQGEKTRGQDISRLCERLELHARNVNKTIVVDCHDNRISFGEAGRFDHNRFFLNAEGQKALQDVVPLVLDAADSEEGKKWFKQIVIEGFTDTDGSYLYNLHLSLQRSEWVMCSLLDSRSPLQKSISAEQQIQIRKLFLAGGVSFNNAKESKEASRRVELRMQFFGLKDKRDKADEVDFPPVVNKEVCQLVMPQ

SEQ ID NO: 2382 - protein, 560 aa, Klebsiella pneumoniae
MTPALNSLSQRIAAKLSSIQRDDDYLRNDFHTLTSAALDMERRFDKAERIPSPPQEMRLEALRRLRLVEELTEREWRMVFYSLADNDPLYPDRPILLEDDIFFPEVDNAIKTRLESKALKRKDWTALCSSYFAYQHESPEKNPHWCILRGHIAQGYFVVKAAIRREKSWMKTIELYHDIFTPQAGGVISRQLLAGENNSLSSLDKIAQIPDSSWLWKRIFAVLLAQLDTLDDPQFLEKISWLLGLASQWVRFRDDIMTETLTRYYYSVYRDQEHSALKQAALEFWDNPQLKSQQNKWHQYVSEPVAAMVRGWLAKQDLTHFFELLRGNGDVDQARLHYWLRFANQMGFTRIVMGPDAWQDRGSDFVKFREENKGRLSYLRGGRSFDNAMIMQINDYLFVEFSGTGNAMYAYRIGHAPFNPESRTIDINIHLKDQGRCALRLPHAPRAEGYNKVRITGWMLKYDDELCKLGVRWMAEEPVKFVDKKASSPASLSGIKIINPLRDTAIQSLVEGASCVVSDNRQKGGVLSVLLNTPDDTIERELLRLGFTPVAKEPHRYWIK

SEQ ID NO: 2383 - protein, 1082 aa, Klebsiella pneumoniae
MLKRLLSKLTGNRQQIEHNLKNQYQVEENGLSFPLSLVDDSQLWALASWLEQLAEEDYLISLTDRWLLSWDALYSLLDDDEHASSLPLIGVPEILPLRASLSSRGALSDSDLRIWIAEWATLPERHPIRFSRTGAIFTFENQQYLLSRENWVLIQATERLSAQQSQVPGETTNQLGWAAIRKCAKQASAKFDDYLEKTHVVKPTSLSLRLRKATVADTAVIEIEPHFEEQPANWLGSFDKNSQVHDSYRIPGENGELSHVIITPEVKEVLNSIHSIPGRRVAGSEALSFVRNPYSFLGEDAADVLAPEEHEQALFDARIFFHHFRLIPQQSDENKIIEVTLVLEPISPVPQPEVTFVFSAPWELEKFIQQLGISVAAQMPAGSWQGYELELSQFTEQQWYDCQALFTRWQQEIEGEEFSDVLDIAKYGDRVIGIGEFEKISSPWLTKAQSENWLPDDIDFSVFSGEVLTGWQPENLHHLGELQERITQAESAGETHIAAPWNDSQLPLDTAKTFIKNWAKQQSTENGSQDNVADKAVRAVLKIEQNIEEAAYIKQRRDSLLSARNAEPEIPLSLKENIRLKDHQREGVAWLQQLFLRSPEETAGCLLADDMGLGKTLQILSFLVWFIEKFPQEPPSLIVAPVSLLDNWERELDNFFYTAGIPVLKLYGETIKVVKYPKQGIPAHLQSQGIKNLLKPGWQGEAKIILTTYETLRDQEFSLARQPWSIMVCDEAQKIKNPAALITHAANAIQARFKVACTGTPVENTLVDLWSLFDFAQPGLLGALNEFGKHYVRPIENEAGRDTERLERLRALIEPQTLRRTKEEVARDLPQKIEVESCKQLMLSGVQKQLYLSSVANWQQQQALSEGMQQAGTGMLGLLHRLKLICAHPAVVNPEPRFRDNSPKLNWLLKILAEIKSTTKDKVIIFTELRDLQRELQHAIHQKFGIRPVIINGDTSTKSNSQNSRQRLIDDFQVHPGFGVIILSTVAVGFGVNVQKANHVIHFTRCWNPAKEDQATDRAYRIGQIKDVYVYYPTVRDPEITTFEETLDDLLLRRRSLARDMLCATPDLSGADFEDILKGALD

SEQ ID NO: 2384 - protein, 729 aa, Klebsiella pneumoniae; identical to SEQ ID NO: 2293

SEQ ID NO: 2385 - protein, 247 aa, Klebsiella pneumoniae; identical to SEQ ID NO: 2294

SEQ ID NO: 2386 - protein, 560 aa, Klebsiella pneumoniae; identical to SEQ ID NO: 2295

SEQ ID NO: 2387 - protein, 1080 aa, Klebsiella pneumoniae; identical to SEQ ID NO: 2296

SEQ ID NO: 2388 - protein, 729 aa, Klebsiella pneumoniae; identical to SEQ ID NO: 2293

SEQ ID NO: 2389 - protein, 247 aa, Klebsiella pneumoniae; identical to SEQ ID NO: 2294

SEQ ID NO: 2390 - protein, 560 aa, Klebsiella pneumoniae; identical to SEQ ID NO: 2295

SEQ ID NO: 2391 - protein, 1080 aa, Klebsiella pneumoniae; identical to SEQ ID NO: 2296

SEQ ID NO: 2392 - protein, 729 aa, Klebsiella pneumoniae; identical to SEQ ID NO: 2293

SEQ ID NO: 2393 - protein, 247 aa, Klebsiella pneumoniae; identical to SEQ ID NO: 2294

SEQ ID NO: 2394 - protein, 560 aa, Klebsiella pneumoniae; identical to SEQ ID NO: 2295

SEQ ID NO: 2395 - protein, 1080 aa, Klebsiella pneumoniae; identical to SEQ ID NO: 2296

SEQ ID NO: 2396 - protein, 729 aa, Klebsiella pneumoniae; identical to SEQ ID NO: 2293

SEQ ID NO: 2397 - protein, 247 aa, Klebsiella pneumoniae; identical to SEQ ID NO: 2294

SEQ ID NO: 2398 - protein, 560 aa, Klebsiella pneumoniae; identical to SEQ ID NO: 2295

SEQ ID NO: 2399 - protein, 1080 aa, Klebsiella pneumoniae; identical to SEQ ID NO: 2296

SEQ ID NO: 2400 - protein, 729 aa, Klebsiella pneumoniae; identical to SEQ ID NO: 2293

SEQ ID NO: 2401 - protein, 247 aa, Klebsiella pneumoniae; identical to SEQ ID NO: 2294

SEQ ID NO: 2402 - protein, 560 aa, Klebsiella pneumoniae; identical to SEQ ID NO: 2295

SEQ ID NO: 2403 - protein, 1080 aa, Klebsiella pneumoniae; identical to SEQ ID NO: 2296

SEQ ID NO: 2404 - protein, 729 aa, Klebsiella pneumoniae; identical to SEQ ID NO: 2293

SEQ ID NO: 2405 - protein, 247 aa, Klebsiella pneumoniae; identical to SEQ ID NO: 2294

SEQ ID NO: 2406 - protein, 560 aa, Klebsiella pneumoniae; identical to SEQ ID NO: 2295

SEQ ID NO: 2407 - protein, 1080 aa, Klebsiella pneumoniae; identical to SEQ ID NO: 2296

SEQ ID NO: 2408 - protein, 729 aa, Klebsiella pneumoniae; identical to SEQ ID NO: 2297

SEQ ID NO: 2409 - protein, 246 aa, Klebsiella pneumoniae; identical to SEQ ID NO: 2298

SEQ ID NO: 2410 - protein, 560 aa, Klebsiella pneumoniae; identical to SEQ ID NO: 2299

SEQ ID NO: 2411 - protein, 1082 aa, Klebsiella pneumoniae; identical to SEQ ID NO: 2300

SEQ ID NO: 2412 - protein, 729 aa, Klebsiella pneumoniae
MSWLNSLLVALTSVEPHWVPVTVIVLVSFAVICFIFFYLSRAIKIVNGLKKYTKLISSVENSAPEAQLEHLKSLFQRPELRHAWNEFKESLHPQRELENGEEKIVRIRATAPSASFFSEQQLVDIPLNTEFFKHLPGILTGVGIIGTFYGLMIGLNHFDPSTPEQVSSSVNNLLHDVLYAFLGSAFAIFASIIVTWLEKLSIAKCYKYLEKFTAALDSLYDSGVGEEYLASLVKSSNESATQARHLKESLVTDLRDMLLQLADNQKVENERLAATLSTTYRESGQQFAEQVSGAIENSLKSPLDKIAGAVQTASGDQSGMVQNMLQDVLTAFMAKLDTTFGQQFTNLNDMMGQTVGVIQTMQTGFAALLQDMRQVSDDSRQGSAQLIEQLLSEMKSGQQAMQAGMNDMLTSLQASVAKIGAEGEGAGERMAHQLEKMFADSEAREKAQAEHMAAFIEAIQSSVQQGQSATMEKMATSVEALGEQLGSLFGQIDKGQQQISANQQANQQSLHEQTQRVMSEADGQIKQLIETVASQHQGTTETLRLLAEQTNRQIQDMQNGADKMRQAAERFEHAGERVSEANHLTADVLNKAQSAGSSLSLATSELASVVADYRNNREAVSKSIAMLELLAANTQSEQTTRSQFIADLKQHGEHLQSYNREAQTFMENVSDVLGKGFEDFSEGVSRSLDKTLGKLDVEMAKASNLLASSVEQLGESVSELDDVLSRVRA

SEQ ID NO: 2413 - protein, 246 aa, Klebsiella pneumoniae; identical to SEQ ID NO: 2381

SEQ ID NO: 2414 - protein, 560 aa, Klebsiella pneumoniae
MTPALNSLSQRIAAKLSSIQRDDDYLRNDFHTLTSAALDMERRFDKAERIPSPPQEMRLEALRRLRLAEELTEREWRMVFYSLADNDPLYPDRPILLEDDIFFPEVDNAIKTRLESKALKRKDWTALCSSYFAYQHESPEKNPHWCILRGHIAQGYFVVKAAIRREKSWMKTIELYHDIFTPQAGGVISRQLLAGENNSLSSLDKIAQIPDSSWLWKRIFAVLLAQLDTLDDPQFLEKISWLLGLASQWVRFRDDIMTETLTRYYYSVYRDQEHSALKQAALEFWDNPQLKSQQNKWHQYVSEPVAAMVRGWLAKQDLTHFFELLRGNGDVDQARLHYWLRFANQMGFTRIVMGPDAWQDRGSDFVKFREENKGRLSYLRGGRSFDNAMIMQINDYLFVEFSGTGNAMYAYRIGHAPFNPESRTIDINIHLKDQGRCALRLPHAPRAEGYNKVRITGWMLKYDDELRKLGVRWMAEEPVKFVDKKASSPASLSGIKIINPLRDTAIQSLVEGASCVVSDNRQKGGVLSVLLNTPDDTIERELLRLGFTPVAKEPHRYWIK

SEQ ID NO: 2415 - protein, 1082 aa, Klebsiella pneumoniae
MLKRLLSKLTGNRQQIEHNLKNQYQVEESGLSFPLSLVDDSQLWALASWLEQLAEEDYLISLTDRWLLSWDALYSLLDDDEHASSLPLIGVPEILPLRASLSSRGALSDSDFRIWIAEWATLPERHPIRFSRTGAIFTFENQQYLLSRENWVLIQATERLSTQQSQVPGETTNQLGWAAIRKCAKQASAKFDDYLEKTHVVKPTSLSLRLRKATVADTAVIEIEPHFEEQPANWLGSFDKNSQVHDSYRIPGENGELSHVIITPEVKEVLNSIHSIPGRRVAGSEALSFVRNPYSFLGEDAADVLAPEEHEQALFDARIFFHHFRLIPQQSDENKIIEVTLVLEPISPVPQPEVTFVFSAPWELEKFIQQLGISVAAQMPAGSWQGYELELSQFTEQQWYDCQALFTRWQQEIEGEEFSDVLDIAKYGDRVIGIGEFEKISSPWLTKAQSENWLPDDIDFSVFSGEVLTGWQPENLHHLGELQERITQAEAAGETHIAAPWNDSQLPLDTVKTFIKNWAKQQSTENGSQDNVADKAVRAVLKIEQNIEEAAYIKQRRDSLLSARNAEPEIPLSLKENIRLKDHQREGVAWLQQLFLRSPEETAGCLLADDMGLGKTLQILSFLVWFIEKFPQEPPSLIVAPVSLLDNWERELDNFFYTAGIPVLKLYGETIKVVKYSKQAIPAHLQSQGIKNLLKPGWQGEAKIILTTYETLRDQEFSLARQPWSIMVCDEAQKIKNPAALITHAANAIQARFKVACTGTPVENTLVDLWSLFDFAQPGLLGALNEFGKHYVRPIENEAGRDTERLERLRALIEPQTLRRTKEEVARDLPQKIEVESCKQLMLSGVQKQLYLSSVANWQQQQALSEGMQQAGTGMLGLLHRLKLICAHPAVVNPEPRFRDNSPKLNWLLKILAEIKSTTKDKVIIFTELRDLQRELQHAIHQKFGIRPVIINGDTSTKSNSQNSRQRLIDDFQVHPGFGVIILSTVAVGFGVNVQKANHVIHFTRCWNPAKEDQATDRAYRIGQIKDVYVYYPTVRDPEITTFEETLDDLLLRRRSLARDMLCATPDLSGADFEDILKGALD

SEQ ID NO: 2416 - protein, 729 aa, Klebsiella pneumoniae; identical to SEQ ID NO: 2293

SEQ ID NO: 2417 - protein, 247 aa, Klebsiella pneumoniae; identical to SEQ ID NO: 2294

SEQ ID NO: 2418 - protein, 560 aa, Klebsiella pneumoniae; identical to SEQ ID NO: 2295

SEQ ID NO: 2419 - protein, 1080 aa, Klebsiella pneumoniae
MLKRLLSKLTGDRQQIERHLKNQYRAEENGLSFPQSLVDDPELWALASWLEQLAEEDYLISLTDRWLLSWEALYHLLEDEEHASSLPLIGIPEVLPLRASMSSRGALSDKDFRVWIAEWTTLPSRQTIRFSRTGAIFTHENQQHLLSRENWALLQATEQLSIQQTQAPGETTNQLGWATIRKCAKQAAAKFDDYLEKTHVIKPTSLSLRLRKATVADTAVIEIEPHFEDQPANWLGSFDKNAQVHDSYRIPGENGELSHVIIPPQVKEVLNSIHSIPGRRVAGSEALSFVRNPYTFLGEDAASVIAPEEHEQALFDAHIFFHHFRLQPSVNDENKINDITLVLEPVSPIPQPEVTFLFSAPWELDKFVQAVGISVAAQMPAGSWQGYELELSQFTEQQWHDCQSLLTRWQQEVEGKEFSDVLDLGKYGDRVIGIGEFEKISSPWLTKAQSENWLPVGIDFSEFSVETLDGWQPDNLQHFDELQERITYAEATGETHIISPWNETELPLDAAKTFSKNWEKQQNAAHESESNVVEKAARAVLKIEQNIEEAVYIKQRRNSLLNARNAEPEIPLSLKEHIRLKDHQREGVAWLQQLFLRSPQETAGCLLADDMGLGKTLQILTFLVWFIEKFPDEPPSLIVAPVSLLDNWERELDNFFYTSGISVMKLYGDTIKAVKYPKQAIPAHLQSQGIKNLLKPGWQGEAKIILTTYETLRDQEFSLARQPWSIMVCDEAQKIKNPAALITHAANAIQARFKVACTGTPVENTLVDLWSLFDFAQPGLLGALNEFGRHYVRPIENEAGRDTGQLESLRALIEPQTLRRTKEEVARDLPQKIEVVSCKQLPLSGPQKQLYLSSIANWQQQQALSEGMQQAGAGMLGLLHRLKLICAHPAVVNPEPRYREGSPKLNWMLKTLDEIKHTSKDKVIIFTELRDLQREIQHAIQQRFGFRPVIINGDTSTKSHSQNSRQRLIDNFQSQSGFGVIILSTVAVGFGVNVQKANHVIHFTRCWNPAKEDQATDRAYRIGQTKDVYVYYPTVMDSEITTFEETLDELLQRRRALARDMLCSTPELSSADFENILKGT

SEQ ID NO: 2420 - protein, 729 aa, Klebsiella pneumoniae; identical to SEQ ID NO: 2293

SEQ ID NO: 2421 - protein, 247 aa, Klebsiella pneumoniae; identical to SEQ ID NO: 2294

SEQ ID NO: 2422 - protein, 560 aa, Klebsiella pneumoniae; identical to SEQ ID NO: 2295

SEQ ID NO: 2423 - protein, 1080 aa, Klebsiella pneumoniae; identical to SEQ ID NO: 2296

SEQ ID NO: 2424 - protein, 729 aa, Klebsiella pneumoniae; identical to SEQ ID NO: 2293

SEQ ID NO: 2425 - protein, 246 aa, Klebsiella pneumoniae; identical to SEQ ID NO: 2302

SEQ ID NO: 2426 - protein, 560 aa, Klebsiella pneumoniae; identical to SEQ ID NO: 2295

SEQ ID NO: 2427 - protein, 1080 aa, Klebsiella pneumoniae; identical to SEQ ID NO: 2296

SEQ ID NO: 2428 - protein, 729 aa, Klebsiella pneumoniae subsp. pneumoniae; identical to SEQ ID NO: 2293

SEQ ID NO: 2429 - protein, 246 aa, Klebsiella pneumoniae subsp. pneumoniae; identical to SEQ ID NO: 2302

SEQ ID NO: 2430 - protein, 560 aa, Klebsiella pneumoniae subsp. pneumoniae; identical to SEQ ID NO: 2295

SEQ ID NO: 2431 - protein, 1080 aa, Klebsiella pneumoniae subsp. pneumoniae; identical to SEQ ID NO: 2296

SEQ ID NO: 2432 - protein, 851 aa, Klebsiella pneumoniae
MFSLTSFLDTLTSVNPENVPKYVALVVVVLLVCFIARYAIPSFVISARFKKKAREIQLIAKDKPAQQLEKLDAFFSGKFFAHPWSEFKESLHRQFELDGDEGQKRIHSIRSTAPASAWFSEPLLVEIPLYTEAFKHLPGILTGIGIIGTFSGLMIGLHHFDPSTPEQVSASVANLLRDVLYAFLGSAFAITFSILVTMFEKWRLARCYKNLEFLTASIDQLFEGGVGEDYLSQLLSSTKENTIHAKQLKDGLVSDLREMLQNLVDSQVRENQKMAETLSSTYRESGQQIAEQVSGAIETSLKNPLDKIAGVVQTASGDQSHRVQSMLENVLTAFMNKMDNTFGQQFTTMQEMMGRSVEAIQSMQSGFATLLQDMRQAGDDSRQGSAQLISQLLSEMKSGQQEMQAGMNDMLRSLQESVARIGAEGEGAGERMAQQLEKIFADSEVREKAMAEQMRAFIEAIQSSVQQGQNETMEKMAASVDTLGSHMATLFAQLENGQQQLNQQQNQAQNLLMSNMSKGVEDLTQSLAGVFSQLESGQKQMSQTQELGQRALHEETQQLLARSEAREQAAAEQQQDFMAALQKTMHSGQDALREKMTSGIDQLGSQLGSLFGQLEEGQKSLSQQQQSAQNALQQEAQRIIGQPESQVQALMQMLREQQSASGDLLQRMAQNTTRHLEEIQTGADKMRVAADRFEAAGNRVTEANNLTAEVLNGTQQAGRTLSSASAELGALIADYRNTREVVANAISTLETLINSSYDEQTSRSRFVEDLKSYSEGLQQYNREAQEFLHNIADVMGTSFESFTTGVVSGLNRSLQEMDTQLTKAAGALSSSVEIIGESVDTLETVLRSRRA

SEQ ID NO: 2433 - protein, 245 aa, Klebsiella pneumoniae
MFNRAFNGRQRRSDEAEKPFWISYADLMTAMMVLFLVVMVASLSSVTQRIQQAEAGEKSRGHDIARLCEKLELQAKNLNKTIHVDCHDNRISFGEAGRFEHNRFSLTPEGLKALQDVVPLVLDAANSDEGKKWFKQIVIEGFTDTDGSYLYNLHLSLQRSEWVMCSLLDSRSALQQRITADQQIQIRKLFLAGGVSFNNAKESKEASRRVELRMQFFGLKDKKQDESMDVVPSISQETCQLGAVQ

SEQ ID NO: 2434 - protein, 627 aa, Klebsiella pneumoniae
MTSAIEKLKSRLLPYREKSVDPVVGHPFTYLQRVINQLERKVDARAVKMVPPAEKRRQAISRLRSGETPQPSEWKMIFFGLNDVAEGDLFDTALIDDAADFAKISAEIQSKIAHQRLTRREWLALCTSYFGLVSDAPEENPQWLQLRMQIVSGFKQLKESSPRPLSWMAVIDTYGDIFTDNAGFLLGQQLGRGEITDISVLEKVAQIPQTSWLWCKIVNHLVSEIFRQTDDEFEQKINELIALSRQLSRFKDNLLAAMLTRYCHSVYKQKTHLELKQISLEYWGNPQLIARNKGWLLHVEKPVLLMVQSWFAKDDLKLFFELLKGNRDVDEARLFYWLRYTNQMSYTRIVLGTDSQESKDPAFVEFRNKNACRLSQLTGTGARDNNAIIMQIGDYLFVEYSKVGAVYPYHHAKAPFDAEKQTLNIERELKSMSKTVGERLIHRSSVNDWEHNPIHGWMKNFDDALNRLGIYYQAEDTTLVNSNSVDYSRFEIKPLTTTSVTDSVIESVNIPEPPTAAEPIAPPKQVRSSLAASMLERHQRNDVLAKEKRLKIITKSQKARQAREAELSREQQIKEIIRSAGCKVEDRRGMGGVLHIQFLTPNYDATKELLRLGFKPVSGKYLRYWSK

SEQ ID NO: 2435 - protein, 1077 aa, Klebsiella pneumoniae
MFKGLFGKLFRDKKSNSAPTIPLYGLQPEGVLFPFSIAENEDNWLVVSCLEQLHEEDYVSHWSDCWFLSWDDFYRILKNEDYASSLAIFSFPQQRNLTAHLTATGSISNDTFRVFIDKWTQPDDYRPVEITNLGASFSSPEGTFVLSEENWQLLDSLQQLRLQQRQTPGETVNQTGWAKIRQLAKKAEATLDDYLAKTIVIRPEALQLKLRKFLVADTRVLEIEPVFDEQPANWLQSFDRTQQVQDRYRVLGDDGELNHVILSPEVKDVLASVHAITGRRVAGDDALSFVRNPYTWIGEEASQVLDPEVYEQNLQDAGIYFYDFRLEPQVDENMQIKSVSLILSPRTEQPVPNETYVFNRPIELAALITELEQKLAAHLPAGVWQGYDLELSRFTQDELQEYQALLEDWRKQAAGLNFSHVLDLNKYSDRVIGIGEFEKISSPYLVKNESENWLPDNLVKEMCEDMFSGWDLDNHQHFHELETRLEDAKASDAPEVAMPWNENLLPREEAEVFHEKWKKKIDAETSDTANAKPVSRAVLLIEQNIEQALYIKQRRTSLLEAHLAEAELPIILKDSIQLREHQCKGVAWLQQLYLKSPTETTGCLLADDMGLGKTLQILTFLIWHRERFPDAPPSLIVAPVSLLDNWEREVGNFFLREQVSILKLYGNELREKKCAKESIPLALKSKGIKNLLQNDWVGEAQIVLTTYETLRDQEFSLARQPWSIMVCDEAQKIKNPAALITQSAKAIQVQFKVACTGTPVENTLVDLWCLFDFVQPGLLGALNNFGKDYLWPIEQESNDKVLESLRKLIEPQTLRRTKEEVAKDLPEKIEDKSCKQLSMLPLQRDLYTHSVVSWQNQQEISEGLDQRGAGMLGLLHRLKLICAWPYSVSADLRLRNDAPKVKWLLDTLNNIRQSSDDKVIIFTELRDIQRELQHLVSQHFGFKPFIINGDTSTKSGSDQNRQSLIDNFQSSPGFNVIILSTIAVGFGVNVQKANHVIHFTRCWNPAKEDQATDRAYRIGQQKDVYVYYPTVRDSQLMTFEETLDELLNRRRAMARDMLKASTDLIAADFEAVLTRAP

SEQ ID NO: 2436 - protein, 729 aa, Klebsiella pneumoniae; identical to SEQ ID NO: 2293

SEQ ID NO: 2437 - protein, 246 aa, Klebsiella pneumoniae; identical to SEQ ID NO: 2302

SEQ ID NO: 2438 - protein, 560 aa, Klebsiella pneumoniae; identical to SEQ ID NO: 2295

SEQ ID NO: 2439 - protein, 1080 aa, Klebsiella pneumoniae; identical to SEQ ID NO: 2296

SEQ ID NO: 2440 - protein, 729 aa, Klebsiella pneumoniae; identical to SEQ ID NO: 2293

SEQ ID NO: 2441 - protein, 246 aa, Klebsiella pneumoniae; identical to SEQ ID NO: 2302

SEQ ID NO: 2442 - protein, 560 aa, Klebsiella pneumoniae; identical to SEQ ID NO: 2295

SEQ ID NO: 2443 - protein, 1080 aa, Klebsiella pneumoniae; identical to SEQ ID NO: 2296

SEQ ID NO: 2444 - protein, 729 aa, Klebsiella pneumoniae subsp. pneumoniae; identical to SEQ ID NO: 2293

SEQ ID NO: 2445 - protein, 246 aa, Klebsiella pneumoniae subsp. pneumoniae; identical to SEQ ID NO: 2302

SEQ ID NO: 2446 - protein, 560 aa, Klebsiella pneumoniae subsp. pneumoniae; identical to SEQ ID NO: 2295

SEQ ID NO: 2447 - protein, 1080 aa, Klebsiella pneumoniae subsp. pneumoniae; identical to SEQ ID NO: 2296

SEQ ID NO: 2448 - protein, 729 aa, Klebsiella pneumoniae; identical to SEQ ID NO: 2293

SEQ ID NO: 2449 - protein, 246 aa, Klebsiella pneumoniae; identical to SEQ ID NO: 2302

SEQ ID NO: 2450 - protein, 560 aa, Klebsiella pneumoniae; identical to SEQ ID NO: 2295

SEQ ID NO: 2451 - protein, 1080 aa, Klebsiella pneumoniae; identical to SEQ ID NO: 2296

SEQ ID NO: 2452 - protein, 729 aa, Klebsiella pneumoniae; identical to SEQ ID NO: 2293

SEQ ID NO: 2453 - protein, 246 aa, Klebsiella pneumoniae; identical to SEQ ID NO: 2302

SEQ ID NO: 2454 - protein, 560 aa, Klebsiella pneumoniae; identical to SEQ ID NO: 2295

SEQ ID NO: 2455 - protein, 1080 aa, Klebsiella pneumoniae; identical to SEQ ID NO: 2296

SEQ ID NO: 2456 - protein, 729 aa, Klebsiella pneumoniae; identical to SEQ ID NO: 2293

SEQ ID NO: 2457 - protein, 246 aa, Klebsiella pneumoniae; identical to SEQ ID NO: 2302

SEQ ID NO: 2458 - protein, 560 aa, Klebsiella pneumoniae; identical to SEQ ID NO: 2295

SEQ ID NO: 2459 - protein, 1080 aa, Klebsiella pneumoniae; identical to SEQ ID NO: 2296

SEQ ID NO: 2460 - protein, 729 aa, Klebsiella pneumoniae; identical to SEQ ID NO: 2293

SEQ ID NO: 2461 - protein, 246 aa, Klebsiella pneumoniae; identical to SEQ ID NO: 2302

SEQ ID NO: 2462 - protein, 560 aa, Klebsiella pneumoniae; identical to SEQ ID NO: 2295

SEQ ID NO: 2463 - protein, 1080 aa, Klebsiella pneumoniae; identical to SEQ ID NO: 2296

SEQ ID NO: 2464 - protein, 729 aa, Klebsiella pneumoniae; identical to SEQ ID NO: 2293

SEQ ID NO: 2465 - protein, 246 aa, Klebsiella pneumoniae; identical to SEQ ID NO: 2302

SEQ ID NO: 2466 - protein, 560 aa, Klebsiella pneumoniae; identical to SEQ ID NO: 2295

SEQ ID NO: 2467 - protein, 1080 aa, Klebsiella pneumoniae; identical to SEQ ID NO: 2296

SEQ ID NO: 2468 - protein, 729 aa, Klebsiella pneumoniae; identical to SEQ ID NO: 2293

SEQ ID NO: 2469 - protein, 246 aa, Klebsiella pneumoniae; identical to SEQ ID NO: 2302

SEQ ID NO: 2470 - protein, 560 aa, Klebsiella pneumoniae; identical to SEQ ID NO: 2295

SEQ ID NO: 2471 - protein, 1080 aa, Klebsiella pneumoniae; identical to SEQ ID NO: 2296

SEQ ID NO: 2472 - protein, 729 aa, Klebsiella pneumoniae; identical to SEQ ID NO: 2293

SEQ ID NO: 2473 - protein, 246 aa, Klebsiella pneumoniae; identical to SEQ ID NO: 2302

SEQ ID NO: 2474 - protein, 560 aa, Klebsiella pneumoniae; identical to SEQ ID NO: 2295

SEQ ID NO: 2475 - protein, 1080 aa, Klebsiella pneumoniae; identical to SEQ ID NO: 2296

SEQ ID NO: 2476 - protein, 729 aa, Klebsiella pneumoniae; identical to SEQ ID NO: 2293

SEQ ID NO: 2477 - protein, 246 aa, Klebsiella pneumoniae; identical to SEQ ID NO: 2302

SEQ ID NO: 2478 - protein, 560 aa, Klebsiella pneumoniae; identical to SEQ ID NO: 2295

SEQ ID NO: 2479 - protein, 1080 aa, Klebsiella pneumoniae; identical to SEQ ID NO: 2296

SEQ ID NO: 2480 - protein, 729 aa, Klebsiella pneumoniae; identical to SEQ ID NO: 2293

SEQ ID NO: 2481 - protein, 246 aa, Klebsiella pneumoniae; identical to SEQ ID NO: 2302

SEQ ID NO: 2482 - protein, 560 aa, Klebsiella pneumoniae; identical to SEQ ID NO: 2295

SEQ ID NO: 2483 - protein, 1080 aa, Klebsiella pneumoniae; identical to SEQ ID NO: 2296

SEQ ID NO: 2484 - protein, 729 aa, Klebsiella pneumoniae; identical to SEQ ID NO: 2293

SEQ ID NO: 2485 - protein, 246 aa, Klebsiella pneumoniae; identical to SEQ ID NO: 2302

SEQ ID NO: 2486 - protein, 560 aa, Klebsiella pneumoniae; identical to SEQ ID NO: 2295

SEQ ID NO: 2487 - protein, 1080 aa, Klebsiella pneumoniae; identical to SEQ ID NO: 2296

SEQ ID NO: 2488 - protein, 729 aa, Klebsiella pneumoniae; identical to SEQ ID NO: 2293

SEQ ID NO: 2489 - protein, 246 aa, Klebsiella pneumoniae; identical to SEQ ID NO: 2302

SEQ ID NO: 2490 - protein, 560 aa, Klebsiella pneumoniae; identical to SEQ ID NO: 2295

SEQ ID NO: 2491 - protein, 1080 aa, Klebsiella pneumoniae; identical to SEQ ID NO: 2296

SEQ ID NO: 2492 - protein, 729 aa, Klebsiella pneumoniae; identical to SEQ ID NO: 2293

SEQ ID NO: 2493 - protein, 246 aa, Klebsiella pneumoniae; identical to SEQ ID NO: 2302

SEQ ID NO: 2494 - protein, 560 aa, Klebsiella pneumoniae; identical to SEQ ID NO: 2295

SEQ ID NO: 2495 - protein, 1080 aa, Klebsiella pneumoniae; identical to SEQ ID NO: 2296

SEQ ID NO: 2496 - protein, 729 aa, Klebsiella pneumoniae; identical to SEQ ID NO: 2293

SEQ ID NO: 2497 - protein, 246 aa, Klebsiella pneumoniae; identical to SEQ ID NO: 2302

SEQ ID NO: 2498 - protein, 560 aa, Klebsiella pneumoniae; identical to SEQ ID NO: 2295

SEQ ID NO: 2499 - protein, 1080 aa, Klebsiella pneumoniae; identical to SEQ ID NO: 2296

SEQ ID NO: 2500 - protein, 729 aa, Klebsiella pneumoniae; identical to SEQ ID NO: 2293

SEQ ID NO: 2501 - protein, 246 aa, Klebsiella pneumoniae; identical to SEQ ID NO: 2302

SEQ ID NO: 2502 - protein, 560 aa, Klebsiella pneumoniae; identical to SEQ ID NO: 2295

SEQ ID NO: 2503 - protein, 1080 aa, Klebsiella pneumoniae; identical to SEQ ID NO: 2296

SEQ ID NO: 2504 - protein, 729 aa, Klebsiella pneumoniae; identical to SEQ ID NO: 2293

SEQ ID NO: 2505 - protein, 246 aa, Klebsiella pneumoniae; identical to SEQ ID NO: 2302

SEQ ID NO: 2506 - protein, 560 aa, Klebsiella pneumoniae; identical to SEQ ID NO: 2295

SEQ ID NO: 2507 - protein, 1080 aa, Klebsiella pneumoniae; identical to SEQ ID NO: 2296

SEQ ID NO: 2508 - protein, 729 aa, Klebsiella pneumoniae; identical to SEQ ID NO: 2293

SEQ ID NO: 2509 - protein, 246 aa, Klebsiella pneumoniae; identical to SEQ ID NO: 2302

SEQ ID NO: 2510 - protein, 560 aa, Klebsiella pneumoniae; identical to SEQ ID NO: 2295

SEQ ID NO: 2511 - protein, 1080 aa, Klebsiella pneumoniae; identical to SEQ ID NO: 2296

SEQ ID NO: 2512 - protein, 678 aa, Yersinia enterocolitica
MDILLAPGVLVRNGILHIASILKNDAAPGYVTILLVAALCIIVVRWRKLVKRRLTALGSIHAIIAKTPEDEFSQHVTNVDASIAALNMTEEQQNVAEAWKEYRETHIVDDQDGKLVVRNAVRPSQFFNLDDLHFTQGFWRIVPGLFVTIGLSLTFLGLISALNSMSTSLDDGGSAALEGLLTIASAKFIMSLTGLFCSIVFTIGLRSGTSQLEKTVHSLNSLIEKRLTFISLEDLSIRQLKATIESREHFRKLGLEMVAEIGRPLREDLPRAISESISSAITPVIEQVSRLGNDGVGEMVQSLSSRFSEDVGRALTQASERISLAGDQIKLLAERMDQSSGKMGNEMESAIGRLGLAVETLREGMSQTAETATSAFNQGAENLLATMNSTLQGIKDNTGDGARAMGEAAADMKAAALGIRTEMETAAKQGAEAAQARMSESASQASDAIGQAATNILSAFDNTAGEITKVTETMTQNASSQLLSPLSTIAEKLEGVMGMLDETSTALRRASDGIKEGAIASENASGSFRSSAQSLTDAANPIRSVMERIEISTRQLRESSENSLSAIANAAKTNAEQSAMTLSAAQETLGGQQRAVESTLTNLQSLITALRGQGERLDSIDEKLGKAFDSYQEQVATSVETLFDHVKTMQSALMPALDTMQGIVHQAENFAPKQGRMS

SEQ ID NO: 2513 - protein, 287 aa, Yersinia enterocolitica
MRGNANRKRSNEEEEESVFVSMTDMTVSFLFIVMVLLAFFASRYNDKNTVPRDEYEQAVQSRDKTIEDLRSEIAALKRVDPLEQYMSRAATARLNLLYQLRDNLKQSFPLLPVDVIPEEGTLRFQGEGLFISNSFALNDDKRKIVEALAKTLDSLLPCYTFNQNTGWNKSCNPSFAIIEAVQIEGHTDSKGDGVYNLNLSTNRAITTFTSMLAAAPDLVAHFNMRHQPVLSVAGYGKMRPVRPNDTQQNMAMNRRIDLRIIMHTPANAAEIEDIRQRLIEPLKKSMP

SEQ ID NO: 2514 - protein, 442 aa, Yersinia enterocolitica
MKLSDIFLKPVALFKPAIAVSKGLSAKIQAIHERWPDVVREIAERDREKVLRKLLGYVESWQWDEVKMSFICSGAPIVFDKEFRTQDDFAALQEFYLRETIVTDSSSFISAMISAYIRSYEPGSAHTTKIKNCLDISSEHMSDKWKDVIDQLPEFFDANQAHQALAEKMVMMDSPWKELKQFGITHPHEPGLMSHAHLAYIALLRPELNEKATIKKLFAWLKPDGKSNALMSGASEAINALLSHWLYKQPDEGLSRFLTETLVAFYEDPRLSRGGVWGSVDEECRNLIINWLTRENILFFLDVVSKVEDSHMWEPRREFWLGLYNQGKITAAWVAFSSIASQKAKEMKGSMRDSSTLNFGIQTALGNRDKTSLLILQIGKCIVIEGSHSYKVHIFRNDNKRSPELYQLKYNCEQIRMLPNPVAIPHFSGWQDKVREQIEYLS

SEQ ID NO: 2515 - protein, 1042 aa, Yersinia enterocolitica
MTFTFDHNAETITLNIAEEKQSLINRLFKRQQSATLSGLTHNDRALAFAIADLKALAEEFEEHLHISHDSIEMSHRLTGLLDSETAQNLCLPPLVDLTLKTDIEGSLGSDTFRLQYEWLRNGVRQIPQRTGAILATSQGLRRLPLWMMEAIEVAEKFTLGGGEASDWESLARFRQSLDPGVQMGNEFNAVRVSMTDFMQGLEVCIADRFSISTSSNGSDDFEIVPFSGRNIEELENNGKAVSEAAGELREQTLRRFQQRVRTQGALSAYRVGEGNYLVIDRSARPILDIMVQKQKSAPEERRAFIENPRPAITDAVEKYLRQSGKLDGLDEVGEEEAIEAISGPAFIETVEYSERVKGILHYRKGAVSAHMTGETVWLPEVIPDALAKIIDAMDSHALANVCEQIRNAIDASQQGVEVASYPIKATEDTLGALEKRLADLKQIEAATEITEKKDKPTVDNPHAATVILDTKDNFEEISWRPDLTERPVFIDEQLPTGVKTALRSHQLESFSLQLSSWKSGMPGILNADEQGLGKTLQTIAFLRWLKENNRVNTASNKECGPILIVAPTSLLENWNAEVVQHTDGEGLGHLLRLYGSSLSQYKNFDAKGIETKDGTHLLNFRQLHEAIEEGKGHRFWILTTYTTLTNYQHSLAKIHFSAVVFDEIQAIKNPDSLRARAARAINADYRIGLTGTPIENTTSDLWAVMDQLAPGSLDTLRNFNSLYSEPDEQNMLQLYQLVFEPRNQLPPLAFRRLKEDVAKELPSKTRFLHPRLMPEGQAIAYETARLKLSQGGPGAALKILQHIRGVSVHPAMEMSGNSQSFIDASARLNACFKILHHIKAKGERVLVFIEHRKMQFRFMELARQEFGLEKIDHINGDTPIQKRQTIVRRFQCHLEQDGGFDLLVLGPKAAGTGLTLTAATHVIHLSRWWNPAVEEQCNDRVHRIGQKYPVQIHMPMAIHAGYQEHSFDCLLQGLMSRKRNLARAALWPMGDSAGDISQLQVALKKEQSKANGDVLEISIRMMFERDAETDGAQMHDGSYRIS

SEQ ID NO: 2516 - protein, 678 aa, Yersinia pseudotuberculosis
MDILLAPGVLVRNGILHIASILKNDAAPGYVTILLVIALCIIVVRWRKLVKRRLTALGSIHAIIAKTPEDEFSQHVTNVDASIAALNMTEEQQNVAEAWKEYRETHIVDDQDGKLVVRNAVRPSQFFNLDDLHFTQGFWRIVPGLFVTIGLSLTFLGLISALNSMSTSLDDGGSAALEGLLTIASAKFIMSLTGLCCSIVFTIGLRSGTSQLEKTVHSLNSLIEKRLTFISLEDLSIRQLKATIESREHFRKLGLEMVAEIGRPLREDLPRAISESISSAITPVIEQVSRLGNDGVGEMVQSLSSRFSEDVGRALTQASERISLAGDQIKLLAERMDQSSGKMGNEMESAIGRLGLAVETLREGMSQTAETATSAFNQGAENLLATMNSTLQGIKDNTGDGARAMGEAAADMKAAALGIRTEMETAAKQGAEAAQARMSESASQASDAIGQAATNILSAFDNTAGEITKATETMTQNASSQLLSPLSTIAEKLEGVMGMLDETSTALRRASDGIKEGAIASENASGSFRSSAQSLTDAANPIRSVMERIEISTRQLRESSENSLSAIANAAKTNAEQSAMTLSAAQETLGGQQRAVESTLTNLQSLITALRGQGERLDSIDEKLGKAFDSYQEQVATSVETLFDHVKTMQSALMPALDTMQGIVHQAENFAPKQGRMS

SEQ ID NO: 2517 - protein, 287 aa, Yersinia pseudotuberculosis
MRGNANRKRSNEEEEESVFVSMTDMTVSFLFIVMVLLAFFASRYNDKNTVPRDEYEQAVQSRDKTIEDLRSEIAALKRVDPLEQYMSRAATARLNLLYQLRDNLKQSFPLLPVDVIPEEGTLRFQGEGLFISNSFALNDDKRKIVEALAKTLDSLLPCYTFNQNTGWNKSCNPSFAIIEAVQIEGHTDSKGDDVYNLNLSTNRAITTFTSMLAAAPDLVAHFNMRHQPVLSVAGYGKMRPVRPNDTQQNMAMNRRIDLRIIMHTPANAAEIEDIRQRLIEPLKKSMP

SEQ ID NO: 2518 - protein, 442 aa, Yersinia pseudotuberculosis
MKLSDIFLKPVALFKPAIAVSKGLSAKIQAIHERWPDVVREIAERDREKVLRKLLGYVESWQWDEVKMSFICSGAPIVFDKEFRTQDDFAALQEFYLRETIVTDSSSFISAMISAYIRSYEPGSAHTTKIKNCLDISSEHMSDKWKDVIDQLPEFFDANQAHQALAEKMVIMDSPWKELKQFGITHPHEPGLMSHAHLAYIALLRPKLNEKATIKKLFAWLKPDGKSNALMSGASEAINALLSHWLYKQPDEGLSRFLTETLVAFYEDPRLSRGGVWGSVDEKCRNLIINWLTRENILFFLDVVSKVEDSHMWEPRREFWLGLYNQGKITAAWVAFSSIASQKAKEMKGSMRDSSTLNFGIQTALGNRDKTSLLILQIGKCIVIEGSHSYKVHIFRNDNKRSPELYQLKYNCEQIRMLPNPVAIPHFSGWQDKVRVQIEYLS

SEQ ID NO: 2519 - protein, 1042 aa, Yersinia pseudotuberculosis
MTFTFDHNAETITLNIAEEKQSLINRLFKRQQSATLSGLTHNDRALAFAIADLKALAEEFEEHLHISHDSIEMSHRLTGLLDSETAQNLCLPPLVDLTLKTDIEGSLGSDTFRLQHEWLRNGVRQIPQRTGAILATSQGLRRLPLWMMEAIEVAEKFTPGGGEASDWESLARFRQSLDPGVQMGNELNAVRVSMTDFMQGLEVCIADRFSISTSSNGSDDFEIVPFSGRNIEELENNGKAVSEAAGELREQTLRRFQQRVRTQGTLSAYRVGEGNYLVIDRSARPILDIMVQKQKSAPEERRAFIENPRPAITDAVEKYLRQSGKLDGLDEAGEEEAIEAISGPAFIETVEYSERVKGILHYRKGAVSAHMTGETVWLPEVIPDALAKIIDAMDSHALANVCEQIRNAIDASQQEVEVAAYPIKATEDTLGALEKRLADLKQIEAATEITEKKDKPTVDNPHAATVILDTKDNFEEISWRPDLTERPVFIDEQLPTGVKTALRSHQLESFSLQLSSWKSGMPGILNADEQGLGKTLQTIAFLRWLKENNRVNTASNKECGPILIVAPTSLLENWNAEVVQHTDGEGLGHLLRLYGSSLSQYKNFDAKGVETKYGTHLLNFRQLHEAIEEGKGHRFWILTTYTTLTNYQHSLAKIHFSAVVFDEIQAIKNPDSLRARAARAINADYRIGLTGTPIENTTSDLWAVMDQLAPGSLDTLRNFNSLYSEPDEQNMLQLYQLVFEPRNQLPPLAFRRLKEDVAKELPSKTRFLHPRLMPEGQAIAYETARLKLSQGGPGAALKMLQHIRGVSVHPAMEMSGNSQSFIDASARLNACFKILHHIKAKGERVLVFIEHRKMQFRFMELARQEFGLEKIDHINGDTPIQKRQTIVRRFQCHLEQDGGFDLLVLGPKAAGTGLTLTAATHVIHLSRWWNPAVEEQCNDRVHRIGQKYPVQIHMPMAIHAGYQEHSFDCLLQGLMSRKRNLARAALWPMGDSAGDISQLQVALKKEQSKANGDVLEISIRMMFERDAETDGAQMHDGSYRIS

SEQ ID NO: 2520 - protein, 678 aa, Yersinia bercovieri; identical to SEQ ID NO: 2512

SEQ ID NO: 2521 - protein, 287 aa, Yersinia bercovieri; identical to SEQ ID NO: 2513

SEQ ID NO: 2522 - protein, 442 aa, Yersinia bercovieri; identical to SEQ ID NO: 2514

SEQ ID NO: 2523 - protein, 1042 aa, Yersinia bercovieri
MTFTFDHNAETITLNIAEEKQSLINRLFKRQQSATLSGLTHNDRALAFAIADLKALAEEFEEHLHISHDSIEMSHRLTGLLDSETAQNLCLPPLVDLTLKTDIEGSLGSDTFRLQYEWLRNGVRQIPQRTGAILATSQGLRRLPLWMMEAIEVAEKFTPGGGEASDWESLARFRQSLDPGVQMGNEFNAVRVSMTDFMQGLEVCIADRFSISTSSNGSDDFEIVPFSGRNIEELENNGKAVSEAAGELREQTLRRFQQRVRTQGALSAYRVGEGNYLVIDRSARPILDIMVQKQKSAPEERRAFIENPRPAITDAVEKYLRQSGKLDGLDEVGEEEAIEAISGPAFIETVEYSERVKGILHYRKGAVSAHMTGETVWLPEVIPDALAKIIDAMDSHALANVCEQIRNAIDASQQGVEVASYPIKATEDTLGALEKRLADLKQIEAATEITEKKDKPTVDNPHAATVILDTKDNFEEISWRPDLTERPVFIDEQLPTGVKTALRSHQLESFSLQLSSWKSGMPGILNADEQGLGKTLQTIAFLRWLKENNRVNTASNKECGPILIVAPTSLLENWNAEVVQHTDGEGLGHLLRLYGSSLSQYKNFDAKGVETKDGTHLLNFRQLHEAIEEGKGHRFWILTTYTTLTNYQHSLAKIHFSAVVFDEIQAIKNPDSLRARAARAINADYRIGLTGTPIENTTSDLWAVMDQLAPGSLDTLRNFNSLYSEPDEQNMLQLYQLVFEPRNQLPPLAFRRLKEDVAKELPSKTRFLHPRLMPEGQAIAYETARLKLSQGGPGAALKMLQHIRGVSVHPAMEMSGNSQSFIDASARLNACFKILHHIKAKGERVLVFIEHRKMQFRFMELARQEFGLEKIDHINGDTPIQKRQTIVRRFQCHLEQDGGFDLLVLGPKAAGTGLTLTAATHVIHLSRWWNPAVEEQCNDRVHRIGQKYPVQIHMPMAIHAGYQEHSFDCLLQGLMSRKRNLARAALWPMGDSAGDISQLQVALKKEQSKANGDVLEISIRMMFERDAETDGAQMHDGSYRIS

SEQ ID NO: 2524 - protein, 686 aa, Aeromonas hydrophila YL17
MWDLLKHLWPDFSQMLNGTTNGISAWFWSFTCFIFLLSLFFLIKHYLNFIERNKALRSLLDGQSRETLAYSRREILQRAQKLNANNIGHLWQEFDESLVLSSDKKQLFNSIDAEHFFNAKTLATGLTASRLLAATPSFLVAIGVLGTFVGLTIGLEGLVGNTAEIETLKSGINKLISGAAVAFMTSVWGVAFSLLLNLCEKLFERKALNDIQDLQNRIDFLYPRLPAEQSLVHIAEYSKESKEALQELHERIGDRLQESINGMSEAMQNALTDTLNNIMGPAIQTLVHSTNQQSSQVMENLVSSFMEGMSSAGRVQGEQLEKVAADVNIAVSSMGERLEQLFSKLSSQQTSSLDAQDEQSKRFQEQLQQLANSADERQGQLESRFGKMMGDLAQQHEQQQTTLLEQQQKMLGSLGTASQQQIEAMTSAVQQQQNTLQDAVGKLLDNLSQQGAQADVREQIRQDKFQQQLTDVTQQQQALLTALADSVQAGQQQSRQMAEQHQQLLTRLQQVTDSAAQSSKHMDSSANQLGLLSTNVRSAADLLGQRLEQVTQQIEQAGSQNAALTDQLKQQAEMLARLQDGLLQGAERFEQAASEARHGFVEMKQTQQQFLTGVRTEFNALGETLRSQVEAIEKQAEQWLQKYASEVSTQVHERMDQWNKVSLEYATKMYHTAEAMSSVLDELEQR

SEQ ID NO: 2525 - protein, 255 aa, Aeromonas hydrophila YL17
MQFRKAQTTNVDEENPYWMSFSDIMSALLVIFIMASVILILQLMEIQKELEHKQAKFEEEIVALKQAEQVRRTILDEAVETLRKRGIKVEVSQNHTVLSIPNELLGFETGAFDISPTYQSRAREIGEVLNMVISRDNRVEFLDTIFIEGHTDNRPLQGFMGKGNWGLSTFRAISLWQFWEKSLIGDEQLSRLKNRDGHPLFSVSGYGETRPAVSNQVTETDFKRNRRIDIRFTIRRPDSAQYEQVKERLQEELQQ

SEQ ID NO: 2526 - protein, 686 aa, Aeromonas hydrophila YL17
MKLPEAKSMATSWGLPTVNAWAELQTKASKMEGAAGHNDAFSQMLTSLRNMAISGRFEALPGLLKRRLTARALSWFWLSGDRYAERLLSPQLLSALLHAQQPRLTRITLQQLVQLYFRQFDLLDQHDGFRAMLELALLSQLEQLPEPRIATLRPNPLISLKQEGHKLLGLDGPRQLAEQTLQAGRELGVTFSELGLQGLDDGRYGDICRAHFYLETLRILSLDEWSPVMDELLKPSVSKAPFEGDRCIGHAALEILIDRTGQEPSDAWQTFILNLAGDPRISSAATNYRQWWQPLGEARIQKVRGWLSKEDLRLFLQAVEQYGIQSHNDELQRMFPARKLFLEGLFKLKLIRNTRLLLGNRAQQIVKGILGKEVKTSFAPMDGAMSDKAVIYLDCGDFYLIEGSHSFKIWVYLAPPSDILTTYEKRIFSHAALTSTIPAGYQKRYGNLPLASIVHTPHTWQHKVFTFLADNGIGLDMEQLLSRQDYQYQLRRFGIPAVNPKRTPVPTPSQPTAKSFVDTITHQSALTSLSPSPVVQVREASHQAKLYEEPQQLPANASRAVNKLSAEQLSKLNGRFKYKNKPTPATPHSDEITSANTVAEPSLSELCPRVSQLKPLELKVLQYFASNAGDRARHGANVLGMTVQEINQQLYGPLGTLCWQNSQYGWHLTSVAAAELTAYEEHHKGH

SEQ ID NO: 2527 - protein, 1019 aa, Aeromonas hydrophila YL17
MRLVEFLRSFIGDTDNAINNQLGFHSQPDSSGLNFFLPASELKSLQVGQGNTRQKVQLICLNMLAEQGVAETTANGFHIEAEDITGMDGEQAEILDLPPRFPGQFVSTIHGRTGNSGFRVAITASMPEGETPFTRKGPFLYLGSQECYWLTPAELMGLMAWEQHETLTAELRGETANLRLMAELQTAARSGMRIDLSHFERLDVVVPDNIGIIATRMPDGSLQLCPCLGEGSTPDQLQKRWAQIDMSANGGVLRIDNRVVLLDEPRLAGIRNVLANTRIPADKVNEFIATPTAFLDAALVNLEVGFSIRVAGVGRLQYMDFGGLDTNQNNWFALDSRPSPPEVLSGLIQSPEELQRFEDLLQAARAQGASTLTFGEQTIDITNVDVVEKQVTAIKQRLAGHSGLDDEPADESVTLETPVDEEKVKERVAVILKEADAIHTTLLNKTNFATLPASPDWSRYARTPFSHQQEGIEWMLKLLNVALHEDPEDLYRLQGGLLADDMGLGKTYMTLVTIGEYLHRQRSLGQAEKPILVVAPLSLLENWEDEVAKTYNSVPFRDQVVLQAGRDLGRFRIRGAERESVQLASLADESGMLDEQSIRYALAIGPEAGIHRLDMDRRLVLTTYQTLRDYQFSLCRIDWGMVIFDEAQNIKNPNALQTRAAKGLKADFKLLATGTPVENSLGDFWCLLDTAQPGLLGSWQHYRDSWIKPILNAEEQERDLIRIQIGEQLRRTVGTFMLRRVKEEQLKGLPSKTICSGVQQADSQLQRYHPELSRVMSGLQLQAYDAVLDEYRSRRASDENMQGAALAALSRLRSISLHPRLDDEAALYSQDAKQARQYMQESGKLTIVLQLLEQIRSQNEKVILFMMTKRLQRVLKLWLDQIYGLDIAIINGDTKAVASKVEDLTRKKLISQFEAQAGFNVIIMSPVAAGVGLTVVSANHVIHLERHWNPAKEAQASDRVYRIGQQKPVFIHLPTLTHPRFDAFDVHLDRLLRGKLMLKDAVVTPEAVSEREMTSAMGL

SEQ ID NO: 2528 - protein, 686 aa, Aeromonas caviae
MWDLLKHLWPDFSQMLNGTTNGISAWFWSFTCFIFLLSLFFLIKHYLNFIERNKALRSLLDGQSRETLAYSRREILQRAQKLNANNIGHLWQEFDESLVLSSDKKQLFNSIDAEHFFNAKTLATGLTASRLLAATPSFLVAIGVLGTFVGLTIGLEGLVGNTAEIETLKSGINKLISGAAVAFMTSVWGVAFSLLLNLCEKLFERKALNDIQDLQNRIDFLYPRLPAEQSLVHIAEYSKESKEALQELHERIGDRLQESINGMSEAMQNALTDTLNNIMGPAIQTLVHSTNQQSSQVMENLVSSFMEGMSSAGRVQGEQLEKVAADVNIAVSSMGERLEQLFSKLSSQQTSSLDAQDEQSKRFQEQLQQLANSADERQGQLESRFGKMMGDLAQQHEQQQTTLLEQQQKMLGSLGTASQQQIEAMTSAVQQQQNTLQDAVGKLLDNLSQQGAQADVREQIRQDKFQQQLTDVTQQQQALLTALADSVQAGQQQSRQMAEQHQQLLTRLQQVTDSAAQSSKHMDSSANQLGLLSTNVRSAADLLGQRLEQVTQQIEQAGSQNAALTDQLKQQAEMLARLQDGLLMGAERFEQAASEARHGFVEMKQTQQQFLTGVRTEFNALGETLRSQVEAIEKQAEQWLQKYASEVSTQVHERMDQWNKVSLEYATKMYHTAEAMSSVLDELEQR

SEQ ID NO: 2529 - protein, 255 aa, Aeromonas caviae; identical to SEQ ID NO: 2525

SEQ ID NO: 2530 - protein, 686 aa, Aeromonas caviae
MKLPEAKSMATSWGLPTVNAWTELQTKASRMEGTAGHNDAFSQMLTLLRNMAISGRFEALPGLLKRRLTARALSWFWLSGDQYAERLLSPQLLSALLHAQQPRLTRITLQQLVQLYFRQFDLLDQHDGFRALLEQALLSQLEQLPEPRIATLRPNPLISLKQEGHKLLGLNGPRQLAEQTLQAGRELGATFSELGLQGLDDGRYGDICRAHFYLETLRTLSLDEWSPVMDELLKPSVSKAPFEGDRCIGHAALEILIDRTGQEPSDAWQTFILNLAGDPRISSAATNYRQWWQPLGEARIQKVRGWLSKEDLRLFLQAVEQYGIQSHNDELQRMFPARKLFLEGLFKLKLIRNTRLLLGNRAQQIVKGILGKEVKTSFAPMDGAMSDKAVIYLDCGDFYLIEGSHSFKIWVYLAPPSDILTTYEKRIFSHAALTSTIPAGYQKRYGNLPLASIVHTPHTWQHKVFTFLADNGIGLDMEQLLSRQDYQYQLRRFGIPAVNPKRTPVPTPSQPTAKSFVDTITHQSALTSLSPSPVDQVREASHQAKLYEEPQQLPANASRAVNKLSAEQLSKLNGRFKYKNKPTPATPHSDEITSANTVAEPSLSELCPRVSQLKPLELKVLQYFASNAGDRARHGANVLGMTVQEINQQLYGPLGTLCWQNSQYGWHLTSVAAAELTAYEEHHKGH

SEQ ID NO: 2531 - protein, 1019 aa, Aeromonas caviae
MRLVEFLRSFIGDTDSAINNQLGFHSQPDSSGLNFFLPASELKSLQVGQGNTRQKVQLICLNMLAEQGVAETTANGFHIEAEDITGMDGEQAEILDLPPRFPGQFVSTIHGRTGNSGFRVAITASMPEGETPFTRKGPFLYLGSQECYWLTPAELMGLMAWEQHETLTAELRGETANLRLMAELQTAARSGMRIDLSHFERLDVVVPDNIGIIATRMPDGSLQLCPCLGEGSTPDQLQKRWAQIDMSANGGVLRIDNRVVLLDEPRLAGIRNVLANTRIPADKVNEFIATPTAFLDAALVNLEVGFSIRVAGVGRLQYMDFGGLDTNQNNWFALDSRPSPPEVLSGLIQSPEELQRFEDLLQAARAQGASTLTFGEQTIDITNVDVVEKQVTAIKQRLAGHSGLDDEPADESVTLETPVDEEKVKERVAVILKEADAIHTTLLNKTNFATLPASPDWSRYARTPFSHQQEGIEWMLKLLNVALHEDPEDLYRLQGGLLADDMGLGKTYMTLVTIGEYLHRQRSLGQAEKPILVVAPLSLLENWEDEVAKTYNSVPFRDQVVLQAGRDLGRFRIRGAERESVQLASLADESGMLDEQSIRYALAIGPEAGIHRLDMDRRLVLTTYQTLRDYQFSLCRIDWGMVIFDEAQNIKNPNALQTRAAKGLKADFKLLATGTPVENSLGDFWCLLDTAQPGLLGSWQHYRDSWIKPILNAEEQERDLIRIQIGEQLRRTVGTFMLRRVKEEQLKGLPSKTICSGVQQADSQLQRYHPELSRVMSGLQLQAYDAVLDEYRSRRASDENMQGAALAALSRLRSISLHPRLDDEAALYSQDAKQARQYMQESGKLTIVLQLLEQIRSQNEKVILFMMTKRLQRVLKLWLDQIYGLDIAIINGDTKAVASKVEDLTRKKLISQFEAQAGFNVIIMSPVAAGVGLTVVSANHVIHLERHWNPAKEAQASDRVYRIGQQKPVFIHLPTLTHPRFDAFDVHLDRLLRGKLMLKDAVVTPEAVSEREMTSAMGL

SEQ ID NO: 2532 - protein, 682 aa, Aeromonas allosaccharophila
MIEFAGMATHLLVTGGLLGLLVVAFFIFFLIPGVIHWFRLRKISNEIGVFEASVAPNNFKRLFDSDKLLAHLWAEFQDTLHEQREERDGQMVINAVRSTVAAEMFFNEQFVVDSRLRTEFFKHLPGIFTGLGIIGTFTGLIEGLRQFQVSENAVTVRASLESLMHAVGEAFLISATAIAAAMLVTFVEKLLLASLYRKTEAIAHGIDARFASGAGEEYLSRLVNASESSASQSKILKDALVKELGDILRELSASQLATGQQLNVQLAQHIEESSARQVAAAREDNQLLGDVIAGSIERSLKDPLDKIANSVESASGEQSSTAVQMLNDVMVSFSQRLNDLFGGQINGINELNQQTSKGMQEAVASLNALVGKLEESGRKTTDDMAAQMAASIKAMEERQASINNQTQEFVDQIRQLVQSSQAETQEKLQSTLASIGQQMTSILGTLNESQDKVFEDNRAREQSMAERTSTAVSAMTGSVEAAVKEISAASQTMAQSVSTLTAATASTVDKMSAGANRLDLAATNFAVAGDRVAAVMGQTTTVSGKLAELSGSLTTSSSALLDALRDYKVQRDSVSTLLADVRSTIELARKEASLTGDVLQRIEASTSKLSQAQKAADEYLDGVSDVLAGSSEAFRESVVSTLAKVNHDFHTKLSSAVGLLSTAVQELEVSLGSLGPLPRGAK

SEQ ID NO: 2533 - protein, 236 aa, Aeromonas allosaccharophila
MFSMHTMRRRGNRDEAEKPFWISFADLMTALMVLFLVVMGVALLAVTKSVSERERKQEQHSKNIELIMKRFEQAAARHEGIKVDKLRHVIDFGQRAQFAFGDWRLNTQQEEVLRKFVPEILNLANDDLGKSILKRIVVEGYTDKKGTYLANLNLSLLRSQRVLCTMFDTSGPSLLNDEQKEQVRGLFFVGGYSFNASKETAEESRRVEMRLEFLGVDEARLAPPAGAGNFGECALR

SEQ ID NO: 2534 - protein, 567 aa, Aeromonas allosaccharophila
MTALSRLSNLLGSLSAAEQPFPHSDDLDPVIASLRKHNKFGTGTYIPEDLQQAAVRKFWETQHFETLKDARMVSFSMCVPSRPSGPCIMEDRQRFLAVLDAKTGVDQWVDEPRWYRRCYQGLVRSYFAYDAMIAQTPSIAKQNWGDLRDYLNDRAQNITDKQGNPDWVITAVNNRLVFGEDPCAAYAENVLSGDMAKIDHLCEQLGVVKSSWFLRELVLAQVRQATQLGYEQFKGLIPRLLELLANNQVLRDRGLILMLDKYASASQPGINEPLRNASVDWWGNPWLPSNETRWGGVVPAARDMVSEWLKREFIEAFFTKLAEDGVGDRRRANFWLRYVKSMDNIQFALGPHAYDSRDRDFIALRTKMKGLYTKLYTNDRSNNAFIMTLGDLVAVEFGGMGNAFYGYDVRKALPFDASCPVETAVNARNSLKNEQRLLWMGHKDGIKGWSQWEDMFEATLKKHFNIHPNAIAKYAPSRTIASTSAPVSQPPHVASPPPAFHSRPPQIGQSFSRANLDAYARTHRLKVEDKSDMNGNLWVRTDNSIPSVSKALLDWGFRYKPGKGWWR

SEQ ID NO: 2535 - protein, 1254 aa, Aeromonas allosaccharophila
MVFGFFKKALATPDVTWRRRLTEQGVLVGQAGDGTHLSSELLPAYLAQLIDDGFASEEDSSEVLLPWASVYEALRSPGYDELAAVLELPPFTVSEVMLQSRNSLTDEDFSIAVSGWRSKQPRDEQPEVKGAMLVRDGLMELMRPEQWDLFTEIVQFARRPVELRGEQLHRQSWGRIRTLALKAGARLDDFLHRSVVLTPERLDIGLRKSALIADDSVIEIEPTFEGAPSDWLERFDSMRTVPDRYDIVTSEGIVQVLVTPQVKTVLQEVKRLPLRRVAGSRAQAFILNPYATLGPDAKDVINEEQFEEAREQAGLQYERFVPSIEKDATGYPVRVGLLIESASAAGTMTSETEWLADEDLAKFIAKLEVSLAKGFQLLGWNGYDLELQGETPNYLSELQDALKQRLKPVAMVSYIQVHDLSAYSARIEGIGVEKPYYSPYIAKKEDNEGWFPDNVLPLIAYIPEGDTEPVAVPATKDALSRLREAVGNAEVTGQDTVEVSWLPKPMLLKEAKNIVGTFDEVLEEVKTSAFDPERKGPEQKEKLSARKTLILRANIQTVDYEEQRREALLALPVEPELPLCMSAEFSLLPHQRQGLAWLQHLHKSQAEHHVRGAVLADDMGLGKTYQLLTFMGWLAENDPNVAPMLVVAPVSLLENWKEEAEKFIRPGVLPILTAYGESLATLRVPREAIESRLRTEDGLVRFLKPGWIGSAKVVLTTYETLRDLEFSFALERWSVMVCDEAQRIKNPAAMVTRAAKKQNVGFKVACTGTPVENTLADLWCLFDFVQPGLLGALNDFGQRYRKPIEARNDEERSRVEELRARISPQILRRTKAEVAKDLPQKIIDEDCRRLRLSTTQRNLYAKAIEDFKKRNDPAATVPFKNHLGLLQYLRLLCTNPQRYGLTAFKPEPLQDYRAKAPKLDWLLGQLELIRKRGEGEKAIVFCEFRNIQRLLQYYIEQTFKLRADIINGETSAAASHIASRQKRIKAFQEKPGFGVIILSPVAVGFGVNIQAANHVIHYTRTWNPAKEDQATDRAYRIGQKKDVYVYYPVVIADDFSTFDVKLDQLLTQKRELAGDILNGSGDLSPGDFVIADVIPDGDVAGLQERITLDIALQMEWRHFEGLAAALWSKQGFDFSYCTPGTNDQGVDVVAISDGQGVLIQTKTSSNYGTKLGWELIKDLAGGEAFYQRKHPNVHFKKIGMTNQFFNAQALEQAELNNVTLVDQNRLGELLEQFPVTMLEIERVLYSNWRDTADT

SEQ ID NO: 2536 - protein, 706 aa, Vibrio cholerae O1 biovar El Tor str. N16961
MTDSLNLSSLWPDLSSLNVMPPQTPEQLSALFVVILWGVALFFLIWSVAAFIRARQRVVWLNKSLDDAEKSTLSGVRNDLISRAEQKKDSVGHLWLEFDETLLEVKGADDVVRLHNTFDADYFFNSSSLAGGSTENRMIAVVPGFLTALGVIGTFVGLQLGLSDLNIAGNVDVNEMKNGVAGVINGAKIAFMTSVWGVLLSVAFNFIEKILEQIIRKKIKSLQNRIDRMFPRLSAEYQLQSIANNSQQSRESLQGLAEKIGEKMQESLIQATQGIQQGLESSLEKIMAPAINKLVDETSDGNQKALESVLQSFMEGFGQQGEQQRVAMDSASQNVNKTLESMSVSMAAFVNKLEVQQNASSEREKELISTISVQVSELVTQGNEQKRVLTEFVEKQVSELGEQLTKRELAASEREQKLASSMESTIKDLVENVSAQSQVLTDFVQNQVVQLTQTFSERDGMASQMEKERNDIFVNQTQAMKAGTDELLAQVKAATESQQITTNSIIEQGKQLQNSIDSSVSASARATESMQQSANELRVAADSMNVFGSNIKDAGNKLSGAVTEAVNSTKDLAEQNHLGAVKVQALREQLLEDTSKFSAIADQINNMLISAEQSFSTLRTTQNEFLAEQKGNLNELTSEMKRNVKELTEQMAQLLEDYAEQANGQTAEHLKVWANSSTQYAESMNTAVRAISSVVDEIQDKVSQHA

SEQ ID NO: 2537 - protein, 244 aa, Vibrio cholerae O1 biovar El Tor str. N16961
MRRGVRSHTQNSVDEENPYWVSFSDLMSALLVIFILAAVALIIELTQKTNDVEAGIEELKQAELARKNIIYDVRDELAKRNVIVEIADNDTVIRIPESTLTFASGKSSIPNDATIQQAVKDIGVVLHSAIQKKDRFQYLDTIFIEGHTDSDSIHYRGKGNWGLSTDRAISVWNVWQNELSLTPKLGDLENAYHAKLFSVSGYAATRRANLHEANQQEKSQNRRIDIRFTVKKPSIAELERIVGP

SEQ ID NO: 2538 - protein, 483 aa, Vibrio cholerae O1 biovar El Tor str. N16961
MSLNIKKLKVSLPANPFGQAIKDFAHLSSQLEVLSKSAGIENNKFRTAYGEVCNALASKKRVEDVIDSSVHVRALALSLHTDAKKNVSFTRRLLNKITEIVKKPSSLVIESFYQHFLSEYDRLADLEATADWLLEAKRLRGNDEQFDENILSTNGPKWLAERAIQNNVDFDHLIAEMKLERYANGRYLTAAKGIYYIEQLNTIPLGQDHPLLEEVQKTVVFDSRYDSESLLGHQILRILIGRSIGSHISEPWMNVILAIGGDPRVPSSNPRYIKWWKSLEPNLVQAVLGWLSKLDLKLFLEALEDYSYSSANYELQRMYPSRKSFLEGMFDAGVISNTRLYLSLDAARYLKRNYDPKHLPNFSTVKDGDKSIIYVQMNGAHMVEGSHSCYLWLYRYLDPSVCVFNYNIDSPTYSQLTIGINNQMSRLSSGAVAKITHSPSGYAWQRKALIALRELGVKLTPKDVLSNEDYIDFKQRYGVREWS

SEQ ID NO: 2539 - protein, 940 aa, Vibrio cholerae O1 biovar El Tor str. N16961
MNSQGELILTPNMGQSASHESIQKVLGQLQSDNAVTLKVGDEIVLFSEEKLMAVKEVISNRVIPQQQVKAFLENPTAYIDASLVDLDLGFSIRVHGATVFKHAYFGETDESGIDWFGASPTSDLINPISKLTDRVRDKTTLEDVAKKIEDARQTGATVFDYEGQSYDISDPAAVEKVLNEIGHKISSPNTDLSSYGEAEDAETESEGSEIHVVDIDLNDEELSENSPKVEQLISDISWDGELNWENHKRTPFPHQDIGVRWILGVEQKSLSDSKVSGALLADDMGLGKTFMALSAIEHIYQRQQISGETKKPALIVAPLSLLENWKDEVDKTFKHSPFKDVVILQSSAELNEYRMGGVEIRGQSASDDCLEPKYSLKVGKYFGPSRLDLPERLVITTYQTLRDYQFSMCLIDWGIVVFDEAQNIKNPNALQTRAAKGLKADFKLVATGTPVENSLADFWCLMDTACPGHLGSYQEFRARYISPILKAAGDEVEEIRARLGRELRIAVGALMLRRIKEDNLKGLPLKHMYAGGEFENWKYLEELKSTMVGYQRDVYEGAISHQLENEESHALTTLMRLRDSSLHPRLSDGGRLDIPKNAKSARALYGESGKLVSLLETLDRVRSKQEKCIIFAVNKRLQSFLSVTLGQIYNLGPLSVINGDAKAVAKRKSVPTRKSMISDFEAKEGFNLIVMSPVAAGVGLTVVGANHVVHLERYWNPAKEAQATDRVYRIGQEKEVHIYIPLLHHPEFESFDVNLHRLLTQKTLLKDAVVTPEDVIPQPAGVGGVVSGDLIDKRITAAELDKLSWQQFEALCVELLAKITDSESAWLTNNGADHGADGVLLNNSGNILLQAKFTQRQYDGYKGIQEIHSAKPIYESAMRSSFGRLIFVTNSPLLAKRTHEIAATCGIEVLGRTQLLTYLEEYDITLKDILSRLGKDRLRV

SEQ ID NO: 2540 - protein, 706 aa, Vibrio cholerae O395; identical to SEQ ID NO: 2536

SEQ ID NO: 2541 - protein, 244 aa, Vibrio cholerae O395; identical to SEQ ID NO: 2537

SEQ ID NO: 2542 - protein, 483 aa, Vibrio cholerae O395
MSLNIKKLKVSLPANPFGQAIKDFAHLSSQLEVLSKSAGIENNKFRTAYGEVCNALASKKRVEDVIDSSVHVRALALSLHTDAKKNVSFTRRLLNKITEIVKKPSSLVIESFYQHFLSEYDRLADLEATADWLLEAKRLRGNDEQFDENILSTNGLKWLAERAIQNNVDFDHLIAEMKLERYANGRYLTAAKGIYYIEQLNTIPLGQDHPLLEEVQKTVVFDSRYDSESLLGHQILRILIGRSIGSHISEPWMNVILAIGGDPRVPSSNPRYIKWWKSLEPNLVQAVLGWLSKLDLKLFLEALEDYSYSSANYELQRMYPSRKSFLEGMFDAGVISNTRLYLSLDAARYLKRNYDPKHLPNFSTVKDGDKSIIYVQMNGAHMVEGSHSCYLWLYRYLDPSVCVFNYNIDSPTYSQLTIGINNQMSRLSSGAVAKITHSPSGYAWQRKALIALRELGVKLTPKDVLSNEDYIDFKQRYGVREWS

SEQ ID NO: 2543 - protein, 1146 aa, Vibrio cholerae O395
MELTSLISKFFSSSDKTSQFELICDDSLDFATSRKTLEKIKADEWITAQYVALKMLEEQGDVSSFPDGFIMPADTAVRLDSELRDLFSLPPVWKGVIDADIQGKASTPTFKIDLSVTTKQGRTTLNYTVDGPFIRFSQNEQYLLTPEQLMVFIAHKTHVRSDRSEYDNLLYLHSLQEAQKNGCKLNLKHFERLRILTPNKITVEAELNSQGELILTPNMGQSASHESIQKVLGQLQSDNAVTLKVGDEIVLFSEEKLMAVKEVISNRVIPQQQVKAFLENPTAYIDASLVDLDLGFSIRVHGATVFKHAYFGETDESGIDWFGASPTSDLINPISKLTDRVRDKTTLEDVAKKIEDARQTGATVFDYEGQSYDISDPAAVEKVLNEIGHKISSPNTDLSSYGEAEDAETESEGSEIHVVDIDLNDEELSENSPKVEQLISDISWDGELNWENHKRTPFPHQDIGVRWILGVEQKSLSDSKVSGALLADDMGLGKTFMALSAIEHIYQRQQISGETKKPALIVAPLSLLENWKDEVDKTFKHSPFKDVVILQSSAELNEYRMGGVEIRGQSASDDCLEPKYSLKVGKYFGPSRLDLPERLVITTYQTLRDYQFSMCLIDWGIVVFDEAQNIKNPNALQTRAAKGLKADFKLVATGTPVENSLADFWCLMDTACPGHLGSYQEFRARYISPILKAAGDEVEEIRARLGRELRIAVGALMLRRIKEDNLKGLPLKHMYAGGEFENWKYLEELKSTMVGYQRDVYEGAISHQLENEESHALTTLMRLRDSSLHPRLSDGGRLDIPKNAKSARALYGESGKLVSLLETLDRVRSKQEKCIIFAVNKRLQSFLSVTLGQIYNLGPLSVINGDAKAVAKRKSVPTRKSMISDFEAKEGFNLIVMSPVAAGVGLTVVGANHVVHLERYWNPAKEAQATDRVYRIGQEKEVHIYIPLLHHPEFESFDVNLHRLLTQKTLLKDAVVTPEDVIPQPAGVGGVVSGDLIDKRITAAELDKLSWQQFEALCVELLAKITDSESAWLTNNGADHGADGVLLNNSGNILLQAKFTQRQYDGYKGIQEIHSAKPIYESAMRSSFGRLIFVTNSPLLAKRTHEIAATCGIEVLGRTQLLTYLEEYDITLKDILSRLGKDRLRV

SEQ ID NO: 2544 - protein, 706 aa, Vibrio cholerae M66-2; identical to SEQ ID NO: 2536

SEQ ID NO: 2545 - protein, 244 aa, Vibrio cholerae M66-2; identical to SEQ ID NO: 2537

SEQ ID NO: 2546 - protein, 483 aa, Vibrio cholerae M66-2; identical to SEQ ID NO: 2538

SEQ ID NO: 2547 - protein, 1149 aa, Vibrio cholerae M66-2
MELTSLISKFFSSSDKTSQFELICDDSLDFATSRKTLEKIKAGKADEWITAQYVALKMLEEQGDVSSFPDGFIMPADTAVRLDSELRDLFSLPPVWKGVIDADIQGKASTPTFKIDLSVTTKQGRTTLNYTVDGPFIRFSQNEQYLLTPEQLMVFIAHKTHVRSDRSEYDNLLYLHSLQEAQKNGCKLNLKHFERLRILTPNKITVEAELNSQGELILTPNMGQSASHESIQKVLGQLQSDNAVTLKVGDEIVLFSEEKLMAVKEVISNRVIPQQQVKAFLENPTAYIDASLVDLDLGFSIRVHGATVFKHAYFGETDESGIDWFGASPTSDLINPISKLTDRVRDKTTLEDVAKKIEDARQTGATVFDYEGQSYDISDPAAVEKVLNEIGHKISSPNTDLSSYGEAEDAETESEGSEIHVVDIDLNDEELSENSPKVEQLISDISWDGELNWENHKRTPFPHQDIGVRWILGVEQKSLSDSKVSGALLADDMGLGKTFMALSAIEHIYQRQQISGETKKPALIVAPLSLLENWKDEVDKTFKHSPFKDVVILQSSAELNEYRMGGVEIRGQSASDDCLEPKYSLKVGKYFGPSRLDLPERLVITTYQTLRDYQFSMCLIDWGIVVFDEAQNIKNPNALQTRAAKGLKADFKLVATGTPVENSLADFWCLMDTACPGHLGSYQEFRARYISPILKAAGDEVEEIRARLGRELRIAVGALMLRRIKEDNLKGLPLKHMYAGGEFENWKYLEELKSTMVGYQRDVYEGAISHQLENEESHALTTLMRLRDSSLHPRLSDGGRLDIPKNAKSARALYGESGKLVSLLETLDRVRSKQEKCIIFAVNKRLQSFLSVTLGQIYNLGPLSVINGDAKAVAKRKSVPTRKSMISDFEAKEGFNLIVMSPVAAGVGLTVVGANHVVHLERYWNPAKEAQATDRVYRIGQEKEVHIYIPLLHHPEFESFDVNLHRLLTQKTLLKDAVVTPEDVIPQPAGVGGVVSGDLIDKRITAAELDKLSWQQFEALCVELLAKITDSESAWLTNNGADHGADGVLLNNSGNILLQAKFTQRQYDGYKGIQEIHSAKPIYESAMRSSFGRLIFVTNSPLLAKRTHEIAATCGIEVLGRTQLLTYLEEYDITLKDILSRLGKDRLRV

SEQ ID NO: 2548 - protein, 706 aa, Vibrio cholerae O395; identical to SEQ ID NO: 2536

SEQ ID NO: 2549 - protein, 244 aa, Vibrio cholerae O395; identical to SEQ ID NO: 2537

SEQ ID NO: 2550 - protein, 483 aa, Vibrio cholerae O395; identical to SEQ ID NO: 2542

SEQ ID NO: 2551 - protein, 1146 aa, Vibrio cholerae O395; identical to SEQ ID NO: 2543

SEQ ID NO: 2552 - protein, 706 aa, Vibrio cholerae MJ-1236; identical to SEQ ID NO: 2536

SEQ ID NO: 2553 - protein, 244 aa, Vibrio cholerae MJ-1236; identical to SEQ ID NO: 2537

SEQ ID NO: 2554 - protein, 483 aa, Vibrio cholerae MJ-1236; identical to SEQ ID NO: 2538

SEQ ID NO: 2555 - protein, 706 aa, Vibrio cholerae MAK 757; identical to SEQ ID NO: 2536

SEQ ID NO: 2556 - protein, 244 aa, Vibrio cholerae MAK 757; identical to SEQ ID NO: 2537

SEQ ID NO: 2557 - protein, 483 aa, Vibrio cholerae MAK 757; identical to SEQ ID NO: 2538

SEQ ID NO: 2558 - protein, 1149 aa, Vibrio cholerae MAK 757; identical to SEQ ID NO: 2547

SEQ ID NO: 2559 - protein, 244 aa, Vibrio cholerae NCTC 8457; identical to SEQ ID NO: 2537

SEQ ID NO: 2560 - protein, 483 aa, Vibrio cholerae NCTC 8457; identical to SEQ ID NO: 2538

SEQ ID NO: 2561 - protein, 1149 aa, Vibrio cholerae NCTC 8457; identical to SEQ ID NO: 2547

SEQ ID NO: 2562 - protein, 706 aa, Vibrio cholerae B33; identical to SEQ ID NO: 2536

SEQ ID NO: 2563 - protein, 244 aa, Vibrio cholerae B33; identical to SEQ ID NO: 2537

SEQ ID NO: 2564 - protein, 483 aa, Vibrio cholerae B33; identical to SEQ ID NO: 2538

SEQ ID NO: 2565 - protein, 1149 aa, Vibrio cholerae B33; identical to SEQ ID NO: 2547

SEQ ID NO: 2566 - protein, 706 aa, Vibrio cholerae O1 str. 2010EL-1786
MTDSLNLSSLWPDLSSLNVMPPQTPDQLSALFVVILWGVALFFLIWSVAAFIRARQRVVWLNKSLDDAEKSTLSGVRNDLISRAEQKKDSVGHLWLEFDETLLEVKGADDVVRLHNTFDADYFFNSSSLAGGSTENRMIAVVPGFLTALGVIGTFVGLQLGLSDLNIAGNVDVNEMKNGVAGVINGAKIAFMTSVWGVLLSVAFNFIEKILEQIIRKKIKSLQNRIDRMFPRLSAEYQLQSIANNSQQSRESLQGLAEKIGEKMQESLIQATQGIQQGLESSLEKIMAPAINKLVDETSDGNQKALESVLQSFMEGFGQQGEQQRVAMDSASQNVNKTLESMSVSMAAFVNKLEVQQNASSEREKELISTISVQVSELVTQGNEQKRVLTEFVEKQVSELGEQLTKRELAASEREQKLASSMESTIKDLVENVSAQSQVLTDFVQNQVVQLTQTFSERDGMASQMEKERNDIFVNQTQAMKAGTDELLAQVKAATESQQITTNSIIEQGKQLQNSIDSSVSASARATESMQQSANELRVAADSMNVFGSNIKDAGNKLSGAVTEAVNSTKDLAEQNHLGAVKVQALREQLLEDTSKFSAIADQINNMLISAEQSFSTLRTTQNEFLAEQKGNLNELTSEMKRNVKELTEQMAQLLEDYAEQANGQTAEHLKVWANSSTQYAESMNTAVRAISSVVDEIQDKVSQHA

SEQ ID NO: 2567 - protein, 244 aa, Vibrio cholerae O1 str. 2010EL-1786; identical to SEQ ID NO: 2537

SEQ ID NO: 2568 - protein, 483 aa, Vibrio cholerae O1 str. 2010EL-1786; identical to SEQ ID NO: 2538

SEQ ID NO: 2569 - protein, 1149 aa, Vibrio cholerae O1 str. 2010EL-1786; identical to SEQ ID NO: 2547

SEQ ID NO: 2570 - protein, 706 aa, Vibrio cholerae V52; identical to SEQ ID NO: 2536

SEQ ID NO: 2571 - protein, 244 aa, Vibrio cholerae V52; identical to SEQ ID NO: 2537

SEQ ID NO: 2572 - protein, 483 aa, Vibrio cholerae V52; identical to SEQ ID NO: 2538

SEQ ID NO: 2573 - protein, 1149 aa, Vibrio cholerae V52; identical to SEQ ID NO: 2547

SEQ ID NO: 2574 - protein, 706 aa, Vibrio cholerae 2740-80; identical to SEQ ID NO: 2536

SEQ ID NO: 2575 - protein, 244 aa, Vibrio cholerae 2740-80; identical to SEQ ID NO: 2537

SEQ ID NO: 2576 - protein, 483 aa, Vibrio cholerae 2740-80; identical to SEQ ID NO: 2538

SEQ ID NO: 2577 - protein, 1149 aa, Vibrio cholerae 2740-80; identical to SEQ ID NO: 2547

SEQ ID NO: 2578 - protein, 706 aa, Vibrio cholerae RC9; identical to SEQ ID NO: 2536

SEQ ID NO: 2579 - protein, 244 aa, Vibrio cholerae RC9; identical to SEQ ID NO: 2537

SEQ ID NO: 2580 - protein, 483 aa, Vibrio cholerae RC9; identical to SEQ ID NO: 2538

SEQ ID NO: 2581 - protein, 932 aa, Vibrio cholerae RC9
MTPNMGQSASHESIQKVLGQLQSDNAVTLKVGDEIVLFSEEKLMAVKEVISNRVIPQQQVKAFLENPTAYIDASLVDLDLGFSIRVHGATVFKHAYFGETDESGIDWFGASPTSDLINPISKLTDRVRDKTTLEDVAKKIEDARQTGATVFDYEGQSYDISDPAAVEKVLNEIGHKISSPNTDLSSYGEAEDAETESEGSEIHVVDIDLNDEELSENSPKVEQLISDISWDGELNWENHKRTPFPHQDIGVRWILGVEQKSLSDSKVSGALLADDMGLGKTFMALSAIEHIYQRQQISGETKKPALIVAPLSLLENWKDEVDKTFKHSPFKDVVILQSSAELNEYRMGGVEIRGQSASDDCLEPKYSLKVGKYFGPSRLDLPERLVITTYQTLRDYQFSMCLIDWGIVVFDEAQNIKNPNALQTRAAKGLKADFKLVATGTPVENSLADFWCLMDTACPGHLGSYQEFRARYISPILKAAGDEVEEIRARLGRELRIAVGALMLRRIKEDNLKGLPLKHMYAGGEFENWKYLEELKSTMVGYQRDVYEGAISHQLENEESHALTTLMRLRDSSLHPRLSDGGRLDIPKNAKSARALYGESGKLVSLLETLDRVRSKQEKCIIFAVNKRLQSFLSVTLGQIYNLGPLSVINGDAKAVAKRKSVPTRKSMISDFEAKEGFNLIVMSPVAAGVGLTVVGANHVVHLERYWNPAKEAQATDRVYRIGQEKEVHIYIPLLHHPEFESFDVNLHRLLTQKTLLKDAVVTPEDVIPQPAGVGGVVSGDLIDKRITAAELDKLSWQQFEALCVELLAKITDSESAWLTNNGADHGADGVLLNNSGNILLQAKFTQRQYDGYKGIQEIHSAKPIYESAMRSSFGRLIFVTNSPLLAKRTHEIAATCGIEVLGRTQLLTYLEEYDITLKDILSRLGKDRLRV

SEQ ID NO: 2582 - protein, 706 aa, Vibrio cholerae B33; identical to SEQ ID NO: 2536

SEQ ID NO: 2583 - protein, 244 aa, Vibrio cholerae B33; identical to SEQ ID NO: 2537

SEQ ID NO: 2584 - protein, 483 aa, Vibrio cholerae B33; identical to SEQ ID NO: 2538

SEQ ID NO: 2585 - protein, 932 aa, Vibrio cholerae B33; identical to SEQ ID NO: 2581

SEQ ID NO: 2586 - protein, 706 aa, Vibrio cholerae BX 330286; identical to SEQ ID NO: 2536

SEQ ID NO: 2587 - protein, 244 aa, Vibrio cholerae BX 330286; identical to SEQ ID NO: 2537

SEQ ID NO: 2588 - protein, 483 aa, Vibrio cholerae BX 330286; identical to SEQ ID NO: 2538

SEQ ID NO: 2589 - protein, 932 aa, Vibrio cholerae BX 330286; identical to SEQ ID NO: 2581

SEQ ID NO: 2590 - protein, 706 aa, Vibrio cholerae CIRS101; identical to SEQ ID NO: 2566

SEQ ID NO: 2591 - protein, 244 aa, Vibrio cholerae CIRS101; identical to SEQ ID NO: 2537

SEQ ID NO: 2592 - protein, 483 aa, Vibrio cholerae CIRS101; identical to SEQ ID NO: 2538

SEQ ID NO: 2593 - protein, 1149 aa, Vibrio cholerae CIRS101; identical to SEQ ID NO: 2547

SEQ ID NO: 2594 - protein, 706 aa, Vibrio cholerae RC27; identical to SEQ ID NO: 2536

SEQ ID NO: 2595 - protein, 244 aa, Vibrio cholerae RC27; identical to SEQ ID NO: 2537

SEQ ID NO: 2596 - protein, 483 aa, Vibrio cholerae RC27; identical to SEQ ID NO: 2542

SEQ ID NO: 2597 - protein, 1149 aa, Vibrio cholerae RC27; identical to SEQ ID NO: 2547

SEQ ID NO: 2598 - protein, 687 aa, Vibrio cholerae INDRE 91/1
MPPQTPEQLSALFVVILWGVALFFLIWSVAAFIRARQRVVWLNKSLDDAEKSTLSGVRNDLISRAEQKKDSVGHLWLEFDETLLEVKGADDVVRLHNTFDADYFFNSSSLAGGSTENRMIAVVPGFLTALGVIGTFVGLQLGLSDLNIAGNVDVNEMKNGVAGVINGAKIAFMTSVWGVLLSVAFNFIEKILEQIIRKKIKSLQNRIDRMFPRLSAEYQLQSIANNSQQSRESLQGLAEKIGEKMQESLIQATQGIQQGLESSLEKIMAPAINKLVDETSDGNQKALESVLQSFMEGFGQQGEQQRVAMDSASQNVNKTLESMSVSMAAFVNKLEVQQNASSEREKELISTISVQVSELVTQGNEQKRVLTEFVEKQVSELGEQLTKRELAASEREQKLASSMESTIKDLVENVSAQSQVLTDFVQNQVVQLTQTFSERDGMASQMEKERNDIFVNQTQAMKAGTDELLAQVKAATESQQITTNSIIEQGKQLQNSIDSSVSASARATESMQQSANELRVAADSMNVFGSNIKDAGNKLSGAVTEAVNSTKDLAEQNHLGAVKVQALREQLLEDTSKFSAIADQINNMLISAEQSFSTLRTTQNEFLAEQKGNLNELTSEMKRNVKELTEQMAQLLEDYAEQANGQTAEHLKVWANSSTQYAESMNTAVRAISSVVDEIQDKVSQHA

SEQ ID NO: 2599 - protein, 244 aa, Vibrio cholerae INDRE 91/1; identical to SEQ ID NO: 2537

SEQ ID NO: 2600 - protein, 483 aa, Vibrio cholerae INDRE 91/1; identical to SEQ ID NO: 2538

SEQ ID NO: 2601 - protein, 1149 aa, Vibrio cholerae INDRE 91/1; identical to SEQ ID NO: 2547

SEQ ID NO: 2602 - protein, 687 aa, Vibrio cholerae HC-49A2
MPPQTPDQLSALFVVILWGVALFFLIWSVAAFIRARQRVVWLNKSLDDAEKSTLSGVRNDLISRAEQKKDSVGHLWLEFDETLLEVKGADDVVRLHNTFDADYFFNSSSLAGGSTENRMIAVVPGFLTALGVIGTFVGLQLGLSDLNIAGNVDVNEMKNGVAGVINGAKIAFMTSVWGVLLSVAFNFIEKILEQIIRKKIKSLQNRIDRMFPRLSAEYQLQSIANNSQQSRESLQGLAEKIGEKMQESLIQATQGIQQGLESSLEKIMAPAINKLVDETSDGNQKALESVLQSFMEGFGQQGEQQRVAMDSASQNVNKTLESMSVSMAAFVNKLEVQQNASSEREKELISTISVQVSELVTQGNEQKRVLTEFVEKQVSELGEQLTKRELAASEREQKLASSMESTIKDLVENVSAQSQVLTDFVQNQVVQLTQTFSERDGMASQMEKERNDIFVNQTQAMKAGTDELLAQVKAATESQQITTNSIIEQGKQLQNSIDSSVSASARATESMQQSANELRVAADSMNVFGSNIKDAGNKLSGAVTEAVNSTKDLAEQNHLGAVKVQALREQLLEDTSKFSAIADQINNMLISAEQSFSTLRTTQNEFLAEQKGNLNELTSEMKRNVKELTEQMAQLLEDYAEQANGQTAEHLKVWANSSTQYAESMNTAVRAISSVVDEIQDKVSQHA

SEQ ID NO: 2603 - protein, 244 aa, Vibrio cholerae HC-49A2; identical to SEQ ID NO: 2537

SEQ ID NO: 2604 - protein, 483 aa, Vibrio cholerae HC-49A2; identical to SEQ ID NO: 2538

SEQ ID NO: 2605 - protein, 1149 aa, Vibrio cholerae HC-49A2; identical to SEQ ID NO: 2547

SEQ ID NO: 2606 - protein, 706 aa, Vibrio cholerae HCUF01; identical to SEQ ID NO: 2566

SEQ ID NO: 2607 - protein, 244 aa, Vibrio cholerae HCUF01; identical to SEQ ID NO: 2537

SEQ ID NO: 2608 - protein, 483 aa, Vibrio cholerae HCUF01; identical to SEQ ID NO: 2538

SEQ ID NO: 2609 - protein, 1149 aa, Vibrio cholerae HCUF01; identical to SEQ ID NO: 2547

SEQ ID NO: 2610 - protein, 706 aa, Vibrio cholerae HC-40A1; identical to SEQ ID NO: 2566

SEQ ID NO: 2611 - protein, 244 aa, Vibrio cholerae HC-40A1; identical to SEQ ID NO: 2537

SEQ ID NO: 2612 - protein, 483 aa, Vibrio cholerae HC-40A1; identical to SEQ ID NO: 2538

SEQ ID NO: 2613 - protein, 1149 aa, Vibrio cholerae HC-40A1; identical to SEQ ID NO: 2547

SEQ ID NO: 2614 - protein, 706 aa, Vibrio cholerae HC-48A1; identical to SEQ ID NO: 2566

SEQ ID NO: 2615 - protein, 244 aa, Vibrio cholerae HC-48A1; identical to SEQ ID NO: 2537

SEQ ID NO: 2616 - protein, 483 aa, Vibrio cholerae HC-48A1; identical to SEQ ID NO: 2538

SEQ ID NO: 2617 - protein, 1149 aa, Vibrio cholerae HC-48A1; identical to SEQ ID NO: 2547

SEQ ID NO: 2618 - protein, 706 aa, Vibrio cholerae HC-70A1; identical to SEQ ID NO: 2566

SEQ ID NO: 2619 - protein, 244 aa, Vibrio cholerae HC-70A1; identical to SEQ ID NO: 2537

SEQ ID NO: 2620 - protein, 483 aa, Vibrio cholerae HC-70A1; identical to SEQ ID NO: 2538

SEQ ID NO: 2621 - protein, 1149 aa, Vibrio cholerae HC-70A1; identical to SEQ ID NO: 2547

SEQ ID NO: 2622 - protein, 687 aa, Vibrio cholerae HFU-02; identical to SEQ ID NO: 2602

SEQ ID NO: 2623 - protein, 244 aa, Vibrio cholerae HFU-02; identical to SEQ ID NO: 2537

SEQ ID NO: 2624 - protein, 483 aa, Vibrio cholerae HFU-02; identical to SEQ ID NO: 2538

SEQ ID NO: 2625 - protein, 1149 aa, Vibrio cholerae HFU-02; identical to SEQ ID NO: 2547

SEQ ID NO: 2626 - protein, 706 aa, Vibrio cholerae HC-38A1; identical to SEQ ID NO: 2566

SEQ ID NO: 2627 - protein, 244 aa, Vibrio cholerae HC-38A1; identical to SEQ ID NO: 2537

SEQ ID NO: 2628 - protein, 483 aa, Vibrio cholerae HC-38A1; identical to SEQ ID NO: 2538

SEQ ID NO: 2629 - protein, 1149 aa, Vibrio cholerae HC-38A1; identical to SEQ ID NO: 2547

SEQ ID NO: 2630 - protein, 706 aa, Vibrio cholerae HC-06A1; identical to SEQ ID NO: 2566

SEQ ID NO: 2631 - protein, 244 aa, Vibrio cholerae HC-06A1; identical to SEQ ID NO: 2537

SEQ ID NO: 2632 - protein, 483 aa, Vibrio cholerae HC-06A1; identical to SEQ ID NO: 2538

SEQ ID NO: 2633 - protein, 1149 aa, Vibrio cholerae HC-06A1; identical to SEQ ID NO: 2547

SEQ ID NO: 2634 - protein, 706 aa, Vibrio cholerae HC-23A1; identical to SEQ ID NO: 2566

SEQ ID NO: 2635 - protein, 244 aa, Vibrio cholerae HC-23A1; identical to SEQ ID NO: 2537

SEQ ID NO: 2636 - protein, 483 aa, Vibrio cholerae HC-23A1; identical to SEQ ID NO: 2538

SEQ ID NO: 2637 - protein, 1149 aa, Vibrio cholerae HC-23A1; identical to SEQ ID NO: 2547

SEQ ID NO: 2638 - protein, 706 aa, Vibrio cholerae HC-28A1; identical to SEQ ID NO: 2566

SEQ ID NO: 2639 - protein, 244 aa, Vibrio cholerae HC-28A1; identical to SEQ ID NO: 2537

SEQ ID NO: 2640 - protein, 483 aa, Vibrio cholerae HC-28A1; identical to SEQ ID NO: 2538

SEQ ID NO: 2641 - protein, 1149 aa, Vibrio cholerae HC-28A1; identical to SEQ ID NO: 2547

SEQ ID NO: 2642 - protein, 706 aa, Vibrio cholerae HC-43A1; identical to SEQ ID NO: 2566

SEQ ID NO: 2643 - protein, 244 aa, Vibrio cholerae HC-43A1; identical to SEQ ID NO: 2537

SEQ ID NO: 2644 - protein, 483 aa, Vibrio cholerae HC-43A1; identical to SEQ ID NO: 2538

SEQ ID NO: 2645 - protein, 1149 aa, Vibrio cholerae HC-43A1; identical to SEQ ID NO: 2547

SEQ ID NO: 2646 - protein, 706 aa, Vibrio cholerae HC-61A1; identical to SEQ ID NO: 2566

SEQ ID NO: 2647 - protein, 218 aa, Vibrio cholerae HC-61A1
MSALLVIFILAAVALIIELTQKTNDVEAGIEELKQAELARKNIIYDVRDELAKRNVIVEIADNDTVIRIPESTLTFASGKSSIPNDATIQQAVKDIGVVLHSAIQKKDRFQYLDTIFIEGHTDSDSIHYRGKGNWGLSTDRAISVWNVWQNELSLTPKLGDLENAYHAKLFSVSGYAATRRANLHEANQQEKSQNRRIDIRFTVKKPSIAELERIVGP

SEQ ID NO: 2648 - protein, 483 aa, Vibrio cholerae HC-61A1; identical to SEQ ID NO: 2538

SEQ ID NO: 2649 - protein, 1149 aa, Vibrio cholerae HC-61A1; identical to SEQ ID NO: 2547

SEQ ID NO: 2650 - protein, 706 aa, Vibrio cholerae HC-48B2; identical to SEQ ID NO: 2566

SEQ ID NO: 2651 - protein, 244 aa, Vibrio cholerae HC-48B2; identical to SEQ ID NO: 2537

SEQ ID NO: 2652 - protein, 214 aa, Vibrio cholerae HC-48B2
MSLNIKKLKVSLPANPFGQAIKDFAHLSSQLEVLSKSAGIENNKFRTAYGEVCNALASKKRVEDVIDSSVHVRALALSLHTDAKKNVSFTRRLLNKITEIVKKPSSLVIESFYQHFLSEYDRLADLEATADWLLEAKRLRGNDEQFDENILSTNGPKWLAERAIQNNVDFDHLIAEMKLERYANGRYLTAAKGIYYIEQLNTIPLGQDHPLLEE

SEQ ID NO: 2653 - protein, 1149 aa, Vibrio cholerae HC-48B2; identical to SEQ ID NO: 2547

SEQ ID NO: 2654 - protein, 706 aa, Vibrio cholerae HC-33A2; identical to SEQ ID NO: 2566

SEQ ID NO: 2655 - protein, 244 aa, Vibrio cholerae HC-33A2; identical to SEQ ID NO: 2537

SEQ ID NO: 2656 - protein, 472 aa, Vibrio cholerae HC-33A2
MPANPFGQAIKDFAHLSSQLEVLSKSAGIENNKFRTAYGEVCNALASKKRVEDVIDSSVHVRALALSLHTDAKKNVSFTRRLLNKITEIVKKPSSLVIESFYQHFLSEYDRLADLEATADWLLEAKRLRGNDEQFDENILSTNGPKWLAERAIQNNVDFDHLIAEMKLERYANGRYLTAAKGIYYIEQLNTIPLGQDHPLLEEVQKTVVFDSRYDSESLLGHQILRILIGRSIGSHISEPWMNVILAIGGDPRVPSSNPRYIKWWKSLEPNLVQAVLGWLSKLDLKLFLEALEDYSYSSANYELQRMYPSRKSFLEGMFDAGVISNTRLYLSLDAARYLKRNYDPKHLPNFSTVKDGDKSIIYVQMNGAHMVEGSHSCYLWLYRYLDPSVCVFNYNIDSPTYSQLTIGINNQMSRLSSGAVAKITHSPSGYAWQRKALIALRELGVKLTPKDVLSNEDYIDFKQRYGVREWS

SEQ ID NO: 2657 - protein, 1149 aa, Vibrio cholerae HC-33A2; identical to SEQ ID NO: 2547

SEQ ID NO: 2658 - protein, 706 aa, Vibrio cholerae HC-32A1; identical to SEQ ID NO: 2566

SEQ ID NO: 2659 - protein, 244 aa, Vibrio cholerae HC-32A1; identical to SEQ ID NO: 2537

SEQ ID NO: 2660 - protein, 483 aa, Vibrio cholerae HC-32A1; identical to SEQ ID NO: 2538

SEQ ID NO: 2661 - protein, 1149 aa, Vibrio cholerae HC-32A1; identical to SEQ ID NO: 2547

SEQ ID NO: 2662 - protein, 706 aa, Vibrio cholerae HC-22A1; identical to SEQ ID NO: 2566

SEQ ID NO: 2663 - protein, 244 aa, Vibrio cholerae HC-22A1; identical to SEQ ID NO: 2537

SEQ ID NO: 2664 - protein, 483 aa, Vibrio cholerae HC-22A1; identical to SEQ ID NO: 2538

SEQ ID NO: 2665 - protein, 1149 aa, Vibrio cholerae HC-22A1; identical to SEQ ID NO: 2547

SEQ ID NO: 2666 - protein, 706 aa, Vibrio cholerae HC-21A1; identical to SEQ ID NO: 2566

SEQ ID NO: 2667 - protein, 244 aa, Vibrio cholerae HC-21A1; identical to SEQ ID NO: 2537

SEQ ID NO: 2668 - protein, 483 aa, Vibrio cholerae HC-21A1; identical to SEQ ID NO: 2538

SEQ ID NO: 2669 - protein, 1149 aa, Vibrio cholerae HC-21A1; identical to SEQ ID NO: 2547

SEQ ID NO: 2670 - protein, 706 aa, Vibrio cholerae HC-19A1; identical to SEQ ID NO: 2566

SEQ ID NO: 2671 - protein, 244 aa, Vibrio cholerae HC-19A1; identical to SEQ ID NO: 2537

SEQ ID NO: 2672 - protein, 483 aa, Vibrio cholerae HC-19A1; identical to SEQ ID NO: 2538

SEQ ID NO: 2673 - protein, 1149 aa, Vibrio cholerae HC-19A1; identical to SEQ ID NO: 2547

SEQ ID NO: 2674 - protein, 706 aa, Vibrio cholerae IEC224; identical to SEQ ID NO: 2536

SEQ ID NO: 2675 - protein, 244 aa, Vibrio cholerae IEC224; identical to SEQ ID NO: 2537

SEQ ID NO: 2676 - protein, 483 aa, Vibrio cholerae IEC224; identical to SEQ ID NO: 2538

SEQ ID NO: 2677 - protein, 1149 aa, Vibrio cholerae IEC224; identical to SEQ ID NO: 2547

SEQ ID NO: 2678 - protein, 706 aa, Vibrio cholerae HC-42A1; identical to SEQ ID NO: 2566

SEQ ID NO: 2679 - protein, 244 aa, Vibrio cholerae HC-42A1; identical to SEQ ID NO: 2537

SEQ ID NO: 2680 - protein, 483 aa, Vibrio cholerae HC-42A1; identical to SEQ ID NO: 2538

SEQ ID NO: 2681 - protein, 1149 aa, Vibrio cholerae HC-42A1; identical to SEQ ID NO: 2547

SEQ ID NO: 2682 - protein, 706 aa, Vibrio cholerae HC-56A2; identical to SEQ ID NO: 2566

SEQ ID NO: 2683 - protein, 244 aa, Vibrio cholerae HC-56A2; identical to SEQ ID NO: 2537

SEQ ID NO: 2684 - protein, 483 aa, Vibrio cholerae HC-56A2; identical to SEQ ID NO: 2538

SEQ ID NO: 2685 - protein, 1149 aa, Vibrio cholerae HC-56A2; identical to SEQ ID NO: 2547

SEQ ID NO: 2686 - protein, 706 aa, Vibrio cholerae CP1041(14)
MTDSLNLSSLWPDLSSLNVMPPQTPEQLSALFVVILWGVALFFLIWSVAAFIRARQRVVWLNKSLDDAEKSTLSGVRNDLISRAEQKKDSVGHLWLEFDETLLEVKGADDVVRLHNTFDADYFFNSSSLAGGSTENRMIAVVPGFLTALGVIGTFVGLQLGLSDLNIAGNVDVNEMKNGVAGVINGAKIAFMTSVWGVLLSVAFNFIEKILEQIIRKKIKSLQNRIDRMFPRLSAEYQLQSIANNSQQSRESLQGLAEKIGEKMQESLIQATQGIQQGLESSLEKIMAPAINKLVDETSDGNQKALESVLQSFMEGFGQQGEQQRVAMDSASQNVNKTLESMSVLMAAFVNKLEVQQNASSEREKELISTISVQVSELVTQGNEQKRVLTEFVEKQVSELGEQLTKRELAASEREQKLASSMESTIKDLVENVSAQSQVLTDFVQNQVVQLTQTFSERDGMASQMEKERNDIFVNQTQAMKAGTDELLAQVKAATESQQITTNSIIEQGKQLQNSIDSSVSASARATESMQQSANELRVAADSMNVFGSNIKDAGNKLSGAVTEAVNSTKDLAEQNHLGAVKVQALREQLLEDTSKFSAIADQINNMLISAEQSFSTLRTTQNEFLAEQKGNLNELTSEMKRNVKELTEQMAQLLEDYAEQANGQTAEHLKVWANSSTQYAESMNTAVRAISSVVDEIQDKVSQHA

SEQ ID NO: 2687 - protein, 218 aa, Vibrio cholerae CP1041(14); identical to SEQ ID NO: 2647

SEQ ID NO: 2688 - protein, 483 aa, Vibrio cholerae CP1041(14); identical to SEQ ID NO: 2538

SEQ ID NO: 2689 - protein, 1149 aa, Vibrio cholerae CP1041(14); identical to SEQ ID NO: 2547

SEQ ID NO: 2690 - protein, 706 aa, Vibrio cholerae CP1032(5); identical to SEQ ID NO: 2536

SEQ ID NO: 2691 - protein, 244 aa, Vibrio cholerae CP1032(5); identical to SEQ ID NO: 2537

SEQ ID NO: 2692 - protein, 483 aa, Vibrio cholerae CP1032(5); identical to SEQ ID NO: 2538

SEQ ID NO: 2693 - protein, 1149 aa, Vibrio cholerae CP1032(5); identical to SEQ ID NO: 2547

SEQ ID NO: 2694 - protein, 706 aa, Vibrio cholerae CP1038(11); identical to SEQ ID NO: 2566

SEQ ID NO: 2695 - protein, 218 aa, Vibrio cholerae CP1038(11); identical to SEQ ID NO: 2647

SEQ ID NO: 2696 - protein, 451 aa, Vibrio cholerae CP1038(11)
MLSKSAGIENNKFRTAYGEVCNALASKKRVEDVIDSSVHVRALALSLHTDAKKNVSFTRRLLNKITEIVKKPSSLVIESFYQHFLSEYDRLADLEATADWLLEAKRLRGNDEQFDENILSTNGPKWLAERAIQNNVDFDHLIAEMKLERYANGRYLTAAKGIYYIEQLNTIPLGQDHPLLEEVQKTVVFDSRYDSESLLGHQILRILIGRSIGSHISEPWMNVILAIGGDPRVPSSNPRYIKWWKSLEPNLVQAVLGWLSKLDLKLFLEALEDYSYSSANYELQRMYPSRKSFLEGMFDAGVISNTRLYLSLDAARYLKRNYDPKHLPNFSTVKDGDKSIIYVQMNGAHMVEGSHSCYLWLYRYLDPSVCVFNYNIDSPTYSQLTIGINNQMSRLSSGAVAKITHSPSGYAWQRKALIALRELGVKLTPKDVLSNEDYIDFKQRYGVREWS

SEQ ID NO: 2697 - protein, 1149 aa, Vibrio cholerae CP1038(11); identical to SEQ ID NO: 2547

SEQ ID NO: 2698 - protein, 706 aa, Vibrio cholerae CP1042(15); identical to SEQ ID NO: 2536

SEQ ID NO: 2699 - protein, 244 aa, Vibrio cholerae CP1042(15); identical to SEQ ID NO: 2537

SEQ ID NO: 2700 - protein, 483 aa, Vibrio cholerae CP1042(15); identical to SEQ ID NO: 2538

SEQ ID NO: 2701 - protein, 1149 aa, Vibrio cholerae CP1042(15); identical to SEQ ID NO: 2547

SEQ ID NO: 2702 - protein, 706 aa, Vibrio cholerae HC-57A2; identical to SEQ ID NO: 2566

SEQ ID NO: 2703 - protein, 244 aa, Vibrio cholerae HC-57A2; identical to SEQ ID NO: 2537

SEQ ID NO: 2704 - protein, 483 aa, Vibrio cholerae HC-57A2; identical to SEQ ID NO: 2538

SEQ ID NO: 2705 - protein, 1149 aa, Vibrio cholerae HC-57A2; identical to SEQ ID NO: 2547

SEQ ID NO: 2706 - protein, 706 aa, Vibrio cholerae CP1048(21); identical to SEQ ID NO: 2566

SEQ ID NO: 2707 - protein, 218 aa, Vibrio cholerae CP1048(21); identical to SEQ ID NO: 2647

SEQ ID NO: 2708 - protein, 483 aa, Vibrio cholerae CP1048(21); identical to SEQ ID NO: 2538

SEQ ID NO: 2709 - protein, 1149 aa, Vibrio cholerae CP1048(21); identical to SEQ ID NO: 2547

SEQ ID NO: 2710 - protein, 706 aa, Vibrio cholerae HC-20A2; identical to SEQ ID NO: 2566

SEQ ID NO: 2711 - protein, 244 aa, Vibrio cholerae HC-20A2; identical to SEQ ID NO: 2537

SEQ ID NO: 2712 - protein, 483 aa, Vibrio cholerae HC-20A2; identical to SEQ ID NO: 2538

SEQ ID NO: 2713 - protein, 1149 aa, Vibrio cholerae HC-20A2; identical to SEQ ID NO: 2547

SEQ ID NO: 2714 - protein, 706 aa, Vibrio cholerae HC-46A1; identical to SEQ ID NO: 2566

SEQ ID NO: 2715 - protein, 218 aa, Vibrio cholerae HC-46A1; identical to SEQ ID NO: 2647

SEQ ID NO: 2716 - protein, 483 aa, Vibrio cholerae HC-46A1; identical to SEQ ID NO: 2538

SEQ ID NO: 2717 - protein, 1149 aa, Vibrio cholerae HC-46A1; identical to SEQ ID NO: 2547

SEQ ID NO: 2718 - protein, 706 aa, Vibrio cholerae CP1030(3); identical to SEQ ID NO: 2536

SEQ ID NO: 2719 - protein, 244 aa, Vibrio cholerae CP1030(3); identical to SEQ ID NO: 2537

SEQ ID NO: 2720 - protein, 483 aa, Vibrio cholerae CP1030(3); identical to SEQ ID NO: 2538

SEQ ID NO: 2721 - protein, 1149 aa, Vibrio cholerae CP1030(3); identical to SEQ ID NO: 2547

SEQ ID NO: 2722 - protein, 706 aa, Vibrio cholerae CP1047(20); identical to SEQ ID NO: 2536

SEQ ID NO: 2723 - protein, 244 aa, Vibrio cholerae CP1047(20); identical to SEQ ID NO: 2537

SEQ ID NO: 2724 - protein, 483 aa, Vibrio cholerae CP1047(20); identical to SEQ ID NO: 2538

SEQ ID NO: 2725 - protein, 1149 aa, Vibrio cholerae CP1047(20); identical to SEQ ID NO: 2547

SEQ ID NO: 2726 - protein, 706 aa, Vibrio cholerae HC-47A1; identical to SEQ ID NO: 2566

SEQ ID NO: 2727 - protein, 244 aa, Vibrio cholerae HC-47A1; identical to SEQ ID NO: 2537

SEQ ID NO: 2728 - protein, 483 aa, Vibrio cholerae HC-47A1; identical to SEQ ID NO: 2538

SEQ ID NO: 2729 - protein, 1149 aa, Vibrio cholerae HC-47A1; identical to SEQ ID NO: 2547

SEQ ID NO: 2730 - protein, 706 aa, Vibrio cholerae CP1046(19); identical to SEQ ID NO: 2536

SEQ ID NO: 2731 - protein, 244 aa, Vibrio cholerae CP1046(19); identical to SEQ ID NO: 2537

SEQ ID NO: 2732 - protein, 483 aa, Vibrio cholerae CP1046(19); identical to SEQ ID NO: 2538

SEQ ID NO: 2733 - protein, 1149 aa, Vibrio cholerae CP1046(19); identical to SEQ ID NO: 2547

SEQ ID NO: 2734 - protein, 706 aa, Vibrio cholerae HC-41A1; identical to SEQ ID NO: 2566

SEQ ID NO: 2735 - protein, 244 aa, Vibrio cholerae HC-41A1; identical to SEQ ID NO: 2537

SEQ ID NO: 2736 - protein, 483 aa, Vibrio cholerae HC-41A1; identical to SEQ ID NO: 2538

SEQ ID NO: 2737 - protein, 1149 aa, Vibrio cholerae HC-41A1; identical to SEQ ID NO: 2547

SEQ ID NO: 2738 - protein, 706 aa, Vibrio cholerae HC-39A1; identical to SEQ ID NO: 2566

SEQ ID NO: 2739 - protein, 244 aa, Vibrio cholerae HC-39A1; identical to SEQ ID NO: 2537

SEQ ID NO: 2740 - protein, 483 aa, Vibrio cholerae HC-39A1; identical to SEQ ID NO: 2538

SEQ ID NO: 2741 - protein, 1149 aa, Vibrio cholerae HC-39A1; identical to SEQ ID NO: 2547

SEQ ID NO: 2742 - protein, 706 aa, Vibrio cholerae CP1040(13); identical to SEQ ID NO: 2686

SEQ ID NO: 2743 - protein, 244 aa, Vibrio cholerae CP1040(13); identical to SEQ ID NO: 2537

SEQ ID NO: 2744 - protein, 483 aa, Vibrio cholerae CP1040(13); identical to SEQ ID NO: 2538

SEQ ID NO: 2745 - protein, 1149 aa, Vibrio cholerae CP1040(13); identical to SEQ ID NO: 2547

SEQ ID NO: 2746 - protein, 706 aa, Vibrio cholerae CP1044(17); identical to SEQ ID NO: 2536

SEQ ID NO: 2747 - protein, 244 aa, Vibrio cholerae CP1044(17); identical to SEQ ID NO: 2537

SEQ ID NO: 2748 - protein, 483 aa, Vibrio cholerae CP1044(17); identical to SEQ ID NO: 2538

SEQ ID NO: 2749 - protein, 1149 aa, Vibrio cholerae CP1044(17); identical to SEQ ID NO: 2547

SEQ ID NO: 2750 - protein, 687 aa, Vibrio cholerae CP1050(23); identical to SEQ ID NO: 2602

SEQ ID NO: 2751 - protein, 244 aa, Vibrio cholerae CP1050(23); identical to SEQ ID NO: 2537

SEQ ID NO: 2752 - protein, 483 aa, Vibrio cholerae CP1050(23); identical to SEQ ID NO: 2538

SEQ ID NO: 2753 - protein, 1149 aa, Vibrio cholerae CP1050(23); identical to SEQ ID NO: 2547

SEQ ID NO: 2754 - protein, 687 aa, Vibrio cholerae HC-81A2; identical to SEQ ID NO: 2602

SEQ ID NO: 2755 - protein, 218 aa, Vibrio cholerae HC-81A2; identical to SEQ ID NO: 2647

SEQ ID NO: 2756 - protein, 483 aa, Vibrio cholerae HC-81A2; identical to SEQ ID NO: 2538

SEQ ID NO: 2757 - protein, 1149 aa, Vibrio cholerae HC-81A2; identical to SEQ ID NO: 2547

SEQ ID NO: 2758 - protein, 706 aa, Vibrio cholerae CP1033(6); identical to SEQ ID NO: 2536

SEQ ID NO: 2759 - protein, 244 aa, Vibrio cholerae CP1033(6); identical to SEQ ID NO: 2537

SEQ ID NO: 2760 - protein, 483 aa, Vibrio cholerae CP1033(6); identical to SEQ ID NO: 2538

SEQ ID NO: 2761 - protein, 1149 aa, Vibrio cholerae CP1033(6); identical to SEQ ID NO: 2547

SEQ ID NO: 2762 - protein, 687 aa, Vibrio cholerae HC-17A1; identical to SEQ ID NO: 2602

SEQ ID NO: 2763 - protein, 244 aa, Vibrio cholerae HC-17A1; identical to SEQ ID NO: 2537

SEQ ID NO: 2764 - protein, 483 aa, Vibrio cholerae HC-17A1; identical to SEQ ID NO: 2538

SEQ ID NO: 2765 - protein, 1149 aa, Vibrio cholerae HC-17A1; identical to SEQ ID NO: 2547

SEQ ID NO: 2766 - protein, 318 aa, Vibrio cholerae HC-50A2
LTEFVEKQVSELGEQLTKRELAASEREQKLASSMESTIKDLVENVSAQSQVLTDFVQNQVVQLTQTFSERDGMASQMEKERNDIFVNQTQAMKAGTDELLAQVKAATESQQITTNSIIEQGKQLQNSIDSSVSASARATESMQQSANELRVAADSMNVFGSNIKDAGNKLSGAVTEAVNSTKDLAEQNHLGAVKVQALREQLLEDTSKFSAIADQINNMLISAEQSFSTLRTTQNEFLAEQKGNLNELTSEMKRNVKELTEQMAQLLEDYAEQANGQTAEHLKVWANSSTQYAESMNTAVRAISSVVDEIQDKVSQHA

SEQ ID NO: 2767 - protein, 244 aa, Vibrio cholerae HC-50A2; identical to SEQ ID NO: 2537

SEQ ID NO: 2768 - protein, 265 aa, Vibrio cholerae HC-50A2
MVFDSRYDSESLLGHQILRILIGRSIGSHISEPWMNVILAIGGDPRVPSSNPRYIKWWKSLEPNLVQAVLGWLSKLDLKLFLEALEDYSYSSANYELQRMYPSRKSFLEGMFDAGVISNTRLYLSLDAARYLKRNYDPKHLPNFSTVKDGDKSIIYVQMNGAHMVEGSHSCYLWLYRYLDPSVCVFNYNIDSPTYSQLTIGINNQMSRLSSGAVAKITHSPSGYAWQRKALIALRELGVKLTPKDVLSNEDYIDFKQRYGVREWS

SEQ ID NO: 2769 - protein, 932 aa, Vibrio cholerae HC-50A2
MELTSLISKFFSSSDKTSQFELICDDSLDFATSRKTLEKIKAGKADEWITAQYVALKMLEEQGDVSSFPDGFIMPADTAVRLDSELRDLFSLPPVWKGVIDADIQGKASTPTFKIDLSVTTKQGRTTLNYTVDGPFIRFSQNEQYLLTPEQLMVFIAHKTHVRSDRSEYDNLLYLHSLQEAQKNGCKLNLKHFERLRILTPNKITVEAELNSQGELILTPNMGQSASHESIQKVLGQLQSDNAVTLKVGDEIVLFSEEKLMAVKEVISNRVIPQQQVKAFLENPTAYIDASLVDLDLGFSIRVHGATVFKHAYFGETDESGIDWFGASPTSDLINPISKLTDRVRDKTTLEDVAKKIEDARQTGATVFDYEGQSYDISDPAAVEKVLNEIGHKISSPNTDLSSYGEAEDAETESEGSEIHVVDIDLNDEELSENSPKVEQLISDISWDGELNWENHKRTPFPHQDIGVRWILGVEQKSLSDSKVSGALLADDMGLGKTFMALSAIEHIYQRQQISGETKKPALIVAPLSLLENWKDEVDKTFKHSPFKDVVILQSSAELNEYRMGGVEIRGQSASDDCLEPKYSLKVGKYFGPSRLDLPERLVITTYQTLRDYQFSMCLIDWGIVVFDEAQNIKNPNALQTRAAKGLKADFKLVATGTPVENSLADFWCLMDTACPGHLGSYQEFRARYISPILKAAGDEVEEIRARLGRELRIAVGALMLRRIKEDNLKGLPLKHMYAGGEFENWKYLEELKSTMVGYQRDVYEGAISHQLENEESHALTTLMRLRDSSLHPRLSDGGRLDIPKNAKSARALYGESGKLVSLLETLDRVRSKQEKCIIFAVNKRLQSFLSVTLGQIYNLGPLSVINGDAKAVAKRKSVPTRKSMISDFEAKEGFNLIVMSPVAAGVGLTVVGANHVVHLERYWNPAKEAQA

SEQ ID NO: 2770 - protein, 706 aa, Vibrio cholerae HC-62A1; identical to SEQ ID NO: 2566

SEQ ID NO: 2771 - protein, 244 aa, Vibrio cholerae HC-62A1; identical to SEQ ID NO: 2537

SEQ ID NO: 2772 - protein, 483 aa, Vibrio cholerae HC-62A1; identical to SEQ ID NO: 2538

SEQ ID NO: 2773 - protein, 1149 aa, Vibrio cholerae HC-62A1; identical to SEQ ID NO: 2547

SEQ ID NO: 2774 - protein, 706 aa, Vibrio cholerae HC-77A1; identical to SEQ ID NO: 2566

SEQ ID NO: 2775 - protein, 244 aa, Vibrio cholerae HC-77A1; identical to SEQ ID NO: 2537

SEQ ID NO: 2776 - protein, 483 aa, Vibrio cholerae HC-77A1; identical to SEQ ID NO: 2538

SEQ ID NO: 2777 - protein, 1149 aa, Vibrio cholerae HC-77A1; identical to SEQ ID NO: 2547

SEQ ID NO: 2778 - protein, 706 aa, Vibrio cholerae HC-37A1; identical to SEQ ID NO: 2566

SEQ ID NO: 2779 - protein, 244 aa, Vibrio cholerae HC-37A1; identical to SEQ ID NO: 2537

SEQ ID NO: 2780 - protein, 483 aa, Vibrio cholerae HC-37A1; identical to SEQ ID NO: 2538

SEQ ID NO: 2781 - protein, 1149 aa, Vibrio cholerae HC-37A1; identical to SEQ ID NO: 2547

SEQ ID NO: 2782 - protein, 706 aa, Vibrio cholerae HC-62B1; identical to SEQ ID NO: 2566

SEQ ID NO: 2783 - protein, 244 aa, Vibrio cholerae HC-62B1; identical to SEQ ID NO: 2537

SEQ ID NO: 2784 - protein, 483 aa, Vibrio cholerae HC-62B1; identical to SEQ ID NO: 2538

SEQ ID NO: 2785 - protein, 1149 aa, Vibrio cholerae HC-62B1; identical to SEQ ID NO: 2547

SEQ ID NO: 2786 - protein, 687 aa, Vibrio cholerae HC-17A2; identical to SEQ ID NO: 2602

SEQ ID NO: 2787 - protein, 244 aa, Vibrio cholerae HC-17A2; identical to SEQ ID NO: 2537

SEQ ID NO: 2788 - protein, 483 aa, Vibrio cholerae HC-17A2; identical to SEQ ID NO: 2538

SEQ ID NO: 2789 - protein, 1149 aa, Vibrio cholerae HC-17A2; identical to SEQ ID NO: 2547

SEQ ID NO: 2790 - protein, 687 aa, Vibrio cholerae HC-69A1; identical to SEQ ID NO: 2602

SEQ ID NO: 2791 - protein, 244 aa, Vibrio cholerae HC-69A1; identical to SEQ ID NO: 2537

SEQ ID NO: 2792 - protein, 483 aa, Vibrio cholerae HC-69A1; identical to SEQ ID NO: 2538

SEQ ID NO: 2793 - protein, 1149 aa, Vibrio cholerae HC-69A1; identical to SEQ ID NO: 2547

SEQ ID NO: 2794 - protein, 687 aa, Vibrio cholerae HC-7A1; identical to SEQ ID NO: 2602

SEQ ID NO: 2795 - protein, 218 aa, Vibrio cholerae HC-7A1; identical to SEQ ID NO: 2647

SEQ ID NO: 2796 - protein, 451 aa, Vibrio cholerae HC-7A1; identical to SEQ ID NO: 2696

SEQ ID NO: 2797 - protein, 1149 aa, Vibrio cholerae HC-7A1; identical to SEQ ID NO: 2547

SEQ ID NO: 2798 - protein, 706 aa, Vibrio cholerae HC-81A1; identical to SEQ ID NO: 2566

SEQ ID NO: 2799 - protein, 244 aa, Vibrio cholerae HC-81A1; identical to SEQ ID NO: 2537

SEQ ID NO: 2800 - protein, 483 aa, Vibrio cholerae HC-81A1; identical to SEQ ID NO: 2538

SEQ ID NO: 2801 - protein, 1149 aa, Vibrio cholerae HC-81A1; identical to SEQ ID NO: 2547

SEQ ID NO: 2802 - protein, 706 aa, Vibrio cholerae HC-64A1; identical to SEQ ID NO: 2566

SEQ ID NO: 2803 - protein, 244 aa, Vibrio cholerae HC-64A1; identical to SEQ ID NO: 2537

SEQ ID NO: 2804 - protein, 483 aa, Vibrio cholerae HC-64A1; identical to SEQ ID NO: 2538

SEQ ID NO: 2805 - protein, 1149 aa, Vibrio cholerae HC-64A1; identical to SEQ ID NO: 2547

SEQ ID NO: 2806 - protein, 687 aa, Vibrio cholerae HC-65A1; identical to SEQ ID NO: 2602

SEQ ID NO: 2807 - protein, 244 aa, Vibrio cholerae HC-65A1; identical to SEQ ID NO: 2537

SEQ ID NO: 2808 - protein, 483 aa, Vibrio cholerae HC-65A1; identical to SEQ ID NO: 2538

SEQ ID NO: 2809 - protein, 1149 aa, Vibrio cholerae HC-65A1; identical to SEQ ID NO: 2547

SEQ ID NO: 2810 - protein, 706 aa, Vibrio cholerae HC-67A1; identical to SEQ ID NO: 2566

SEQ ID NO: 2811 - protein, 244 aa, Vibrio cholerae HC-67A1; identical to SEQ ID NO: 2537

SEQ ID NO: 2812 - protein, 483 aa, Vibrio cholerae HC-67A1; identical to SEQ ID NO: 2538

SEQ ID NO: 2813 - protein, 1149 aa, Vibrio cholerae HC-67A1; identical to SEQ ID NO: 2547

SEQ ID NO: 2814 - protein, 706 aa, Vibrio cholerae HC-68A1; identical to SEQ ID NO: 2566

SEQ ID NO: 2815 - protein, 244 aa, Vibrio cholerae HC-68A1; identical to SEQ ID NO: 2537

SEQ ID NO: 2816 - protein, 483 aa, Vibrio cholerae HC-68A1; identical to SEQ ID NO: 2538

SEQ ID NO: 2817 - protein, 1149 aa, Vibrio cholerae HC-68A1; identical to SEQ ID NO: 2547

SEQ ID NO: 2818 - protein, 706 aa, Vibrio cholerae HC-71A1; identical to SEQ ID NO: 2566

SEQ ID NO: 2819 - protein, 244 aa, Vibrio cholerae HC-71A1; identical to SEQ ID NO: 2537

SEQ ID NO: 2820 - protein, 483 aa, Vibrio cholerae HC-71A1; identical to SEQ ID NO: 2538

SEQ ID NO: 2821 - protein, 1149 aa, Vibrio cholerae HC-71A1; identical to SEQ ID NO: 2547

SEQ ID NO: 2822 - protein, 687 aa, Vibrio cholerae HC-72A2; identical to SEQ ID NO: 2602

SEQ ID NO: 2823 - protein, 244 aa, Vibrio cholerae HC-72A2; identical to SEQ ID NO: 2537

SEQ ID NO: 2824 - protein, 483 aa, Vibrio cholerae HC-72A2; identical to SEQ ID NO: 2538

SEQ ID NO: 2825 - protein, 1149 aa, Vibrio cholerae HC-72A2; identical to SEQ ID NO: 2547

SEQ ID NO: 2826 - protein, 706 aa, Vibrio cholerae HC-80A1; identical to SEQ ID NO: 2566

SEQ ID NO: 2827 - protein, 244 aa, Vibrio cholerae HC-80A1; identical to SEQ ID NO: 2537

SEQ ID NO: 2828 - protein, 483 aa, Vibrio cholerae HC-80A1; identical to SEQ ID NO: 2538

SEQ ID NO: 2829 - protein, 1149 aa, Vibrio cholerae HC-80A1; identical to SEQ ID NO: 2547

SEQ ID NO: 2830 - protein, 706 aa, Vibrio cholerae O1 str. Inaba G4222; identical to SEQ ID NO: 2536

SEQ ID NO: 2831 - protein, 244 aa, Vibrio cholerae O1 str. Inaba G4222; identical to SEQ ID NO: 2537

SEQ ID NO: 2832 - protein, 483 aa, Vibrio cholerae O1 str. Inaba G4222; identical to SEQ ID NO: 2538

SEQ ID NO: 2833 - protein, 1149 aa, Vibrio cholerae O1 str. Inaba G4222; identical to SEQ ID NO: 2547

SEQ ID NO: 2834 - protein, 706 aa, Vibrio cholerae O1 str. 116059; identical to SEQ ID NO: 2536

SEQ ID NO: 2835 - protein, 244 aa, Vibrio cholerae O1 str. 116059; identical to SEQ ID NO: 2537

SEQ ID NO: 2836 - protein, 483 aa, Vibrio cholerae O1 str. 116059; identical to SEQ ID NO: 2538

SEQ ID NO: 2837 - protein, 1149 aa, Vibrio cholerae O1 str. 116059; identical to SEQ ID NO: 2547

SEQ ID NO: 2838 - protein, 687 aa, Vibrio cholerae O1 str. 95412; identical to SEQ ID NO: 2598

SEQ ID NO: 2839 - protein, 244 aa, Vibrio cholerae O1 str. 95412; identical to SEQ ID NO: 2537

SEQ ID NO: 2840 - protein, 483 aa, Vibrio cholerae O1 str. 95412; identical to SEQ ID NO: 2542

SEQ ID NO: 2841 - protein, 1146 aa, Vibrio cholerae O1 str. 95412; identical to SEQ ID NO: 2543

SEQ ID NO: 2842 - protein, 706 aa, Vibrio cholerae O1 str. AG-7404; identical to SEQ ID NO: 2536

SEQ ID NO: 2843 - protein, 244 aa, Vibrio cholerae O1 str. AG-7404; identical to SEQ ID NO: 2537

SEQ ID NO: 2844 - protein, 483 aa, Vibrio cholerae O1 str. AG-7404; identical to SEQ ID NO: 2538

SEQ ID NO: 2845 - protein, 1149 aa, Vibrio cholerae O1 str. AG-7404; identical to SEQ ID NO: 2547

SEQ ID NO: 2846 - protein, 706 aa, Vibrio cholerae O1 str. AG-8040; identical to SEQ ID NO: 2536

SEQ ID NO: 2847 - protein, 244 aa, Vibrio cholerae O1 str. AG-8040; identical to SEQ ID NO: 2537

SEQ ID NO: 2848 - protein, 483 aa, Vibrio cholerae O1 str. AG-8040; identical to SEQ ID NO: 2538

SEQ ID NO: 2849 - protein, 1149 aa, Vibrio cholerae O1 str. AG-8040; identical to SEQ ID NO: 2547

SEQ ID NO: 2850 - protein, 687 aa, Vibrio cholerae O1 str. EC-0009; identical to SEQ ID NO: 2602

SEQ ID NO: 2851 - protein, 244 aa, Vibrio cholerae O1 str. EC-0009; identical to SEQ ID NO: 2537

SEQ ID NO: 2852 - protein, 483 aa, Vibrio cholerae O1 str. EC-0009; identical to SEQ ID NO: 2538

SEQ ID NO: 2853 - protein, 1149 aa, Vibrio cholerae O1 str. EC-0009; identical to SEQ ID NO: 2547

SEQ ID NO: 2854 - protein, 687 aa, Vibrio cholerae O1 str. EC-0012; identical to SEQ ID NO: 2602

SEQ ID NO: 2855 - protein, 244 aa, Vibrio cholerae O1 str. EC-0012; identical to SEQ ID NO: 2537

SEQ ID NO: 2856 - protein, 483 aa, Vibrio cholerae O1 str. EC-0012; identical to SEQ ID NO: 2538

SEQ ID NO: 2857 - protein, 1149 aa, Vibrio cholerae O1 str. EC-0012; identical to SEQ ID NO: 2547

SEQ ID NO: 2858 - protein, 706 aa, Vibrio cholerae O1 str. EC-0027; identical to SEQ ID NO: 2566

SEQ ID NO: 2859 - protein, 244 aa, Vibrio cholerae O1 str. EC-0027; identical to SEQ ID NO: 2537

SEQ ID NO: 2860 - protein, 483 aa, Vibrio cholerae O1 str. EC-0027; identical to SEQ ID NO: 2538

SEQ ID NO: 2861 - protein, 1149 aa, Vibrio cholerae O1 str. EC-0027; identical to SEQ ID NO: 2547

SEQ ID NO: 2862 - protein, 687 aa, Vibrio cholerae O1 str. EC-0051; identical to SEQ ID NO: 2598

SEQ ID NO: 2863 - protein, 244 aa, Vibrio cholerae O1 str. EC-0051; identical to SEQ ID NO: 2537

SEQ ID NO: 2864 - protein, 483 aa, Vibrio cholerae O1 str. EC-0051; identical to SEQ ID NO: 2538

SEQ ID NO: 2865 - protein, 1149 aa, Vibrio cholerae O1 str. EC-0051; identical to SEQ ID NO: 2547

SEQ ID NO: 2866 - protein, 706 aa, Vibrio cholerae O1 str. EDC-020; identical to SEQ ID NO: 2566

SEQ ID NO: 2867 - protein, 244 aa, Vibrio cholerae O1 str. EDC-020; identical to SEQ ID NO: 2537

SEQ ID NO: 2868 - protein, 483 aa, Vibrio cholerae O1 str. EDC-020; identical to SEQ ID NO: 2538

SEQ ID NO: 2869 - protein, 1149 aa, Vibrio cholerae O1 str. EDC-020; identical to SEQ ID NO: 2547

SEQ ID NO: 2870 - protein, 706 aa, Vibrio cholerae O1 str. EDC-022; identical to SEQ ID NO: 2536

SEQ ID NO: 2871 - protein, 244 aa, Vibrio cholerae O1 str. EDC-022; identical to SEQ ID NO: 2537

SEQ ID NO: 2872 - protein, 483 aa, Vibrio cholerae O1 str. EDC-022; identical to SEQ ID NO: 2538

SEQ ID NO: 2873 - protein, 1149 aa, Vibrio cholerae O1 str. EDC-022; identical to SEQ ID NO: 2547

SEQ ID NO: 2874 - protein, 706 aa, Vibrio cholerae O1 str. EM-1536; identical to SEQ ID NO: 2536

SEQ ID NO: 2875 - protein, 244 aa, Vibrio cholerae O1 str. EM-1536; identical to SEQ ID NO: 2537

SEQ ID NO: 2876 - protein, 483 aa, Vibrio cholerae O1 str. EM-1536; identical to SEQ ID NO: 2538

SEQ ID NO: 2877 - protein, 1149 aa, Vibrio cholerae O1 str. EM-1536; identical to SEQ ID NO: 2547

SEQ ID NO: 2878 - protein, 706 aa, Vibrio cholerae O1 str. EM-1546; identical to SEQ ID NO: 2566

SEQ ID NO: 2879 - protein, 244 aa, Vibrio cholerae O1 str. EM-1546; identical to SEQ ID NO: 2537

SEQ ID NO: 2880 - protein, 483 aa, Vibrio cholerae O1 str. EM-1546; identical to SEQ ID NO: 2538

SEQ ID NO: 2881 - protein, 1149 aa, Vibrio cholerae O1 str. EM-1546; identical to SEQ ID NO: 2547

SEQ ID NO: 2882 - protein, 706 aa, Vibrio cholerae O1 str. EM-1626; identical to SEQ ID NO: 2536

SEQ ID NO: 2883 - protein, 218 aa, Vibrio cholerae O1 str. EM-1626; identical to SEQ ID NO: 2647

SEQ ID NO: 2884 - protein, 483 aa, Vibrio cholerae O1 str. EM-1626; identical to SEQ ID NO: 2538

SEQ ID NO: 2885 - protein, 1149 aa, Vibrio cholerae O1 str. EM-1626; identical to SEQ ID NO: 2547

SEQ ID NO: 2886 - protein, 706 aa, Vibrio cholerae O1 str. EM-1727; identical to SEQ ID NO: 2536

SEQ ID NO: 2887 - protein, 244 aa, Vibrio cholerae O1 str. EM-1727; identical to SEQ ID NO: 2537

SEQ ID NO: 2888 - protein, 483 aa, Vibrio cholerae O1 str. EM-1727; identical to SEQ ID NO: 2538

SEQ ID NO: 2889 - protein, 1149 aa, Vibrio cholerae O1 str. EM-1727; identical to SEQ ID NO: 2547

SEQ ID NO: 2890 - protein, 706 aa, Vibrio cholerae O1 str. NHCC-004A; identical to SEQ ID NO: 2566

SEQ ID NO: 2891 - protein, 244 aa, Vibrio cholerae O1 str. NHCC-004A; identical to SEQ ID NO: 2537

SEQ ID NO: 2892 - protein, 483 aa, Vibrio cholerae O1 str. NHCC-004A; identical to SEQ ID NO: 2538

SEQ ID NO: 2893 - protein, 1149 aa, Vibrio cholerae O1 str. NHCC-004A; identical to SEQ ID NO: 2547

SEQ ID NO: 2894 - protein, 687 aa, Vibrio cholerae O1 str. NHCC-006C; identical to SEQ ID NO: 2602

SEQ ID NO: 2895 - protein, 244 aa, Vibrio cholerae O1 str. NHCC-006C; identical to SEQ ID NO: 2537

SEQ ID NO: 2896 - protein, 483 aa, Vibrio cholerae O1 str. NHCC-006C; identical to SEQ ID NO: 2538

SEQ ID NO: 2897 - protein, 1149 aa, Vibrio cholerae O1 str. NHCC-006C; identical to SEQ ID NO: 2547

SEQ ID NO: 2898 - protein, 687 aa, Vibrio cholerae O1 str. NHCC-010F; identical to SEQ ID NO: 2602

SEQ ID NO: 2899 - protein, 244 aa, Vibrio cholerae O1 str. NHCC-010F; identical to SEQ ID NO: 2537

SEQ ID NO: 2900 - protein, 483 aa, Vibrio cholerae O1 str. NHCC-010F; identical to SEQ ID NO: 2538

SEQ ID NO: 2901 - protein, 1149 aa, Vibrio cholerae O1 str. NHCC-010F; identical to SEQ ID NO: 2547

SEQ ID NO: 2902 - protein, 687 aa, Vibrio cholerae O1 str. Nep-21106; identical to SEQ ID NO: 2598

SEQ ID NO: 2903 - protein, 244 aa, Vibrio cholerae O1 str. Nep-21106; identical to SEQ ID NO: 2537

SEQ ID NO: 2904 - protein, 483 aa, Vibrio cholerae O1 str. Nep-21106; identical to SEQ ID NO: 2538

SEQ ID NO: 2905 - protein, 1149 aa, Vibrio cholerae O1 str. Nep-21106; identical to SEQ ID NO: 2547

SEQ ID NO: 2906 - protein, 706 aa, Vibrio cholerae O1 str. Nep-21113; identical to SEQ ID NO: 2536

SEQ ID NO: 2907 - protein, 244 aa, Vibrio cholerae O1 str. Nep-21113; identical to SEQ ID NO: 2537

SEQ ID NO: 2908 - protein, 483 aa, Vibrio cholerae O1 str. Nep-21113; identical to SEQ ID NO: 2538

SEQ ID NO: 2909 - protein, 1149 aa, Vibrio cholerae O1 str. Nep-21113; identical to SEQ ID NO: 2547

SEQ ID NO: 2910 - protein, 706 aa, Vibrio cholerae O1 str. PCS-023; identical to SEQ ID NO: 2566

SEQ ID NO: 2911 - protein, 244 aa, Vibrio cholerae O1 str. PCS-023; identical to SEQ ID NO: 2537

SEQ ID NO: 2912 - protein, 483 aa, Vibrio cholerae O1 str. PCS-023; identical to SEQ ID NO: 2538

SEQ ID NO: 2913 - protein, 1149 aa, Vibrio cholerae O1 str. PCS-023; identical to SEQ ID NO: 2547

SEQ ID NO: 2914 - protein, 706 aa, Vibrio cholerae O1 str. PCS-022; identical to SEQ ID NO: 2536

SEQ ID NO: 2915 - protein, 244 aa, Vibrio cholerae O1 str. PCS-022; identical to SEQ ID NO: 2537

SEQ ID NO: 2916 - protein, 483 aa, Vibrio cholerae O1 str. PCS-022; identical to SEQ ID NO: 2538

SEQ ID NO: 2917 - protein, 1149 aa, Vibrio cholerae O1 str. PCS-022; identical to SEQ ID NO: 2547

SEQ ID NO: 2918 - protein, 706 aa, Vibrio cholerae O1 biovar El Tor; identical to SEQ ID NO: 2536

SEQ ID NO: 2919 - protein, 244 aa, Vibrio cholerae O1 biovar El Tor; identical to SEQ ID NO: 2537

SEQ ID NO: 2920 - protein, 483 aa, Vibrio cholerae O1 biovar El Tor; identical to SEQ ID NO: 2538

SEQ ID NO: 2921 - protein, 1149 aa, Vibrio cholerae O1 biovar El Tor; identical to SEQ ID NO: 2547

SEQ ID NO: 2922 - protein, 706 aa, Vibrio cholerae 2012EL-1759; identical to SEQ ID NO: 2536

SEQ ID NO: 2923 - protein, 244 aa, Vibrio cholerae 2012EL-1759; identical to SEQ ID NO: 2537

SEQ ID NO: 2924 - protein, 483 aa, Vibrio cholerae 2012EL-1759; identical to SEQ ID NO: 2538

SEQ ID NO: 2925 - protein, 706 aa, Vibrio cholerae O1 biovar El Tor; identical to SEQ ID NO: 2566

SEQ ID NO: 2926 - protein, 244 aa, Vibrio cholerae O1 biovar El Tor; identical to SEQ ID NO: 2537

SEQ ID NO: 2927 - protein, 483 aa, Vibrio cholerae O1 biovar El Tor; identical to SEQ ID NO: 2538

SEQ ID NO: 2928 - protein, 1149 aa, Vibrio cholerae O1 biovar El Tor; identical to SEQ ID NO: 2547

SEQ ID NO: 2929 - protein, 706 aa, Vibrio cholerae O1 biovar El Tor; identical to SEQ ID NO: 2566

SEQ ID NO: 2930 - protein, 244 aa, Vibrio cholerae O1 biovar El Tor; identical to SEQ ID NO: 2537

SEQ ID NO: 2931 - protein, 483 aa, Vibrio cholerae O1 biovar El Tor; identical to SEQ ID NO: 2538

SEQ ID NO: 2932 - protein, 1149 aa, Vibrio cholerae O1 biovar El Tor; identical to SEQ ID NO: 2547

SEQ ID NO: 2933 - protein, 569 aa, Vibrio cholerae
MIAAVPGFLTALGVIGTFVGLQLGLSDLNIAGNVDVNEMKNGVAGVINGAKIAFMTSVWGVLLSVAFNFIEKILEQIIRKKIKSLQNRIDRMFPRLSAEYQLQSIANNSQQSRESLQGLAEKIGEKMQESLIQATQGIQQGLESSLEKIMAPAINKLVDETSDGNQKALESVLQSFMEGFGQQGEQQRVAMDSASQNVNKTLESMSVSMAAFVNKLEVQQNASSEREKELISTISVQVSELVTQGNEQKRVLTEFVEKQVSELGEQLTKRELAASEREQKLASSMESTIKDLVENVSAQSQVLTDFVQNQVVQLTQTFSERDGMASQMEKERNDIFVNQTQAMKAGTDELLAQVKAATESQQITSNSIIEQGKQLQNSIDSSVSASARATESMQQSANELRVAADSMNVFGSNIKDAGNKLSGAVTEAVNSTKDLAEQNHLGAVKVQALREQLLEDTSKFSAIADQINNMLISAEQSFSTLRTTQNEFLVEQKGNLNELTSEMKRNVKELTEQMAQLLEDYAEQANGQTAEHLKVWANSSIQYAESMNTAVRAISSVVDEIQDKVSQHA

SEQ ID NO: 2934 - protein, 244 aa, Vibrio cholerae
MRRGVRSHTQNSVDEENPYWVSFSDLMSALLVIFILAAVALIIELTQKTNDVEAGIEELKQAELARKNIIYDVRDELAKRNVIVEIADNDTVIRIPESTLTFASGKSSIPNDATIQQAVKDIGVVLHSAIQKKDRFQYLDTIFIEGHTDSDSIHYRGKGNWGLSTDRAISVWNVWQNELSLTPKLGDLENAYHAKLFSVSGYAATRRANLHESNQQEKSQNRRIDIRFTVKKPSIAELERIVGP

SEQ ID NO: 2935 - protein, 483 aa, Vibrio cholerae
MSLNIKKLKVSLPANPFGQAIKDFAHLSSQLEVLSKSAGIENNKFRTAYGEVCNALASKKRVEDVIDSSVHVRALALSLHTDAKKNVSFTRRLLNKITKIVKKPSSLVIESFYQHFLSEYDRLADLEATADWLLVAKRLRGNDEQFDENILSTNGPKWLAERAIQNNVDFDHLIAEMKLERYANGRYLTAAKGIYYIEQLNTIPLGQDHPLLEEVQKTVVFDSRYDSESLLGHQILRILIGRSIGSHISEPWMNVILAIGGDPRVPSSNPRYIKWWKSLEPNLVQAVRGWLSKLDLKLFLEALEDYSYSSANYELQRMYPSRKSFLEGMFDAGVISNTRLYLSLDAARYLKRNYDPKHLPNFSTVKDGDKSIIYVQMNGAHMVEGSHSCYLWLYRYLDPSVCVFNYNIDSPTYSQLTIGINNQMSRLSSGAVAKITHSPSGYAWQRKALIALRELGVKLTPKDVLSNEDYIDFKQRYGVREWS

SEQ ID NO: 2936 - protein, 569 aa, Vibrio cholerae; identical to SEQ ID NO: 2933

SEQ ID NO: 2937 - protein, 244 aa, Vibrio cholerae; identical to SEQ ID NO: 2934

SEQ ID NO: 2938 - protein, 483 aa, Vibrio cholerae; identical to SEQ ID NO: 2935

SEQ ID NO: 2939 - protein, 687 aa, Vibrio cholerae; identical to SEQ ID NO: 2598

SEQ ID NO: 2940 - protein, 244 aa, Vibrio cholerae; identical to SEQ ID NO: 2537

SEQ ID NO: 2941 - protein, 483 aa, Vibrio cholerae; identical to SEQ ID NO: 2538

SEQ ID NO: 2942 - protein, 1149 aa, Vibrio cholerae; identical to SEQ ID NO: 2547

SEQ ID NO: 2943 - protein, 687 aa, Vibrio cholerae; identical to SEQ ID NO: 2598

SEQ ID NO: 2944 - protein, 244 aa, Vibrio cholerae; identical to SEQ ID NO: 2537

SEQ ID NO: 2945 - protein, 483 aa, Vibrio cholerae; identical to SEQ ID NO: 2538

SEQ ID NO: 2946 - protein, 1149 aa, Vibrio cholerae; identical to SEQ ID NO: 2547

SEQ ID NO: 2947 - protein, 706 aa, Vibrio cholerae O1 biovar El Tor; identical to SEQ ID NO: 2536

SEQ ID NO: 2948 - protein, 244 aa, Vibrio cholerae O1 biovar El Tor; identical to SEQ ID NO: 2537

SEQ ID NO: 2949 - protein, 483 aa, Vibrio cholerae O1 biovar El Tor; identical to SEQ ID NO: 2538

SEQ ID NO: 2950 - protein, 1149 aa, Vibrio cholerae O1 biovar El Tor; identical to SEQ ID NO: 2547

SEQ ID NO: 2951 - protein, 706 aa, Vibrio cholerae; identical to SEQ ID NO: 2566

SEQ ID NO: 2952 - protein, 244 aa, Vibrio cholerae; identical to SEQ ID NO: 2537

SEQ ID NO: 2953 - protein, 483 aa, Vibrio cholerae; identical to SEQ ID NO: 2538

SEQ ID NO: 2954 - protein, 1149 aa, Vibrio cholerae; identical to SEQ ID NO: 2547

SEQ ID NO: 2955 - protein, 706 aa, Vibrio cholerae; identical to SEQ ID NO: 2566

SEQ ID NO: 2956 - protein, 244 aa, Vibrio cholerae; identical to SEQ ID NO: 2537

SEQ ID NO: 2957 - protein, 483 aa, Vibrio cholerae; identical to SEQ ID NO: 2538

SEQ ID NO: 2958 - protein, 1149 aa, Vibrio cholerae; identical to SEQ ID NO: 2547

SEQ ID NO: 2959 - protein, 706 aa, Vibrio cholerae; identical to SEQ ID NO: 2566

SEQ ID NO: 2960 - protein, 244 aa, Vibrio cholerae; identical to SEQ ID NO: 2537

SEQ ID NO: 2961 - protein, 483 aa, Vibrio cholerae; identical to SEQ ID NO: 2538

SEQ ID NO: 2962 - protein, 1149 aa, Vibrio cholerae; identical to SEQ ID NO: 2547

SEQ ID NO: 2963 - protein, 706 aa, Vibrio cholerae MS6; identical to SEQ ID NO: 2536

SEQ ID NO: 2964 - protein, 244 aa, Vibrio cholerae MS6; identical to SEQ ID NO: 2537

SEQ ID NO: 2965 - protein, 483 aa, Vibrio cholerae MS6; identical to SEQ ID NO: 2538

SEQ ID NO: 2966 - protein, 1149 aa, Vibrio cholerae MS6; identical to SEQ ID NO: 2547

SEQ ID NO: 2967 - protein, 706 aa, Vibrio cholerae O1 biovar El Tor; identical to SEQ ID NO: 2536

SEQ ID NO: 2968 - protein, 244 aa, Vibrio cholerae O1 biovar El Tor; identical to SEQ ID NO: 2537

SEQ ID NO: 2969 - protein, 483 aa, Vibrio cholerae O1 biovar El Tor; identical to SEQ ID NO: 2538

SEQ ID NO: 2970 - protein, 1149 aa, Vibrio cholerae O1 biovar El Tor; identical to SEQ ID NO: 2547

SEQ ID NO: 2971 - protein, 706 aa, Vibrio cholerae; identical to SEQ ID NO: 2566

SEQ ID NO: 2972 - protein, 244 aa, Vibrio cholerae; identical to SEQ ID NO: 2537

SEQ ID NO: 2973 - protein, 483 aa, Vibrio cholerae; identical to SEQ ID NO: 2538

SEQ ID NO: 2974 - protein, 1149 aa, Vibrio cholerae; identical to SEQ ID NO: 2547

SEQ ID NO: 2975 - protein, 706 aa, Vibrio cholerae; identical to SEQ ID NO: 2566

SEQ ID NO: 2976 - protein, 244 aa, Vibrio cholerae; identical to SEQ ID NO: 2537

SEQ ID NO: 2977 - protein, 483 aa, Vibrio cholerae; identical to SEQ ID NO: 2538

SEQ ID NO: 2978 - protein, 1149 aa, Vibrio cholerae; identical to SEQ ID NO: 2547

SEQ ID NO: 2979 - protein, 706 aa, Vibrio cholerae O1 biovar El Tor; identical to SEQ ID NO: 2566

SEQ ID NO: 2980 - protein, 244 aa, Vibrio cholerae O1 biovar El Tor; identical to SEQ ID NO: 2537

SEQ ID NO: 2981 - protein, 483 aa, Vibrio cholerae O1 biovar El Tor; identical to SEQ ID NO: 2538

SEQ ID NO: 2982 - protein, 1149 aa, Vibrio cholerae O1 biovar El Tor; identical to SEQ ID NO: 2547

SEQ ID NO: 2983 - protein, 706 aa, Vibrio cholerae; identical to SEQ ID NO: 2536

SEQ ID NO: 2984 - protein, 244 aa, Vibrio cholerae; identical to SEQ ID NO: 2537

SEQ ID NO: 2985 - protein, 483 aa, Vibrio cholerae; identical to SEQ ID NO: 2542

SEQ ID NO: 2986 - protein, 1146 aa, Vibrio cholerae; identical to SEQ ID NO: 2543

SEQ ID NO: 2987 - protein, 706 aa, Vibrio cholerae O1 biovar El Tor; identical to SEQ ID NO: 2566

SEQ ID NO: 2988 - protein, 244 aa, Vibrio cholerae O1 biovar El Tor; identical to SEQ ID NO: 2537

SEQ ID NO: 2989 - protein, 483 aa, Vibrio cholerae O1 biovar El Tor; identical to SEQ ID NO: 2538

SEQ ID NO: 2990 - protein, 1149 aa, Vibrio cholerae O1 biovar El Tor; identical to SEQ ID NO: 2547

SEQ ID NO: 2991 - protein, 706 aa, Vibrio cholerae O1 biovar El Tor; identical to SEQ ID NO: 2536

SEQ ID NO: 2992 - protein, 244 aa, Vibrio cholerae O1 biovar El Tor; identical to SEQ ID NO: 2537

SEQ ID NO: 2993 - protein, 483 aa, Vibrio cholerae O1 biovar El Tor; identical to SEQ ID NO: 2538

SEQ ID NO: 2994 - protein, 1149 aa, Vibrio cholerae O1 biovar El Tor; identical to SEQ ID NO: 2547

SEQ ID NO: 2995 - protein, 706 aa, Vibrio cholerae; identical to SEQ ID NO: 2536

SEQ ID NO: 2996 - protein, 244 aa, Vibrio cholerae; identical to SEQ ID NO: 2537

SEQ ID NO: 2997 - protein, 483 aa, Vibrio cholerae; identical to SEQ ID NO: 2538

SEQ ID NO: 2998 - protein, 1149 aa, Vibrio cholerae; identical to SEQ ID NO: 2547

SEQ ID NO: 2999 - protein, 687 aa, Vibrio cholerae; identical to SEQ ID NO: 2598

SEQ ID NO: 3000 - protein, 218 aa, Vibrio cholerae; identical to SEQ ID NO: 2647

SEQ ID NO: 3001 - protein, 483 aa, Vibrio cholerae; identical to SEQ ID NO: 2538

SEQ ID NO: 3002 - protein, 1149 aa, Vibrio cholerae; identical to SEQ ID NO: 2547

SEQ ID NO: 3003 - protein, 706 aa, Vibrio cholerae; identical to SEQ ID NO: 2536

SEQ ID NO: 3004 - protein, 244 aa, Vibrio cholerae; identical to SEQ ID NO: 2537

SEQ ID NO: 3005 - protein, 472 aa, Vibrio cholerae; identical to SEQ ID NO: 2656

SEQ ID NO: 3006 - protein, 1149 aa, Vibrio cholerae; identical to SEQ ID NO: 2547

SEQ ID NO: 3007 - protein, 706 aa, Vibrio cholerae; identical to SEQ ID NO: 2536

SEQ ID NO: 3008 - protein, 218 aa, Vibrio cholerae; identical to SEQ ID NO: 2647

SEQ ID NO: 3009 - protein, 472 aa, Vibrio cholerae; identical to SEQ ID NO: 2656

SEQ ID NO: 3010 - protein, 1149 aa, Vibrio cholerae; identical to SEQ ID NO: 2547

SEQ ID NO: 3011 - protein, 706 aa, Vibrio cholerae; identical to SEQ ID NO: 2536

SEQ ID NO: 3012 - protein, 244 aa, Vibrio cholerae; identical to SEQ ID NO: 2537

SEQ ID NO: 3013 - protein, 483 aa, Vibrio cholerae; identical to SEQ ID NO: 2538

SEQ ID NO: 3014 - protein, 1149 aa, Vibrio cholerae; identical to SEQ ID NO: 2547

SEQ ID NO: 3015 - protein, 244 aa, Vibrio cholerae; identical to SEQ ID NO: 2537

SEQ ID NO: 3016 - protein, 492 aa, Vibrio cholerae
  MOD_RES (115)..(130): Any amino acid
MSLNIKKLKVSLPANPFGQAIKDFAHLSSQLEVLSKSAGIENNKFRTAYGEVCNALASKKRVEDVIDSSVHVRALALSLHTDAKKNVSFTRRLLNKITEIVKKPSSLVIESFFQXXXXXXXXXXXXXXXXRLADLEATADWLLEAKRLRGNDEQFDENILSTNGPKWLAERAIQNNVDFDHLIAEMKLERYANGRYLTAAKGIYYIEQLNTIPLGQDHPLLEEVQKTVVFDSRYDSESLLGHQILRILIGRSIGSHISEPWMNVILAIGGDPRVPSSNPRYIKWWKSLEPNLVQAVLGWLSKLDLKLFLEALEDYSYSSANYELQRMYPSRKSFLEGMFDAGVISNTRLYLSLDAARYLKRNYDPKHLPNFSTVKDGDKSIIYVQMNGAHMVEGSHSCYLWLYRYLDPSVCVFNYNIDSPTYSQLTIGINNQMSRLSSGAVAKITHSPSGYAWQRKALIALRELGVKLTPKDVLSNEDYIDFKQRYGVREWS

SEQ ID NO: 3017 - protein, 650 aa, Vibrio cholerae
MALSAIEHIYQRQQISGETKKPALIVAPLSLLENWKDEVDKTFKHSPFKDVVILQSSAELNEYRMGGVEIRGQSASDDCLEPKYSLKVGKYFGPSRLDLPERLVITTYQTLRDYQFSMCLIDWGIVVFDEAQNIKNPNALQTRAAKGLKADFKLVATGTPVENSLADFWCLMDTACPGHLGSYQEFRARYISPILKAAGDEVEEIRARLGRELRIAVGALMLRRIKEDNLKGLPLKHMYAGGEFENWKYLEELKSTMVGYQRDVYEGAISHQLENEESHALTTLMRLRDSSLHPRLSDGGRLDIPKNAKSARALYGESGKLVSLLETLDRVRSKQEKCIIFAVNKRLQSFLSVTLGQIYNLGPLSVINGDAKAVAKRKSVPTRKSMISDFEAKEGFNLIVMSPVAAGVGLTVVGANHVVHLERYWNPAKEAQATDRVYRIGQEKEVHIYIPLLHHPEFESFDVNLHRLLTQKTLLKDAVVTPEDVIPQPAGVGGVVSGDLIDKRITAAELDKLSWQQFEALCVELLAKITDSESAWLTNNGADHGADGVLLNNSGNILLQAKFTQRQYDGYKGIQEIHSAKPIYESAMRSSFGRLIFVTNSPLLAKRTHEIAATCGIEVLGRTQLLTYLEEYDITLKDILSRLGKDRLRV

SEQ ID NO: 3018 - protein, 687 aa, Vibrio cholerae; identical to SEQ ID NO: 2602

SEQ ID NO: 3019 - protein, 244 aa, Vibrio cholerae; identical to SEQ ID NO: 2537

SEQ ID NO: 3020 - protein, 166 aa, Vibrio cholerae
MYPSRKSFLEGMFDAGVISNTRLYLSLDAARYLKRNYDPKHLPNFSTVKDGDKSIIYVQMNGAHMVEGSHSCYLWLYRYLDPSVCVFNYNIDSPTYSQLTIGINNQMSRLSSGAVAKITHSPSGYAWQRKALIALRELGVKLTPKDVLSNEDYIDFKQRYGVREWS

SEQ ID NO: 3021 - protein, 1149 aa, Vibrio cholerae; identical to SEQ ID NO: 2547

SEQ ID NO: 3022 - protein, 687 aa, Vibrio cholerae; identical to SEQ ID NO: 2598

SEQ ID NO: 3023 - protein, 244 aa, Vibrio cholerae; identical to SEQ ID NO: 2537

SEQ ID NO: 3024 - protein, 483 aa, Vibrio cholerae; identical to SEQ ID NO: 2538

SEQ ID NO: 3025 - protein, 1149 aa, Vibrio cholerae; identical to SEQ ID NO: 2547

SEQ ID NO: 3026 - protein, 687 aa, Vibrio cholerae; identical to SEQ ID NO: 2598

SEQ ID NO: 3027 - protein, 244 aa, Vibrio cholerae; identical to SEQ ID NO: 2537

SEQ ID NO: 3028 - protein, 483 aa, Vibrio cholerae; identical to SEQ ID NO: 2538

SEQ ID NO: 3029 - protein, 1149 aa, Vibrio cholerae; identical to SEQ ID NO: 2547

SEQ ID NO: 3030 - protein, 687 aa, Vibrio cholerae; identical to SEQ ID NO: 2602

SEQ ID NO: 3031 - protein, 244 aa, Vibrio cholerae; identical to SEQ ID NO: 2537

SEQ ID NO: 3032 - protein, 483 aa, Vibrio cholerae; identical to SEQ ID NO: 2538

SEQ ID NO: 3033 - protein, 1149 aa, Vibrio cholerae; identical to SEQ ID NO: 2547

SEQ ID NO: 3034 - protein, 584 aa, Vibrio cholerae
  MOD_RES (544)..(558): Any amino acid
MPPQTPEQLSALFVVILWGVALFFLIWSVAAFIRARQRVVWLNKSLDDAEKSTLSGVRNDLISRAEQKKDSVGHLWLEFDETLLEVKGADDVVRLHNTFDADYFFNSSSLAGGSTENRMIAVVPGFLTALGVIGTFVGLQLGLSDLNIAGNVDVNEMKNGVAGVINGAKIAFMTSVWGVLLSVAFNFIEKILEQIIRKKIKSLQNRIDRMFPRLSAEYQLQSIANNSQQSRESLQGLAEKIGEKMQESLIQATQGIQQGLESSLEKIMAPAINKLVDETSDGNQKALESVLQSFMEGFGQQGEQQRVAMDSASQNVNKTLESMSVSMAAFVNKLEVQQNASSEREKELISTISVQVSELVTQGNEQKRVLTEFVEKQVSELGEQLTKRELAASEREQKLASSMESTIKDLVENVSAQSQVLTDFVQNQVVQLTQTFSERDGMASQMEKERNDIFVNQTQAMKAGTDELLAQVKAATESQQITTNSIIEQGKQLQNSIDSSVSASARATESMQQSANELRVAADSMNVFGSNIKDAGNKLSGAVXXXXXXXXXXXXXXXEGFSGTKPSRRSESSSVEGAVAGRYK

SEQ ID NO: 3035 - protein, 244 aa, Vibrio cholerae; identical to SEQ ID NO: 2537

SEQ ID NO: 3036 - protein, 483 aa, Vibrio cholerae; identical to SEQ ID NO: 2538

SEQ ID NO: 3037 - protein, 1149 aa, Vibrio cholerae; identical to SEQ ID NO: 2547

SEQ ID NO: 3038 - protein, 687 aa, Vibrio cholerae; identical to SEQ ID NO: 2598

SEQ ID NO: 3039 - protein, 244 aa, Vibrio cholerae; identical to SEQ ID NO: 2537

SEQ ID NO: 3040 - protein, 483 aa, Vibrio cholerae; identical to SEQ ID NO: 2542

SEQ ID NO: 3041 - protein, 1146 aa, Vibrio cholerae; identical to SEQ ID NO: 2543

SEQ ID NO: 3042 - protein, 683 aa, Vibrio cholerae
  MOD_RES (664)..(674): Any amino acid
MTDSLNLSSLWPDLSSLNVMPPQTPEQLSALFVVILWGVALFFLIWSVAAFIRARQRVVWLNKSLDDAEKSTLSGVRNDLISRAEQKKDSVGHLWLEFDETLLEVKGADDVVRLHNTFDADYFFNSSSLAGGSTENRMIAVVPGFLTALGVIGTFVGLQLGLSDLNIAGNVDVNEMKNGVAGVINGAKIAFMTSVWGVLLSVAFNFIEKILEQIIRKKIKSLQNRIDRMFPRLSAEYQLQSIANNSQQSRESLQGLAEKIGEKMQESLIQATQGIQQGLESSLEKIMAPAINKLVDETSDGNQKALESVLQSFMEGFGQQGEQQRVAMDSASQNVNKTLESMSVSMAAFVNKLEVQQNASSEREKELISTISVQVSELVTQGNEQKRVLTEFVEKQVSELGEQLTKRELAASEREQKLASSMESTIKDLVENVSAQSQVLTDFVQNQVVQLTQTFSERDGMASQMEKERNDIFVNQTQAMKAGTDELLAQVKAATESQQITTNSIIEQGKQLQNSIDSSVSASARATESMQQSANELRVAADSMNVFGSNIKDAGNKLSGAVTEAVNSTKDLAEQNHLGAVKVQALREQLLEDTSKFSAIADQINNMLISAEQSFSTLRTTQNEFLAEQKGNLNELTSEMKRNVKELTEQMAQLLEDYAEQANXXXXXXXXXXXRRAPQSLGQ

SEQ ID NO: 3043 - protein, 244 aa, Vibrio cholerae; identical to SEQ ID NO: 2537

SEQ ID NO: 3044 - protein, 166 aa, Vibrio cholerae; identical to SEQ ID NO: 3020

SEQ ID NO: 3045 - protein, 657 aa, Vibrio cholerae
MGLGKTFMALSAIEHIYQRQQISGETKKPALIVAPLSLLENWKDEVDKTFKHSPFKDVVILQSSAELNEYRMGGVEIRGQSASDDCLEPKYSLKVGKYFGPSRLDLPERLVITTYQTLRDYQFSMCLIDWGIVVFDEAQNIKNPNALQTRAAKGLKADFKLVATGTPVENSLADFWCLMDTACPGHLGSYQEFRARYISPILKAAGDEVEEIRARLGRELRIAVGALMLRRIKEDNLKGLPLKHMYAGGEFENWKYLEELKSTMVGYQRDVYEGAISHQLENEESHALTTLMRLRDSSLHPRLSDGGRLDIPKNAKSARALYGESGKLVSLLETLDRVRSKQEKCIIFAVNKRLQSFLSVTLGQIYNLGPLSVINGDAKAVAKRKSVPTRKSMISDFEAKEGFNLIVMSPVAAGVGLTVVGANHVVHLERYWNPAKEAQATDRVYRIGQEKEVHIYIPLLHHPEFESFDVNLHRLLTQKTLLKDAVVTPEDVIPQPAGVGGVVSGDLIDKRITAAELDKLSWQQFEALCVELLAKITDSESAWLTNNGADHGADGVLLNNSGNILLQAKFTQRQYDGYKGIQEIHSAKPIYESAMRSSFGRLIFVTNSPLLAKRTHEIAATCGIEVLGRTQLLTYLEEYDITLKDILSRLGKDRLRV

SEQ ID NO: 3046 - protein, 706 aa, Vibrio cholerae; identical to SEQ ID NO: 2536

SEQ ID NO: 3047 - protein, 244 aa, Vibrio cholerae; identical to SEQ ID NO: 2537

SEQ ID NO: 3048 - protein, 483 aa, Vibrio cholerae; identical to SEQ ID NO: 2538

SEQ ID NO: 3049 - protein, 1149 aa, Vibrio cholerae; identical to SEQ ID NO: 2547

SEQ ID NO: 3050 - protein, 687 aa, Vibrio cholerae; identical to SEQ ID NO: 2598

SEQ ID NO: 3051 - protein, 244 aa, Vibrio cholerae; identical to SEQ ID NO: 2537

SEQ ID NO: 3052 - protein, 483 aa, Vibrio cholerae; identical to SEQ ID NO: 2538

SEQ ID NO: 3053 - protein, 1149 aa, Vibrio cholerae; identical to SEQ ID NO: 2547

SEQ ID NO: 3054 - protein, 687 aa, Vibrio cholerae; identical to SEQ ID NO: 2602

SEQ ID NO: 3055 - protein, 244 aa, Vibrio cholerae; identical to SEQ ID NO: 2537

SEQ ID NO: 3056 - protein, 483 aa, Vibrio cholerae; identical to SEQ ID NO: 2538

SEQ ID NO: 3057 - protein, 1149 aa, Vibrio cholerae; identical to SEQ ID NO: 2547

SEQ ID NO: 3058 - protein, 706 aa, Vibrio cholerae; identical to SEQ ID NO: 2686

SEQ ID NO: 3059 - protein, 244 aa, Vibrio cholerae; identical to SEQ ID NO: 2537

SEQ ID NO: 3060 - protein, 265 aa, Vibrio cholerae; identical to SEQ ID NO: 2768

SEQ ID NO: 3061 - protein, 706 aa, Vibrio cholerae; identical to SEQ ID NO: 2536

SEQ ID NO: 3062 - protein, 244 aa, Vibrio cholerae; identical to SEQ ID NO: 2537

SEQ ID NO: 3063 - protein, 483 aa, Vibrio cholerae; identical to SEQ ID NO: 2538

SEQ ID NO: 3064 - protein, 1149 aa, Vibrio cholerae; identical to SEQ ID NO: 2547

SEQ ID NO: 3065 - protein, 687 aa, Vibrio cholerae; identical to SEQ ID NO: 2598

SEQ ID NO: 3066 - protein, 244 aa, Vibrio cholerae; identical to SEQ ID NO: 2537

SEQ ID NO: 3067 - protein, 483 aa, Vibrio cholerae; identical to SEQ ID NO: 2542

SEQ ID NO: 3068 - protein, 1146 aa, Vibrio cholerae; identical to SEQ ID NO: 2543

SEQ ID NO: 3069 - protein, 687 aa, Vibrio cholerae; identical to SEQ ID NO: 2598

SEQ ID NO: 3070 - protein, 244 aa, Vibrio cholerae; identical to SEQ ID NO: 2537

SEQ ID NO: 3071 - protein, 483 aa, Vibrio cholerae; identical to SEQ ID NO: 2538

SEQ ID NO: 3072 - protein, 1149 aa, Vibrio cholerae; identical to SEQ ID NO: 2547

SEQ ID NO: 3073 - protein, 687 aa, Vibrio cholerae; identical to SEQ ID NO: 2598

SEQ ID NO: 3074 - protein, 244 aa, Vibrio cholerae; identical to SEQ ID NO: 2537

SEQ ID NO: 3075 - protein, 483 aa, Vibrio cholerae; identical to SEQ ID NO: 2538

SEQ ID NO: 3076 - protein, 1149 aa, Vibrio cholerae; identical to SEQ ID NO: 2547

SEQ ID NO: 3077 - protein, 521 aa, Vibrio cholerae
MPPQTPEQLSALFVVILWGVALFFLIWSVAAFIRARQRVVWLNKSLDDAEKSTLSGVRNDLISRAEQKKDSVGHLWLEFDETLLEVKGADDVVRLHNTFDADYFFNSSSLAGGSTENRMIAVVPGFLTALGVIGTFVGLQLGLSDLNIAGNVDVNEMKNGVAGVINGAKIAFMTSVWGVLLSVAFNFIEKILEQIIRKKIKSLQNRIDRMFPRLSAEYQLQSIANNSQQSRESLQGLAEKIGEKMQESLIQATQGIQQGLESSLEKIMAPAINKLVDETSDGNQKALESVLQSFMEGFGQQGEQQRVAMDSASQNVNKTLESMSVSMAAFVNKLEVQQNASSEREKELISTISVQVSELVTQGNEQKRVLTEFVEKQVSELGEQLTKRELAASEREQKLASSMESTIKDLVENVSAQSQVLTDFVQNQVVQLTQTFSERDGMASQMEKERNDIFVNQTQAMKAGTDELLAQVKAATESQLIVLLSKVNNYKIVSIPLFRHLLELRRVCSSRRMSYELPLIV

SEQ ID NO: 3078 - protein, 244 aa, Vibrio cholerae; identical to SEQ ID NO: 2537

SEQ ID NO: 3079 - protein, 174 aa, Vibrio cholerae
  MOD_RES (5)..(15): Any amino acid
MYPSXXXXXXXXXXXFLEGMFDAGVISNTRLYLSLDAARYLKRNYDPKHLPNFSTVKDGDKSIIYVQMNGAHMVEGSHSCYLWLYRYLDPSVCVFNYNIDSPTYSQLTIGINNQMSRLSSGAVAKITHSPSGYAWQRKALIALRELGVKLTPKDVLSNEDYIDFKQRYGVREWS

SEQ ID NO: 3080 - protein, 1149 aa, Vibrio cholerae; identical to SEQ ID NO: 2547

SEQ ID NO: 3081 - protein, 687 aa, Vibrio cholerae
MPPQTPEQLSALFVVILWGVALFFLIWSVAAFIRARQRVVWLNKSLDDAEKSTLSGVRNDLISRAEQKKDSVGHLWLEFDETLLEVKGADDVVRLHNTFDADYFFNSSSLAGGSTENRMIAVVPGFLTALGVIGTFVGLQLGLSDLNIAGNVDVNEMKNGVAGVINGAKIAFMTSVWGVLLSVAFNFIEKILEQIIRKKIKSLQNRIDRMFPRLSAEYQLQSIANNSQQSRESLQGLAEKIGEKMQESLIQATQGIQQGLESSLEKIMAPAINKLVDETSDGNQKALESVLQSFMEGFGQQGEQQRVAMDSASQNVNKTLESMSVLMAAFVNKLEVQQNASSEREKELISTISVQVSELVTQGNEQKRVLTEFVEKQVSELGEQLTKRELAASEREQKLASSMESTIKDLVENVSAQSQVLTDFVQNQVVQLTQTFSERDGMASQMEKERNDIFVNQTQAMKAGTDELLAQVKAATESQQITTNSIIEQGKQLQNSIDSSVSASARATESMQQSANELRVAADSMNVFGSNIKDAGNKLSGAVTEAVNSTKDLAEQNHLGAVKVQALREQLLEDTSKFSAIADQINNMLISAEQSFSTLRTTQNEFLAEQKGNLNELTSEMKRNVKELTEQMAQLLEDYAEQANGQTAEHLKVWANSSTQYAESMNTAVRAISSVVDEIQDKVSQHA

SEQ ID NO: 3082 - protein, 244 aa, Vibrio cholerae; identical to SEQ ID NO: 2537

SEQ ID NO: 3083 - protein, 307 aa, Vibrio cholerae
MKLERYANGRYLTAAKGIYYIEQLNTIPLGQDHPLLEEVQKTVVFDSRYDSESLLGHQILRILIGRSIGSHISEPWMNVILAIGGDPRVPSSNPRYIKWWKSLEPNLVQAVLGWLSKLDLKLFLEALEDYSYSSANYELQRMYPSRKSFLEGMFDAGVISNTRLYLSLDAARYLKRNYDPKHLPNFSTVKDGDKSIIYVQMNGAHMVEGSHSCYLWLYRYLDPSVCVFNYNIDSPTYSQLTIGINNQMSRLSSGAVAKITHSPSGYAWQRKALIALRELGVKLTPKDVLSNEDYIDFKQRYGVREWS

SEQ ID NO: 3084 - protein, 1149 aa, Vibrio cholerae; identical to SEQ ID NO: 2547

SEQ ID NO: 3085 - protein, 687 aa, Vibrio cholerae; identical to SEQ ID NO: 2598

SEQ ID NO: 3086 - protein, 244 aa, Vibrio cholerae; identical to SEQ ID NO: 2537

SEQ ID NO: 3087 - protein, 483 aa, Vibrio cholerae; identical to SEQ ID NO: 2538

SEQ ID NO: 3088 - protein, 1149 aa, Vibrio cholerae; identical to SEQ ID NO: 2547

SEQ ID NO: 3089 - protein, 706 aa, Vibrio cholerae; identical to SEQ ID NO: 2686

SEQ ID NO: 3090 - protein, 244 aa, Vibrio cholerae; identical to SEQ ID NO: 2537

SEQ ID NO: 3091 - protein, 93 aa, Vibrio cholerae
MWLYRYLDPSVCVFNYNIDSPTYSQLTIGINNQMSRLSSGAVAKITHSPSGYAWQRKALIALRELGVKLTPKDVLSNEDYIDFKQRYGVREWS

SEQ ID NO: 3092 - protein, 565 aa, Vibrio cholerae
MKVGKYFGPSRLDLPERLVITTYQTLRDYQFSMCLIDWGIVVFDEAQNIKNPNALQTRAAKGLKADFKLVATGTPVENSLADFWCLMDTACPGHLGSYQEFRARYISPILKAAGDEVEEIRARLGRELRIAVGALMLRRIKEDNLKGLPLKHMYAGGEFENWKYLEELKSTMVGYQRDVYEGAISHQLENEESHALTTLMRLRDSSLHPRLSDGGRLDIPKNAKSARALYGESGKLVSLLETLDRVRSKQEKCIIFAVNKRLQSFLSVTLGQIYNLGPLSVINGDAKAVAKRKSVPTRKSMISDFEAKEGFNLIVMSPVAAGVGLTVVGANHVVHLERYWNPAKEAQATDRVYRIGQEKEVHIYIPLLHHPEFESFDVNLHRLLTQKTLLKDAVVTPEDVIPQPAGVGGVVSGDLIDKRITAAELDKLSWQQFEALCVELLAKITDSESAWLTNNGADHGADGVLLNNSGNILLQAKFTQRQYDGYKGIQEIHSAKPIYESAMRSSFGRLIFVTNSPLLAKRTHEIAATCGIEVLGRTQLLTYLEEYDITLKDILSRLGKDRLRV

SEQ ID NO: 3093 - protein, 687 aa, Vibrio cholerae; identical to SEQ ID NO: 2598

SEQ ID NO: 3094 - protein, 244 aa, Vibrio cholerae; identical to SEQ ID NO: 2537

SEQ ID NO: 3095 - protein, 483 aa, Vibrio cholerae; identical to SEQ ID NO: 2538

SEQ ID NO: 3096 - protein, 1149 aa, Vibrio cholerae; identical to SEQ ID NO: 2547

SEQ ID NO: 3097 - protein, 687 aa, Vibrio cholerae; identical to SEQ ID NO: 2598

SEQ ID NO: 3098 - protein, 244 aa, Vibrio cholerae; identical to SEQ ID NO: 2537

SEQ ID NO: 3099 - protein, 483 aa, Vibrio cholerae; identical to SEQ ID NO: 2538

SEQ ID NO: 3100 - protein, 1149 aa, Vibrio cholerae; identical to SEQ ID NO: 2547

SEQ ID NO: 3101 - protein, 687 aa, Vibrio cholerae; identical to SEQ ID NO: 2598

SEQ ID NO: 3102 - protein, 244 aa, Vibrio cholerae; identical to SEQ ID NO: 2537

SEQ ID NO: 3103 - protein, 483 aa, Vibrio cholerae; identical to SEQ ID NO: 2538

SEQ ID NO: 3104 - protein, 687 aa, Vibrio cholerae; identical to SEQ ID NO: 2598

SEQ ID NO: 3105 - protein, 244 aa, Vibrio cholerae; identical to SEQ ID NO: 2537

SEQ ID NO: 3106 - protein, 483 aa, Vibrio cholerae; identical to SEQ ID NO: 2538

SEQ ID NO: 3107 - protein, 1149 aa, Vibrio cholerae; identical to SEQ ID NO: 2547

SEQ ID NO: 3108 - protein, 687 aa, Vibrio cholerae; identical to SEQ ID NO: 2602

SEQ ID NO: 3109 - protein, 244 aa, Vibrio cholerae; identical to SEQ ID NO: 2537

SEQ ID NO: 3110 - protein, 1149 aa, Vibrio cholerae; identical to SEQ ID NO: 2547

SEQ ID NO: 3111 - protein, 687 aa, Vibrio cholerae; identical to SEQ ID NO: 2598

SEQ ID NO: 3112 - protein, 244 aa, Vibrio cholerae; identical to SEQ ID NO: 2537

SEQ ID NO: 3113 - protein, 483 aa, Vibrio cholerae; identical to SEQ ID NO: 2538

SEQ ID NO: 3114 - protein, 1149 aa, Vibrio cholerae; identical to SEQ ID NO: 2547

SEQ ID NO: 3115 - protein, 687 aa, Vibrio cholerae; identical to SEQ ID NO: 2602

SEQ ID NO: 3116 - protein, 244 aa, Vibrio cholerae; identical to SEQ ID NO: 2537

SEQ ID NO: 3117 - protein, 483 aa, Vibrio cholerae; identical to SEQ ID NO: 2538

SEQ ID NO: 3118 - protein, 1149 aa, Vibrio cholerae; identical to SEQ ID NO: 2547

SEQ ID NO: 3119 - protein, 687 aa, Vibrio cholerae; identical to SEQ ID NO: 2602

SEQ ID NO: 3120 - protein, 244 aa, Vibrio cholerae; identical to SEQ ID NO: 2537

SEQ ID NO: 3121 - protein, 483 aa, Vibrio cholerae; identical to SEQ ID NO: 2538

SEQ ID NO: 3122 - protein, 1149 aa, Vibrio cholerae; identical to SEQ ID NO: 2547

SEQ ID NO: 3123 - protein, 687 aa, Vibrio cholerae; identical to SEQ ID NO: 2598

SEQ ID NO: 3124 - protein, 244 aa, Vibrio cholerae; identical to SEQ ID NO: 2537

SEQ ID NO: 3125 - protein, 265 aa, Vibrio cholerae; identical to SEQ ID NO: 2768

SEQ ID NO: 3126 - protein, 1151 aa, Vibrio cholerae
  MOD_RES (196)..(207): Any amino acid
MELTSLISKFFSSSDKTSQFELICDDSLDFATSRKTLEKIKADEWITAQYVALKMLEEQGDVSSFPDGFIMPADTAVRLDSELRDLFSLPPVWKGVIDADIQGKASTPTFKIDLSVTTKQGRTTLNYTVDGPFIRFSQNEQYLLTPEQLMVFIAHKTHVRSDRSEYDNLLYLHSLQEAQKNGCKLNLKHFERLRIXXXXXXXXXXXXVEAELNSQGELILTPNMGQSASHESIQKVLGQLQSDNAVTLKVGDEIVLFSEEKLMAVKEVISNRVIPQQQVKAFLENPTAYIDASLVDLDLGFSIRVHGATVFKHAYFGETDESGIDWFGASPTSDLINPISKLTDRVRDKTTLEDVAKKIEDARQTGATVFDYEGQSYDISDPAAVEKVLNEIGHKISSPNTDLSSYGEAEDAETESEGSEIHVVDIDLNDEELSENSPKVEQLISDISWDGELNWENHKRTPFPHQDIGVRWILGVEQKSLSDSKVSGALLADDMGLGKTFMALSAIEHIYQRQQISGETKKPALIVAPLSLLENWKDEVDKTFKHSPFKDVVILQSSAELNEYRMGGVEIRGQSASDDCLEPKYSLKVGKYFGPSRLDLPERLVITTYQTLRDYQFSMCLIDWGIVVFDEAQNIKNPNALQTRAAKGLKADFKLVATGTPVENSLADFWCLMDTACPGHLGSYQEFRARYISPILKAAGDEVEEIRARLGRELRIAVGALMLRRIKEDNLKGLPLKHMYAGGEFENWKYLEELKSTMVGYQRDVYEGAISHQLENEESHALTTLMRLRDSSLHPRLSDGGRLDIPKNAKSARALYGESGKLVSLLETLDRVRSKQEKCIIFAVNKRLQSFLSVTLGQIYNLGPLSVINGDAKAVAKRKSVPTRKSMISDFEAKEGFNLIVMSPVAAGVGLTVVGANHVVHLERYWNPAKEAQATDRVYRIGQEKEVHIYIPLLHHPEFESFDVNLHRLLTQKTLLKDAVVTPEDVIPQPAGVGGVVSGDLIDKRITAAELDKLSWQQFEALCVELLAKITDSESAWLTNNGADHGADGVLLNNSGNILLQAKFTQRQYDGYKGIQEIHSAKPIYESAMRSSFGRLIFVTNSPLLAKRTHEIAATCGIEVLGRTQLLTYLEEYDITLKDILSRLGKDRLRV

SEQ ID NO: 3127 - protein, 706 aa, Vibrio cholerae; identical to SEQ ID NO: 2536

SEQ ID NO: 3128 - protein, 244 aa, Vibrio cholerae; identical to SEQ ID NO: 2537

SEQ ID NO: 3129 - protein, 166 aa, Vibrio cholerae; identical to SEQ ID NO: 3020

SEQ ID NO: 3130 - protein, 421 aa, Vibrio cholerae
  MOD_RES (406)..(420): Any amino acid
MALSAIEHIYQRQQISGETKKPALIVAPLSLLENWKDEVDKTFKHSPFKDVVILQSSAELNEYRMGGVEIRGQSASDDCLEPKYSLKVGKYFGPSRLDLPERLVITTYQTLRDYQFSMCLIDWGIVVFDEAQNIKNPNALQTRAAKGLKADFKLVATGTPVENSLADFWCLMDTACPGHLGSYQEFRARYISPILKAAGDEVEEIRARLGRELRIAVGALMLRRIKEDNLKGLPLKHMYAGGEFENWKYLEELKSTMVGYQRDVYEGAISHQLENEESHALTTLMRLRDSSLHPRLSDGGRLDIPKNAKSARALYGESGKLVSLLETLDRVRSKQEKCIIFAVNKRLQSFLSVTLGQIYNLGPLSVINGDAKAVAKRKSVPTRKSMISDFEAKEGFNLIVMSPVAXXXXXXXXXXXXXXXV

SEQ ID NO: 3131 - protein, 244 aa, Vibrio cholerae; identical to SEQ ID NO: 2537

SEQ ID NO: 3132 - protein, 333 aa, Vibrio cholerae
MSTNGPKWLAERAIQNNVDFDHLIAEMKLERYANGRYLTAAKGIYYIEQLNTIPLGQDHPLLEEVQKTVVFDSRYDSESLLGHQILRILIGRSIGSHISEPWMNVILAIGGDPRVPSSNPRYIKWWKSLEPNLVQAVLGWLSKLDLKLFLEALEDYSYSSANYELQRMYPSRKSFLEGMFDAGVISNTRLYLSLDAARYLKRNYDPKHLPNFSTVKDGDKSIIYVQMNGAHMVEGSHSCYLWLYRYLDPSVCVFNYNIDSPTYSQLTIGINNQMSRLSSGAVAKITHSPSGYAWQRKALIALRELGVKLTPKDVLSNEDYIDFKQRYGVREWS

SEQ ID NO: 3133 - protein, 650 aa, Vibrio cholerae; identical to SEQ ID NO: 3017

SEQ ID NO: 3134 - protein, 687 aa, Vibrio cholerae; identical to SEQ ID NO: 3081

SEQ ID NO: 3135 - protein, 244 aa, Vibrio cholerae; identical to SEQ ID NO: 2537

SEQ ID NO: 3136 - protein, 483 aa, Vibrio cholerae; identical to SEQ ID NO: 2538

SEQ ID NO: 3137 - protein, 1149 aa, Vibrio cholerae; identical to SEQ ID NO: 2547

SEQ ID NO: 3138 - protein, 687 aa, Vibrio cholerae
MPPQTPEQLSALFVVILWGVALFFLIWSVAAFIRARQRVVWLNKSLDDAEKSTLSGVRNDLISRAEQKKDSVGHLWLEFDETLLEVKGADDVVRLHNTFDADYFFNSSSLAGGSTENRMIAVVPGFLTALGVIGTFVGLQLGLSDLNIAGNVDVNEMKNGVAGVINGAKIAFMTSVWGVLLSVAFNFIEKILEQIIRKKIKSLQNRIDRMFPRLSAEYQLQSIANNSQQSRESLQGLAEKIGEKMQESLIQATQGIQQGLESSLEKIMAPAINKLVDETSNGNQKALESVLQSFMEGFGQQGEQQRVAMDSASQNVNKTLESMSVSMAAFVNKLEVQQNASSEREKELISTISVQVSELVTQGNEQKRVLTEFVEKQVSELGEQLTKRELAASEREQKLASSMESTIKDLVENVSAQSQVLTDFVQNQVVQLTQTFSERDGMASQMEKERNDIFVNQTQAMKAGTDELLAQVKAATESQQITTNSIIEQGKQLQNSIDSSVSASARATESMQQSANELRVAADSMNVFGSNIKDAGNKLSGAVTEAVNSTKDLAEQNHLGAVKVQALREQLLEDTSKFSAIADQINNMLISAEQSFSTLRTTQNEFLAEQKGNLNELTSEMKRNVKELTEQMAQLLEDYAEQANGQTAEHLKVWANSSTQYAESMNTAVRAISSVVDEIQDKVSQHA

SEQ ID NO: 3139 - protein, 244 aa, Vibrio cholerae; identical to SEQ ID NO: 2537

SEQ ID NO: 3140 - protein, 483 aa, Vibrio cholerae; identical to SEQ ID NO: 2542

SEQ ID NO: 3141 - protein, 1146 aa, Vibrio cholerae; identical to SEQ ID NO: 2543

SEQ ID NO: 3142 - protein, 244 aa, Vibrio cholerae; identical to SEQ ID NO: 2537

SEQ ID NO: 3143 - protein, 483 aa, Vibrio cholerae; identical to SEQ ID NO: 2538

SEQ ID NO: 3144 - protein, 902 aa, Vibrio cholerae
MGDEIVLFSEEKLMAVKEVISNRVIPQQQVKAFLENPTAYIDASLVDLDLGFSIRVHGATVFKHAYFGETDESGIDWFGASPTSDLINPISKLTDRVRDKTTLEDVAKKIEDARQTGATVFDYEGQSYDISDPAAVEKVLNEIGHKISSPNTDLSSYGEAEDAETESEGSEIHVVDIDLNDEELSENSPKVEQLISDISWDGELNWENHKRTPFPHQDIGVRWILGVEQKSLSDSKVSGALLADDMGLGKTFMALSAIEHIYQRQQISGETKKPALIVAPLSLLENWKDEVDKTFKHSPFKDVVILQSSAELNEYRMGGVEIRGQSASDDCLEPKYSLKVGKYFGPSRLDLPERLVITTYQTLRDYQFSMCLIDWGIVVFDEAQNIKNPNALQTRAAKGLKADFKLVATGTPVENSLADFWCLMDTACPGHLGSYQEFRARYISPILKAAGDEVEEIRARLGRELRIAVGALMLRRIKEDNLKGLPLKHMYAGGEFENWKYLEELKSTMVGYQRDVYEGAISHQLENEESHALTTLMRLRDSSLHPRLSDGGRLDIPKNAKSARALYGESGKLVSLLETLDRVRSKQEKCIIFAVNKRLQSFLSVTLGQIYNLGPLSVINGDAKAVAKRKSVPTRKSMISDFEAKEGFNLIVMSPVAAGVGLTVVGANHVVHLERYWNPAKEAQATDRVYRIGQEKEVHIYIPLLHHPEFESFDVNLHRLLTQKTLLKDAVVTPEDVIPQPAGVGGVVSGDLIDKRITAAELDKLSWQQFEALCVELLAKITDSESAWLTNNGADHGADGVLLNNSGNILLQAKFTQRQYDGYKGIQEIHSAKPIYESAMRSSFGRLIFVTNSPLLAKRTHEIAATCGIEVLGRTQLLTYLEEYDITLKDILSRLGKDRLRV

SEQ ID NO: 3145 - protein, 687 aa, Vibrio cholerae; identical to SEQ ID NO: 3081

SEQ ID NO: 3146 - protein, 244 aa, Vibrio cholerae; identical to SEQ ID NO: 2537

SEQ ID NO: 3147 - protein, 483 aa, Vibrio cholerae; identical to SEQ ID NO: 2538

SEQ ID NO: 3148 - protein, 1149 aa, Vibrio cholerae; identical to SEQ ID NO: 2547

SEQ ID NO: 3149 - protein, 706 aa, Vibrio cholerae; identical to SEQ ID NO: 2686

SEQ ID NO: 3150 - protein, 244 aa, Vibrio cholerae; identical to SEQ ID NO: 2537

SEQ ID NO: 3151 - protein, 265 aa, Vibrio cholerae; identical to SEQ ID NO: 2768

SEQ ID NO: 3152 - protein, 327 aa, Vibrio cholerae
MLETLDRVRSKQEKCIIFAVNKRLQSFLSVTLGQIYNLGPLSVINGDAKAVAKRKSVPTRKSMISDFEAKEGFNLIVMSPVAAGVGLTVVGANHVVHLERYWNPAKEAQATDRVYRIGQEKEVHIYIPLLHHPEFESFDVNLHRLLTQKTLLKDAVVTPEDVIPQPAGVGGVVSGDLIDKRITAAELDKLSWQQFEALCVELLAKITDSESAWLTNNGADHGADGVLLNNSGNILLQAKFTQRQYDGYKGIQEIHSAKPIYESAMRSSFGRLIFVTNSPLLAKRTHEIAATCGIEVLGRTQLLTYLEEYDITLKDILSRLGKDRLRV

SEQ ID NO: 3153 - protein, 687 aa, Vibrio cholerae; identical to SEQ ID NO: 2598

SEQ ID NO: 3154 - protein, 244 aa, Vibrio cholerae; identical to SEQ ID NO: 2537

SEQ ID NO: 3155 - protein, 483 aa, Vibrio cholerae; identical to SEQ ID NO: 2538

SEQ ID NO: 3156 - protein, 1149 aa, Vibrio cholerae; identical to SEQ ID NO: 2547

SEQ ID NO: 3157 - protein, 687 aa, Vibrio cholerae; identical to SEQ ID NO: 2598

SEQ ID NO: 3158 - protein, 244 aa, Vibrio cholerae; identical to SEQ ID NO: 2537

SEQ ID NO: 3159 - protein, 483 aa, Vibrio cholerae; identical to SEQ ID NO: 2538

SEQ ID NO: 3160 - protein, 1149 aa, Vibrio cholerae; identical to SEQ ID NO: 2547

SEQ ID NO: 3161 - protein, 687 aa, Vibrio cholerae; identical to SEQ ID NO: 2598

SEQ ID NO: 3162 - protein, 244 aa, Vibrio cholerae; identical to SEQ ID NO: 2537

SEQ ID NO: 3163 - protein, 483 aa, Vibrio cholerae; identical to SEQ ID NO: 2538

SEQ ID NO: 3164 - protein, 1149 aa, Vibrio cholerae; identical to SEQ ID NO: 2547

SEQ ID NO: 3165 - protein, 687 aa, Vibrio cholerae; identical to SEQ ID NO: 2598

SEQ ID NO: 3166 - protein, 244 aa, Vibrio cholerae; identical to SEQ ID NO: 2537

SEQ ID NO: 3167 - protein, 483 aa, Vibrio cholerae; identical to SEQ ID NO: 2538

SEQ ID NO: 3168 - protein, 1149 aa, Vibrio cholerae; identical to SEQ ID NO: 2547

SEQ ID NO: 3169 - protein, 687 aa, Vibrio cholerae; identical to SEQ ID NO: 3081

SEQ ID NO: 3170 - protein, 244 aa, Vibrio cholerae; identical to SEQ ID NO: 2537

SEQ ID NO: 3171 - protein, 483 aa, Vibrio cholerae; identical to SEQ ID NO: 2538

SEQ ID NO: 3172 - protein, 1149 aa, Vibrio cholerae; identical to SEQ ID NO: 2547

SEQ ID NO: 3173 - protein, 687 aa, Vibrio cholerae; identical to SEQ ID NO: 2598

SEQ ID NO: 3174 - protein, 244 aa, Vibrio cholerae; identical to SEQ ID NO: 2537

SEQ ID NO: 3175 - protein, 483 aa, Vibrio cholerae; identical to SEQ ID NO: 2538

SEQ ID NO: 3176 - protein, 1149 aa, Vibrio cholerae; identical to SEQ ID NO: 2547

SEQ ID NO: 3177 - protein, 687 aa, Vibrio cholerae; identical to SEQ ID NO: 2598

SEQ ID NO: 3178 - protein, 244 aa, Vibrio cholerae; identical to SEQ ID NO: 2537

SEQ ID NO: 3179 - protein, 483 aa, Vibrio cholerae; identical to SEQ ID NO: 2538

SEQ ID NO: 3180 - protein, 1149 aa, Vibrio cholerae; identical to SEQ ID NO: 2547

SEQ ID NO: 3181 - protein, 687 aa, Vibrio cholerae; identical to SEQ ID NO: 2598

SEQ ID NO: 3182 - protein, 244 aa, Vibrio cholerae; identical to SEQ ID NO: 2537

SEQ ID NO: 3183 - protein, 483 aa, Vibrio cholerae; identical to SEQ ID NO: 2538

SEQ ID NO: 3184 - protein, 1149 aa, Vibrio cholerae; identical to SEQ ID NO: 2547

SEQ ID NO: 3185 - protein, 687 aa, Vibrio cholerae; identical to SEQ ID NO: 2598

SEQ ID NO: 3186 - protein, 244 aa, Vibrio cholerae; identical to SEQ ID NO: 2537

SEQ ID NO: 3187 - protein, 483 aa, Vibrio cholerae; identical to SEQ ID NO: 2538

SEQ ID NO: 3188 - protein, 1149 aa, Vibrio cholerae; identical to SEQ ID NO: 2547

SEQ ID NO: 3189 - protein, 687 aa, Vibrio cholerae; identical to SEQ ID NO: 2598

SEQ ID NO: 3190 - protein, 244 aa, Vibrio cholerae; identical to SEQ ID NO: 2537

SEQ ID NO: 3191 - protein, 483 aa, Vibrio cholerae; identical to SEQ ID NO: 2538

SEQ ID NO: 3192 - protein, 1149 aa, Vibrio cholerae; identical to SEQ ID NO: 2547

SEQ ID NO: 3193 - protein, 687 aa, Vibrio cholerae; identical to SEQ ID NO: 2598

SEQ ID NO: 3194 - protein, 244 aa, Vibrio cholerae; identical to SEQ ID NO: 2537

SEQ ID NO: 3195 - protein, 483 aa, Vibrio cholerae; identical to SEQ ID NO: 2538

SEQ ID NO: 3196 - protein, 1149 aa, Vibrio cholerae; identical to SEQ ID NO: 2547

SEQ ID NO: 3197 - protein, 706 aa, Vibrio cholerae; identical to SEQ ID NO: 2536

SEQ ID NO: 3198 - protein, 244 aa, Vibrio cholerae; identical to SEQ ID NO: 2537

SEQ ID NO: 3199 - protein, 483 aa, Vibrio cholerae; identical to SEQ ID NO: 2538

SEQ ID NO: 3200 - protein, 1149 aa, Vibrio cholerae; identical to SEQ ID NO: 2547

SEQ ID NO: 3201 - protein, 687 aa, Vibrio cholerae; identical to SEQ ID NO: 2598

SEQ ID NO: 3202 - protein, 244 aa, Vibrio cholerae; identical to SEQ ID NO: 2537

SEQ ID NO: 3203 - protein, 483 aa, Vibrio cholerae; identical to SEQ ID NO: 2538

SEQ ID NO: 3204 - protein, 1149 aa, Vibrio cholerae; identical to SEQ ID NO: 2547

SEQ ID NO: 3205 - protein, 687 aa, Vibrio cholerae; identical to SEQ ID NO: 2598

SEQ ID NO: 3206 - protein, 244 aa, Vibrio cholerae; identical to SEQ ID NO: 2537

SEQ ID NO: 3207 - protein, 483 aa, Vibrio cholerae; identical to SEQ ID NO: 2538

SEQ ID NO: 3208 - protein, 1149 aa, Vibrio cholerae; identical to SEQ ID NO: 2547

SEQ ID NO: 3209 - protein, 443 aa, Vibrio cholerae
MQESLIQATQGIQQGLESSLEKIMAPAINKLVDETSDGNQKALESVLQSFMEGFGQQGEQQRVAMDSASQNVNKTLESMSVSMAAFVNKLEVQQNASSEREKELISTISVQVSELVTQGNEQKRVLTEFVEKQVSELGEQLTKRELAASEREQKLASSMESTIKDLVENVSAQSQVLTDFVQNQVVQLTQTFSERDGMASQMEKERNDIFVNQTQAMKAGTDELLAQVKAATESQQITTNSIIEQGKQLQNSIDSSVSASARATESMQQSANELRVAADSMNVFGSNIKDAGNKLSGAVTEAVNSTKDLAEQNHLGAVKVQALREQLLEDTSKFSAIADQINNMLISAEQSFSTLRTTQNEFLAEQKGNLNELTSEMKRNVKELTEQMAQLLEDYAEQANGQTAEHLKVWANSSTQYAESMNTAVRAISSVVDEIQDKVSQHA

SEQ ID NO: 3210 - protein, 244 aa, Vibrio cholerae; identical to SEQ ID NO: 2537

SEQ ID NO: 3211 - protein, 233 aa, Vibrio cholerae
MVHLERYWNPAKEAQATDRVYRIGQEKEVHIYIPLLHHPEFESFDVNLHRLLTQKTLLKDAVVTPEDVIPQPAGVGGVVSGDLIDKRITAAELDKLSWQQFEALCVELLAKITDSESAWLTNNGADHGADGVLLNNSGNILLQAKFTQRQYDGYKGIQEIHSAKPIYESAMRSSFGRLIFVTNSPLLAKRTHEIAATCGIEVLGRTQLLTYLEEYDITLKDILSRLGKDRLRV

SEQ ID NO: 3212 - protein, 443 aa, Vibrio cholerae; identical to SEQ ID NO: 3209

SEQ ID NO: 3213 - protein, 244 aa, Vibrio cholerae; identical to SEQ ID NO: 2537

SEQ ID NO: 3214 - protein, 350 aa, Vibrio cholerae
MEAKRLRGNDEQFDENILSTNGLKWLAERAIQNNVDFDHLIAEMKLERYANGRYLTAAKGIYYIEQLNTIPLGQDHPLLEEVQKTVVFDSRYDSESLLGHQILRILIGRSIGSHISEPWMNVILAIGGDPRVPSSNPRYIKWWKSLEPNLVQAVLGWLSKLDLKLFLEALEDYSYSSANYELQRMYPSRKSFLEGMFDAGVISNTRLYLSLDAARYLKRNYDPKHLPNFSTVKDGDKSIIYVQMNGAHMVEGSHSCYLWLYRYLDPSVCVFNYNIDSPTYSQLTIGINNQMSRLSSGAVAKITHSPSGYAWQRKALIALRELGVKLTPKDVLSNEDYIDFKQRYGVREWS

SEQ ID NO: 3215 - protein, 413 aa, Vibrio cholerae
MYAGGEFENWKYLEELKSTMVGYQRDVYEGAISHQLENEESHALTTLMRLRDSSLHPRLSDGGRLDIPKNAKSARALYGESGKLVSLLETLDRVRSKQEKCIIFAVNKRLQSFLSVTLGQIYNLGPLSVINGDAKAVAKRKSVPTRKSMISDFEVKEGFNLIVMSPVAAGVGLTVVGANHVVHLERYWNPAKEAQATDRVYRIGQEKEVHIYIPLLHHPEFESFDVNLHRLLTQKTLLKDAVVTPEDVIPQPAGVGGVVSGDLIDKRITAAELDKLSWQQFEALCVELLAKITDSESAWLTNNGADHGADGVLLNNSGNILLQAKFTQRQYDGYKGIQEIHSAKPIYESAMRSSFGRLIFVTNSPLLAKRTHEIAATCGIEVLGRTQLLTYLEEYDITLKDILSRLGKDRLRV

SEQ ID NO: 3216 - protein, 706 aa, Vibrio cholerae; identical to SEQ ID NO: 2536

SEQ ID NO: 3217 - protein, 244 aa, Vibrio cholerae; identical to SEQ ID NO: 2537

SEQ ID NO: 3218 - protein, 107 aa, Vibrio cholerae
MNGAHMVEGSHSCYLWLYRYLDPSVCVFNYNIDSPTYSQLTIGINNQMSRLSSGAVAKITHSPSGYAWQRKALIALRELGVKLTPKDVLSNEDYIDFKQRYGVREWS

SEQ ID NO: 3219 - protein, 496 aa, Vibrio cholerae
MATGTPVENSLADFWCLMDTACPGHLGSYQEFRARYISPILKAAGDEVEEIRARLGRELRIAVGALMLRRIKEDNLKGLPLKHMYAGGEFENWKYLEELKSTMVGYQRDVYEGAISHQLENEESHALTTLMRLRDSSLHPRLSDGGRLDIPKNAKSARALYGESGKLVSLLETLDRVRSKQEKCIIFAVNKRLQSFLSVTLGQIYNLGPLSVINGDAKAVAKRKSVPTRKSMISDFEAKEGFNLIVMSPVAAGVGLTVVGANHVVHLERYWNPAKEAQATDRVYRIGQEKEVHIYIPLLHHPEFESFDVNLHRLLTQKTLLKDAVVTPEDVIPQPAGVGGVVSGDLIDKRITAAELDKLSWQQFEALCVELLAKITDSESAWLTNNGADHGADGVLLNNSGNILLQAKFTQRQYDGYKGIQEIHSAKPIYESAMRSSFGRLIFVTNSPLLAKRTHEIAATCGIEVLGRTQLLTYLEEYDITLKDILSRLGKDRLRV

SEQ ID NO: 3220 - protein, 218 aa, Vibrio cholerae; identical to SEQ ID NO: 2647

SEQ ID NO: 3221 - protein, 199 aa, Vibrio cholerae
  MOD_RES (169)..(183): Any amino acid
MLGHQILRILIGRSIGSHISEPWMNVILAIGGDPRVPSSNPRYIKWWKSLEPNLVQAVLGWLSKLDLKLFLEALEDYSYSSANYELQRMYPSRKSFLEGMFDAGVISNTRLYLSLDAARYLKRNYDPKHLPNFSTVKDGDKSIIYVQMNGAHMVEGSHSCYLWLYRYLXXXXXXXXXXXXXXXLTITLIVLRTHNSQSV

SEQ ID NO: 3222 - protein, 327 aa, Vibrio cholerae; identical to SEQ ID NO: 3152

SEQ ID NO: 3223 - protein, 687 aa, Vibrio cholerae; identical to SEQ ID NO: 2598

SEQ ID NO: 3224 - protein, 244 aa, Vibrio cholerae; identical to SEQ ID NO: 2537

SEQ ID NO: 3225 - protein, 307 aa, Vibrio cholerae; identical to SEQ ID NO: 3083

SEQ ID NO: 3226 - protein, 1157 aa, Vibrio cholerae
  MOD_RES (269)..(284): Any amino acid
MELTSLISKFFSSSDKTSQFELICDDSLDFATSRKTLEKIKADEWITAQYVALKMLEEQGDVSSFPDGFIMPADTAVRLDSELRDLFSLPPVWKGVIDADIQGKASTPTFKIDLSVTTKQGRTTLNYTVDGPFIRFSQNEQYLLTPEQLMVFIAHKTHVRSDRSEYDNLLYLHSLQEAQKNGCKLNLKHFERLRILTPNKITVEAELNSQGELILTPNMGQSASHESIQKVLGQLQSDNAVTLKVGDEIVLFSEEKLMAVKEVISNRVXXXXXXXXXXXXXXXXVKAFLENPTAYIDASLVDLDLGFSIRVHGATVFKHAYFGETDESGIDWFGASPTSDLINPISKLTDRVRDKTTLEDVAKKIEDARQTGATVFDYEGQSYDISDPAAVEKVLNEIGHKISSPNTDLSSYGEAEDAETESEGSEIHVVDIDLNDEELSENSPKVEQLISDISWDGELNWENHKRTPFPHQDIGVRWILGVEQKSLSDSKVSGALLADDMGLGKTFMALSAIEHIYQRQQISGETKKPALIVAPLSLLENWKDEVDKTFKHSPFKDVVILQSSAELNEYRMGGVEIRGQSASDDCLEPKYSLKVGKYFGPSRLDLPERLVITTYQTLRDYQFSMCLIDWGIVVFDEAQNIKNPNALQTRAAKGLKADFKLVATGTPVENSLADFWCLMDTACPGHLGSYQEFRARYISPILKAAGDEVEEIRARLGRELRIAVGALMLRRIKEDNLKGLPLKHMYAGGEFENWKYLEELKSTMVGYQRDVYEGAISHQLENEESHALTTLMRLRDSSLHPRLSDGGRLDIPKNAKSARALYGESGKLVSLLETLDRVRSKQEKCIIFAVNKRLQSFLSVTLGQIYNLGPLSVINGDAKAVAKRKSVPTRKSMISDFEAKEGFNLIVMSPVAAGVGLTVVGANHVVHLERYWNPAKEAQATDRVYRIGQEKEVHIYIPLLHHPEFESFDVNLHRLLTQKTLLKDAVVTPEDVIPQPAGVGGVVSGDLIDKRITAAELDKLSWQQFEALCVELLAKITDSESAWLTNNGADHGADGVLLNNSGNILLQAKFTQRQYDGYKGIQEIHSAKPIYESAMRSSFGRLIFVTNSPLLAKRTHEIAATCGIEVLGRTQLLTYLEEYDITLKDILSRLGKDRLRV

SEQ ID NO: 3227 - protein, 244 aa, Vibrio cholerae; identical to SEQ ID NO: 2537

SEQ ID NO: 3228 - protein, 360 aa, Vibrio cholerae
  MOD_RES (345)..(359): Any amino acid
MSLNIKKLKVSLPANPFGQAIKDFAHLSSQLEVLSKSAGIENNKFRTAYGEVCNALASKKRVEDVIDSSVHVRALALSLHTDAKKNVSFTRRLLNKITEIVKKPSSLVIESFYQHFLSEYDRLADLEATADWLLEAKRLRGNDEQFDENILSTNGPKWLAERAIQNNVDFDHLIAEMKLERYANGRYLTAAKGIYYIEQLNTIPLGQDHPLLEEVQKTVVFDSRYDSESLLGHQILRILIGRSIGSHISEPWMNVILAIGGDPRVPSSNPRYIKWWKSLEPNLVQAVLGWLSKLDLKLFLEALEDYSYSSANYELQRMYPSRKSFLEGMFDAGVISNTRLYLSLXXXXXXXXXXXXXXXL

SEQ ID NO: 3229 - protein, 435 aa, Vibrio cholerae
  MOD_RES (414)..(427): Any amino acid
MGLGKTFMALSAIEHIYQRQQISGETKKPALIVAPLSLLENWKDEVDKTFKHSPFKDVVILQSSAELNEYRMGGVEIRGQSASDDCLEPKYSLKVGKYFGPSRLDLPERLVITTYQTLRDYQFSMCLIDWGIVVFDEAQNIKNPNALQTRAAKGLKADFKLVATGTPVENSLADFWCLMDTACPGHLGSYQEFRARYISPILKAAGDEVEEIRARLGRELRIAVGALMLRRIKEDNLKGLPLKHMYAGGEFENWKYLEELKSTMVGYQRDVYEGAISHQLENEESHALTTLMRLRDSSLHPRLSDGGRLDIPKNAKSARALYGESGKLVSLLETLDRVRSKQEKCIIFAVNKRLQSFLSVTLGQIYNLGPLSVINGDAKAVAKRKSVPTRKSMISDFEAKEGFNLIVMSPVAAXXXXXXXXXXXXXXSVRIMWFI

SEQ ID NO: 3230 - protein, 687 aa, Vibrio cholerae; identical to SEQ ID NO: 2598

SEQ ID NO: 3231 - protein, 244 aa, Vibrio cholerae; identical to SEQ ID NO: 2537

SEQ ID NO: 3232 - protein, 483 aa, Vibrio cholerae; identical to SEQ ID NO: 2538

SEQ ID NO: 3233 - protein, 1149 aa, Vibrio cholerae; identical to SEQ ID NO: 2547

SEQ ID NO: 3234 - protein, 244 aa, Vibrio cholerae; identical to SEQ ID NO: 2537

SEQ ID NO: 3235 - protein, 231 aa, Vibrio cholerae
MNVILAIGGDPRVPSSNPRYIKWWKSLEPNLVQAVLGWLSKLDLKLFLEALEDYSYSSANYELQRMYPSRKSFLEGMFDAGVISNTRLYLSLDAARYLKRNYDPKHLPNFSTVKDGDKSIIYVQMNGAHMVEGSHSCYLWLYRYLDPSVCVFNYNIDSPTYSQLTIGINNQMSRLSSGAVAKITHSPSGYAWQRKALIALRELGVKLTPKDVLSNEDYIDFKQRYGVREWS

SEQ ID NO: 3236 - protein, 650 aa, Vibrio cholerae; identical to SEQ ID NO: 3017

SEQ ID NO: 3237 - protein, 706 aa, Vibrio cholerae; identical to SEQ ID NO: 2536

SEQ ID NO: 3238 - protein, 244 aa, Vibrio cholerae; identical to SEQ ID NO: 2537

SEQ ID NO: 3239 - protein, 483 aa, Vibrio cholerae; identical to SEQ ID NO: 2542

SEQ ID NO: 3240 - protein, 687 aa, Vibrio cholerae; identical to SEQ ID NO: 2598

SEQ ID NO: 3241 - protein, 244 aa, Vibrio cholerae; identical to SEQ ID NO: 2537

SEQ ID NO: 3242 - protein, 483 aa, Vibrio cholerae; identical to SEQ ID NO: 2538

SEQ ID NO: 3243 - protein, 1149 aa, Vibrio cholerae; identical to SEQ ID NO: 2547

SEQ ID NO: 3244 - protein, 244 aa, Vibrio cholerae; identical to SEQ ID NO: 2537

SEQ ID NO: 3245 - protein, 483 aa, Vibrio cholerae; identical to SEQ ID NO: 2538

SEQ ID NO: 3246 - protein, 657 aa, Vibrio cholerae; identical to SEQ ID NO: 3045

SEQ ID NO: 3247 - protein, 687 aa, Vibrio cholerae; identical to SEQ ID NO: 3081

SEQ ID NO: 3248 - protein, 244 aa, Vibrio cholerae; identical to SEQ ID NO: 2537

SEQ ID NO: 3249 - protein, 483 aa, Vibrio cholerae; identical to SEQ ID NO: 2538

SEQ ID NO: 3250 - protein, 1149 aa, Vibrio cholerae; identical to SEQ ID NO: 2547

SEQ ID NO: 3251 - protein, 687 aa, Vibrio cholerae; identical to SEQ ID NO: 2598

SEQ ID NO: 3252 - protein, 244 aa, Vibrio cholerae; identical to SEQ ID NO: 2537

SEQ ID NO: 3253 - protein, 483 aa, Vibrio cholerae; identical to SEQ ID NO: 2538

SEQ ID NO: 3254 - protein, 1149 aa, Vibrio cholerae; identical to SEQ ID NO: 2547

SEQ ID NO: 3255 - protein, 687 aa, Vibrio cholerae; identical to SEQ ID NO: 2598

SEQ ID NO: 3256 - protein, 244 aa, Vibrio cholerae; identical to SEQ ID NO: 2537

SEQ ID NO: 3257 - protein, 483 aa, Vibrio cholerae; identical to SEQ ID NO: 2538

SEQ ID NO: 3258 - protein, 1149 aa, Vibrio cholerae; identical to SEQ ID NO: 2547

SEQ ID NO: 3259 - protein, 687 aa, Vibrio cholerae; identical to SEQ ID NO: 2598

SEQ ID NO: 3260 - protein, 244 aa, Vibrio cholerae; identical to SEQ ID NO: 2537

SEQ ID NO: 3261 - protein, 483 aa, Vibrio cholerae; identical to SEQ ID NO: 2542

SEQ ID NO: 3262 - protein, 1149 aa, Vibrio cholerae; identical to SEQ ID NO: 2547

SEQ ID NO: 3263 - protein, 715 aa, Vibrio cholerae
  MOD_RES (145)..(160): Any amino acid
MTDSLNLSSLWPDLSSLNVMPPQTPEQLSALFVVILWGVALFFLIWSVAAFIRARQRVVWLNKSLDDAEKSTLSGVRNDLISRAEQKKDSVGHLWLEFDETLLEVKGADDVVRLHNTFDADYFFNSSSLAGGSTENRMIAVVPGXXXXXXXXXXXXXXXXIGTFVGLQLGLSDLNIAGNVDVNEMKNGVAGVINGAKIAFMTSVWGVLLSVAFNFIEKILEQIIRKKIKSLQNRIDRMFPRLSAEYQLQSIANNSQQSRESLQGLAEKIGEKMQESLIQATQGIQQGLESSLEKIMAPAINKLVDETSDGNQKALESVLQSFMEGFGQQGEQQRVAMDSASQNVNKTLESMSVSMAAFVNKLEVQQNASSEREKELISTISVQVSELVTQGNEQKRVLTEFVEKQVSELGEQLTKRELAASEREQKLASSMESTIKDLVENVSAQSQVLTDFVQNQVVQLTQTFSERDGMASQMEKERNDIFVNQTQAMKAGTDELLAQVKAATESQQITTNSIIEQGKQLQNSIDSSVSASARATESMQQSANELRVAADSMNVFGSNIKDAGNKLSGAVTEAVNSTKDLAEQNHLGAVKVQALREQLLEDTSKFSAIADQINNMLISAEQSFSTLRTTQNEFLAEQKGNLNELTSEMKRNVKELTEQMAQLLEDYAEQANGQTAEHLKVWANSSTQYAESMNTAVRAISSVVDEIQDKVSQHA

SEQ ID NO: 3264 - protein, 244 aa, Vibrio cholerae; identical to SEQ ID NO: 2537

SEQ ID NO: 3265 - protein, 265 aa, Vibrio cholerae; identical to SEQ ID NO: 2768

SEQ ID NO: 3266 - protein, 1146 aa, Vibrio cholerae; identical to SEQ ID NO: 2543

SEQ ID NO: 3267 - protein, 687 aa, Vibrio cholerae; identical to SEQ ID NO: 2598

SEQ ID NO: 3268 - protein, 244 aa, Vibrio cholerae; identical to SEQ ID NO: 2537

SEQ ID NO: 3269 - protein, 483 aa, Vibrio cholerae; identical to SEQ ID NO: 2538

SEQ ID NO: 3270 - protein, 1149 aa, Vibrio cholerae; identical to SEQ ID NO: 2547

SEQ ID NO: 3271 - protein, 687 aa, Vibrio cholerae; identical to SEQ ID NO: 2598

SEQ ID NO: 3272 - protein, 244 aa, Vibrio cholerae; identical to SEQ ID NO: 2537

SEQ ID NO: 3273 - protein, 483 aa, Vibrio cholerae; identical to SEQ ID NO: 2538

SEQ ID NO: 3274 - protein, 1149 aa, Vibrio cholerae; identical to SEQ ID NO: 2547

SEQ ID NO: 3275 - protein, 687 aa, Vibrio cholerae; identical to SEQ ID NO: 2598

SEQ ID NO: 3276 - protein, 244 aa, Vibrio cholerae; identical to SEQ ID NO: 2537

SEQ ID NO: 3277 - protein, 483 aa, Vibrio cholerae; identical to SEQ ID NO: 2538

SEQ ID NO: 3278 - protein, 1149 aa, Vibrio cholerae; identical to SEQ ID NO: 2547

SEQ ID NO: 3279 - protein, 687 aa, Vibrio cholerae; identical to SEQ ID NO: 2598

SEQ ID NO: 3280 - protein, 244 aa, Vibrio cholerae; identical to SEQ ID NO: 2537

SEQ ID NO: 3281 - protein, 483 aa, Vibrio cholerae; identical to SEQ ID NO: 2538

SEQ ID NO: 3282 - protein, 1149 aa, Vibrio cholerae; identical to SEQ ID NO: 2547

SEQ ID NO: 3283 - protein, 706 aa, Vibrio cholerae; identical to SEQ ID NO: 2536

SEQ ID NO: 3284 - protein, 244 aa, Vibrio cholerae; identical to SEQ ID NO: 2537

SEQ ID NO: 3285 - protein, 483 aa, Vibrio cholerae; identical to SEQ ID NO: 2538

SEQ ID NO: 3286 - protein, 366 aa, Vibrio cholerae
MRLRDSSLHPRLSDGGRLDIPKNAKSARALYGESGKLVSLLETLDRVRSKQEKCIIFAVNKRLQSFLSVTLGQIYNLGPLSVINGDAKAVAKRKSVPTRKSMISDFEAKEGFNLIVMSPVAAGVGLTVVGANHVVHLERYWNPAKEAQATDRVYRIGQEKEVHIYIPLLHHPEFESFDVNLHRLLTQKTLLKDAVVTPEDVIPQPAGVGGVVSGDLIDKRITAAELDKLSWQQFEALCVELLAKITDSESAWLTNNGADHGADGVLLNNSGNILLQAKFTQRQYDGYKGIQEIHSAKPIYESAMRSSFGRLIFVTNSPLLAKRTHEIAATCGIEVLGRTQLLTYLEEYDITLKDILSRLGKDRLRV

SEQ ID NO: 3287 - protein, 478 aa, Vibrio cholerae
MFPRLSAEYQLQSIANNSQQSRESLQGLAEKIGEKMQESLIQATQGIQQGLESSLEKIMAPAINKLVDETSDGNQKALESVLQSFMEGFGQQGEQQRVAMDSASQNVNKTLESMSVLMAAFVNKLEVQQNASSEREKELISTISVQVSELVTQGNEQKRVLTEFVEKQVSELGEQLTKRELAASEREQKLASSMESTIKDLVENVSAQSQVLTDFVQNQVVQLTQTFSERDGMASQMEKERNDIFVNQTQAMKAGTDELLAQVKAATESQQITTNSIIEQGKQLQNSIDSSVSASARATESMQQSANELRVAADSMNVFGSNIKDAGNKLSGAVTEAVNSTKDLAEQNHLGAVKVQALREQLLEDTSKFSAIADQINNMLISAEQSFSTLRTTQNEFLAEQKGNLNELTSEMKRNVKELTEQMAQLLEDYAEQANGQTAEHLKVWANSSTQYAESMNTAVRAISSVVDEIQDKVSQHA

SEQ ID NO: 3288 - protein, 244 aa, Vibrio cholerae; identical to SEQ ID NO: 2537

SEQ ID NO: 3289 - protein, 134 aa, Vibrio cholerae
MKRNYDPKHLPNFSTVKDGDKSIIYVQMNGAHMVEGSHSCYLWLYRYLDPSVCVFNYNIDSPTYSQLTIGINNQMSRLSSGAVAKITHSPSGYAWQRKALIALRELGVKLTPKDVLSNEDYIDFKQRYGVREWS

SEQ ID NO: 3290 - protein, 650 aa, Vibrio cholerae; identical to SEQ ID NO: 3017

SEQ ID NO: 3291 - protein, 687 aa, Vibrio cholerae; identical to SEQ ID NO: 2598

SEQ ID NO: 3292 - protein, 244 aa, Vibrio cholerae; identical to SEQ ID NO: 2537

SEQ ID NO: 3293 - protein, 483 aa, Vibrio cholerae; identical to SEQ ID NO: 2538

SEQ ID NO: 3294 - protein, 1149 aa, Vibrio cholerae; identical to SEQ ID NO: 2547

SEQ ID NO: 3295 - protein, 706 aa, Vibrio cholerae; identical to SEQ ID NO: 2536

SEQ ID NO: 3296 - protein, 244 aa, Vibrio cholerae; identical to SEQ ID NO: 2537

SEQ ID NO: 3297 - protein, 483 aa, Vibrio cholerae; identical to SEQ ID NO: 2538

SEQ ID NO: 3298 - protein, 1149 aa, Vibrio cholerae; identical to SEQ ID NO: 2547

SEQ ID NO: 3299 - protein, 687 aa, Vibrio cholerae; identical to SEQ ID NO: 2598

SEQ ID NO: 3300 - protein, 244 aa, Vibrio cholerae; identical to SEQ ID NO: 2537

SEQ ID NO: 3301 - protein, 483 aa, Vibrio cholerae; identical to SEQ ID NO: 2538

SEQ ID NO: 3302 - protein, 1149 aa, Vibrio cholerae; identical to SEQ ID NO: 2547

SEQ ID NO: 3303 - protein, 687 aa, Vibrio cholerae; identical to SEQ ID NO: 2598

SEQ ID NO: 3304 - protein, 244 aa, Vibrio cholerae; identical to SEQ ID NO: 2537

SEQ ID NO: 3305 - protein, 483 aa, Vibrio cholerae; identical to SEQ ID NO: 2538

SEQ ID NO: 3306 - protein, 1149 aa, Vibrio cholerae; identical to SEQ ID NO: 2547

SEQ ID NO: 3307 - protein, 687 aa, Vibrio cholerae; identical to SEQ ID NO: 3081

SEQ ID NO: 3308 - protein, 244 aa, Vibrio cholerae; identical to SEQ ID NO: 2537

SEQ ID NO: 3309 - protein, 492 aa, Vibrio cholerae
  MOD_RES (192)..(206): Any amino acid
MSLNIKKLKVSLPANPFGQAIKDFAHLSSQLEVLSKSAGIENNKFRTAYGEVCNALASKKRVEDVIDSSVHVRALALSLHTDAKKNVSFTRRLLNKITEIVKKPSSLVIESFYQHFLSEYDRLADLEATADWLLEAKRLRGNDEQFDENILSTNGPKWLAERAIQNNVDFDHLIAEMKLERYANGRYLTAAXXXXXXXXXXXXXXXEQLNTIPLGQDHPLLEEVQKTVVFDSRYDSESLLGHQILRILIGRSIGSHISEPWMNVILAIGGDPRVPSSNPRYIKWWKSLEPNLVQAVLGWLSKLDLKLFLEALEDYSYSSANYELQRMYPSRKSFLEGMFDAGVISNTRLYLSLDAARYLKRNYDPKHLPNFSTVKDGDKSIIYVQMNGAHMVEGSHSCYLWLYRYLDPSVCVFNYNIDSPTYSQLTIGINNQMSRLSSGAVAKITHSPSGYAWQRKALIALRELGVKLTPKDVLSNEDYIDFKQRYGVREWS

SEQ ID NO: 3310 - protein, 687 aa, Vibrio cholerae; identical to SEQ ID NO: 2602

SEQ ID NO: 3311 - protein, 244 aa, Vibrio cholerae; identical to SEQ ID NO: 2537

SEQ ID NO: 3312 - protein, 166 aa, Vibrio cholerae; identical to SEQ ID NO: 3020

SEQ ID NO: 3313 - protein, 1149 aa, Vibrio cholerae; identical to SEQ ID NO: 2547

SEQ ID NO: 3314 - protein, 687 aa, Vibrio cholerae; identical to SEQ ID NO: 2598

SEQ ID NO: 3315 - protein, 244 aa, Vibrio cholerae; identical to SEQ ID NO: 2537

SEQ ID NO: 3316 - protein, 483 aa, Vibrio cholerae; identical to SEQ ID NO: 2538

SEQ ID NO: 3317 - protein, 1149 aa, Vibrio cholerae; identical to SEQ ID NO: 2547

SEQ ID NO: 3318 - protein, 599 aa, Vibrio cholerae
  MOD_RES (561)..(572): Any amino acid
MTDSLNLSSLWPDLSSLNVMPPQTPEQLSALFVVILWGVALFFLIWSVAAFIRARQRVVWLNKSLDDAEKSTLSGVRNDLISRAEQKKDSVGHLWLEFDETLLEVKGADDVVRLHNTFDADYFFNSSSLAGGSTENRMIAVVPGFLTALGVIGTFVGLQLGLSDLNIAGNVDVNEMKNGVAGVINGAKIAFMTSVWGVLLSVAFNFIEKILEQIIRKKIKSLQNRIDRMFPRLSAEYQLQSIANNSQQSRESLQGLAEKIGEKMQESLIQATQGIQQGLESSLEKIMAPAINKLVDETSDGNQKALESVLQSFMEGFGQQGEQQRVAMDSASQNVNKTLESMSVSMAAFVNKLEVQQNASSEREKELISTISVQVSELVTQGNEQKRVLTEFVEKQVSELGEQLTKRELAASEREQKLASSMESTIKDLVENVSAQSQVLTDFVQNQVVQLTQTFSERDGMASQMEKERNDIFVNQTQAMKAGTDELLAQVKAATESQQITTNSIIEQGKQLQNSIDSSVSASARATESMQQSANELRVAADSMNVFGSNIKDAGNKLSGXXXXXXXXXXXXHEGFSGTKPSRRSESSSVEGAVAGRYK

SEQ ID NO: 3319 - protein, 244 aa, Vibrio cholerae; identical to SEQ ID NO: 2537

SEQ ID NO: 3320 - protein, 166 aa, Vibrio cholerae; identical to SEQ ID NO: 3020

SEQ ID NO: 3321 - protein, 233 aa, Vibrio cholerae; identical to SEQ ID NO: 3211

SEQ ID NO: 3322 - protein, 687 aa, Vibrio cholerae; identical to SEQ ID NO: 2598

SEQ ID NO: 3323 - protein, 244 aa, Vibrio cholerae; identical to SEQ ID NO: 2537

SEQ ID NO: 3324 - protein, 483 aa, Vibrio cholerae; identical to SEQ ID NO: 2538

SEQ ID NO: 3325 - protein, 650 aa, Vibrio cholerae; identical to SEQ ID NO: 3017

SEQ ID NO: 3326 - protein, 706 aa, Vibrio cholerae; identical to SEQ ID NO: 2536

SEQ ID NO: 3327 - protein, 244 aa, Vibrio cholerae; identical to SEQ ID NO: 2537

SEQ ID NO: 3328 - protein, 483 aa, Vibrio cholerae; identical to SEQ ID NO: 2538

SEQ ID NO: 3329 - protein, 915 aa, Vibrio cholerae
MGQLQSDNAVTLKVGDEIVLFSEEKLMAVKEVISNRVIPQQQVKAFLENPTAYIDASLVDLDLGFSIRVHGATVFKHAYFGETDESGIDWFGASPTSDLINPISKLTDRVRDKTTLEDVAKKIEDARQTGATVFDYEGQSYDISDPAAVEKVLNEIGHKISSPNTDLSSYGEAEDAETESEGSEIHVVDIDLNDEELSENSPKVEQLISDISWDGELNWENHKRTPFPHQDIGVRWILGVEQKSLSDSKVSGALLADDMGLGKTFMALSAIEHIYQRQQISGETKKPALIVAPLSLLENWKDEVDKTFKHSPFKDVVILQSSAELNEYRMGGVEIRGQSASDDCLEPKYSLKVGKYFGPSRLDLPERLVITTYQTLRDYQFSMCLIDWGIVVFDEAQNIKNPNALQTRAAKGLKADFKLVATGTPVENSLADFWCLMDTACPGHLGSYQEFRARYISPILKAAGDEVEEIRARLGRELRIAVGALMLRRIKEDNLKGLPLKHMYAGGEFENWKYLEELKSTMVGYQRDVYEGAISHQLENEESHALTTLMRLRDSSLHPRLSDGGRLDIPKNAKSARALYGESGKLVSLLETLDRVRSKQEKCIIFAVNKRLQSFLSVTLGQIYNLGPLSVINGDAKAVAKRKSVPTRKSMISDFEAKEGFNLIVMSPVAAGVGLTVVGANHVVHLERYWNPAKEAQATDRVYRIGQEKEVHIYIPLLHHPEFESFDVNLHRLLTQKTLLKDAVVTPEDVIPQPAGVGGVVSGDLIDKRITAAELDKLSWQQFEALCVELLAKITDSESAWLTNNGADHGADGVLLNNSGNILLQAKFTQRQYDGYKGIQEIHSAKPIYESAMRSSFGRLIFVTNSPLLAKRTHEIAATCGIEVLGRTQLLTYLEEYDITLKDILSRLGKDRLRV

SEQ ID NO: 3330 - protein, 687 aa, Vibrio cholerae; identical to SEQ ID NO: 2598

SEQ ID NO: 3331 - protein, 244 aa, Vibrio cholerae; identical to SEQ ID NO: 2537

SEQ ID NO: 3332 - protein, 483 aa, Vibrio cholerae; identical to SEQ ID NO: 2538

SEQ ID NO: 3333 - protein, 1149 aa, Vibrio cholerae; identical to SEQ ID NO: 2547

SEQ ID NO: 3334 - protein, 687 aa, Vibrio cholerae; identical to SEQ ID NO: 2602

SEQ ID NO: 3335 - protein, 244 aa, Vibrio cholerae; identical to SEQ ID NO: 2537

SEQ ID NO: 3336 - protein, 483 aa, Vibrio cholerae; identical to SEQ ID NO: 2538

SEQ ID NO: 3337 - protein, 1149 aa, Vibrio cholerae; identical to SEQ ID NO: 2547

SEQ ID NO: 3338 - protein, 687 aa, Vibrio cholerae; identical to SEQ ID NO: 2598

SEQ ID NO: 3339 - protein, 244 aa, Vibrio cholerae; identical to SEQ ID NO: 2537

SEQ ID NO: 3340 - protein, 483 aa, Vibrio cholerae; identical to SEQ ID NO: 2538

SEQ ID NO: 3341 - protein, 1149 aa, Vibrio cholerae; identical to SEQ ID NO: 2547

SEQ ID NO: 3342 - protein, 687 aa, Vibrio cholerae; identical to SEQ ID NO: 3081

SEQ ID NO: 3343 - protein, 244 aa, Vibrio cholerae; identical to SEQ ID NO: 2537

SEQ ID NO: 3344 - protein, 483 aa, Vibrio cholerae; identical to SEQ ID NO: 2538

SEQ ID NO: 3345 - protein, 1149 aa, Vibrio cholerae; identical to SEQ ID NO: 2547

SEQ ID NO: 3346 - protein, 687 aa, Vibrio cholerae; identical to SEQ ID NO: 2598

SEQ ID NO: 3347 - protein, 244 aa, Vibrio cholerae; identical to SEQ ID NO: 2537

SEQ ID NO: 3348 - protein, 483 aa, Vibrio cholerae; identical to SEQ ID NO: 2538

SEQ ID NO: 3349 - protein, 1149 aa, Vibrio cholerae; identical to SEQ ID NO: 2547

SEQ ID NO: 3350 - protein, 687 aa, Vibrio cholerae; identical to SEQ ID NO: 2598

SEQ ID NO: 3351 - protein, 244 aa, Vibrio cholerae; identical to SEQ ID NO: 2537

SEQ ID NO: 3352 - protein, 483 aa, Vibrio cholerae; identical to SEQ ID NO: 2538

SEQ ID NO: 3353 - protein, 1149 aa, Vibrio cholerae; identical to SEQ ID NO: 2547

SEQ ID NO: 3354 - protein, 531 aa, Vibrio cholerae
MKNGVAGVINGAKIAFMTSVWGVLLSVAFNFIEKILEQIIRKKIKSLQNRIDRMFPRLSAEYQLQSIANNSQQSRESLQGLAEKIGEKMQESLIQATQGIQQGLESSLEKIMAPAINKLVDETSDGNQKALESVLQSFMEGFGQQGEQQRVAMDSASQNVNKTLESMSVLMAAFVNKLEVQQNASSEREKELISTISVQVSELVTQGNEQKRVLTEFVEKQVSELGEQLTKRELAASEREQKLASSMESTIKDLVENVSAQSQVLTDFVQNQVVQLTQTFSERDGMASQMEKERNDIFVNQTQAMKAGTDELLAQVKAATESQQITTNSIIEQGKQLQNSIDSSVSASARATESMQQSANELRVAADSMNVFGSNIKDAGNKLSGAVTEAVNSTKDLAEQNHLGAVKVQALREQLLEDTSKFSAIADQINNMLISAEQSFSTLRTTQNEFLAEQKGNLNELTSEMKRNVKELTEQMAQLLEDYAEQANGQTAEHLKVWANSSTQYAESMNTAVRAISSVVDEIQDKVSQHA

SEQ ID NO: 3355 - protein, 244 aa, Vibrio cholerae; identical to SEQ ID NO: 2537

SEQ ID NO: 3356 - protein, 483 aa, Vibrio cholerae; identical to SEQ ID NO: 2538

SEQ ID NO: 3357 - protein, 1149 aa, Vibrio cholerae; identical to SEQ ID NO: 2547

SEQ ID NO: 3358 - protein, 687 aa, Vibrio cholerae; identical to SEQ ID NO: 2598

SEQ ID NO: 3359 - protein, 244 aa, Vibrio cholerae; identical to SEQ ID NO: 2537

SEQ ID NO: 3360 - protein, 483 aa, Vibrio cholerae; identical to SEQ ID NO: 2538

SEQ ID NO: 3361 - protein, 1149 aa, Vibrio cholerae; identical to SEQ ID NO: 2547

SEQ ID NO: 3362 - protein, 687 aa, Vibrio cholerae; identical to SEQ ID NO: 2598

SEQ ID NO: 3363 - protein, 244 aa, Vibrio cholerae; identical to SEQ ID NO: 2537

SEQ ID NO: 3364 - protein, 483 aa, Vibrio cholerae; identical to SEQ ID NO: 2538

SEQ ID NO: 3365 - protein, 1149 aa, Vibrio cholerae; identical to SEQ ID NO: 2547

SEQ ID NO: 3366 - protein, 687 aa, Vibrio cholerae; identical to SEQ ID NO: 2598

SEQ ID NO: 3367 - protein, 244 aa, Vibrio cholerae; identical to SEQ ID NO: 2537

SEQ ID NO: 3368 - protein, 483 aa, Vibrio cholerae; identical to SEQ ID NO: 2538

SEQ ID NO: 3369 - protein, 1149 aa, Vibrio cholerae; identical to SEQ ID NO: 2547

SEQ ID NO: 3370 - protein, 687 aa, Vibrio cholerae; identical to SEQ ID NO: 2598

SEQ ID NO: 3371 - protein, 244 aa, Vibrio cholerae; identical to SEQ ID NO: 2537

SEQ ID NO: 3372 - protein, 483 aa, Vibrio cholerae; identical to SEQ ID NO: 2538

SEQ ID NO: 3373 - protein, 687 aa, Vibrio cholerae; identical to SEQ ID NO: 2598

SEQ ID NO: 3374 - protein, 244 aa, Vibrio cholerae; identical to SEQ ID NO: 2537

SEQ ID NO: 3375 - protein, 483 aa, Vibrio cholerae; identical to SEQ ID NO: 2538

SEQ ID NO: 3376 - protein, 1149 aa, Vibrio cholerae; identical to SEQ ID NO: 2547

SEQ ID NO: 3377 - protein, 716 aa, Vibrio cholerae
  MOD_RES (658)..(673): Any amino acid
MTDSLNLSSLWPDLSSLNVMPPQTPEQLSALFVVILWGVALFFLIWSVAAFIRARQRVVWLNKSLDDAEKSTLSGVRNDLISRAEQKKDSVGHLWLEFDETLLEVKGADDVVRLHNTFDADYFFNSSSLAGGSTENRMIAVVPGFLTALGVIGTFVGLQLGLSDLNIAGNVDVNEMKNGVAGVINGAKIAFMTSVWGVLLSVAFNFIEKILEQIIRKKIKSLQNRIDRMFPRLSAEYQLQSIANNSQQSRESLQGLAEKIGEKMQESLIQATQGIQQGLESSLEKIMAPAINKLVDETSDGNQKALESVLQSFMEGFGQQGEQQRVAMDSASQNVNKTLESMSVSMAAFVNKLEVQQNASSEREKELISTISVQVSELVTQGNEQKRVLTEFVEKQVSELGEQLTKRELAASEREQKLASSMESTIKDLVENVSAQSQVLTDFVQNQVVQLTQTFSERDGMASQMEKERNDIFVNQTQAMKAGTDELLAQVKAATESQQITTNSIIEQGKQLQNSIDSSVSASARATESMQQSANELRVAADSMNVFGSNIKDAGNKLSGAVTEAVNSTKDLAEQNHLGAVKVQALREQLLEDTSKFSAIADQINNMLISAEQSFSTLRTTQNEFLAEQKGNLNELTSEMKRNVKELTEQMAQLLEDXXXXXXXXXXXXXXXXGQTAEHLKVWANSSTQYAESMNTAVRAISSVVDEIQDKVSQHA

SEQ ID NO: 3378 - protein, 244 aa, Vibrio cholerae; identical to SEQ ID NO: 2537

SEQ ID NO: 3379 - protein, 483 aa, Vibrio cholerae; identical to SEQ ID NO: 2538

SEQ ID NO: 3380 - protein, 1149 aa, Vibrio cholerae; identical to SEQ ID NO: 2547

SEQ ID NO: 3381 - protein, 687 aa, Vibrio cholerae; identical to SEQ ID NO: 3081

SEQ ID NO: 3382 - protein, 244 aa, Vibrio cholerae; identical to SEQ ID NO: 2537

SEQ ID NO: 3383 - protein, 483 aa, Vibrio cholerae; identical to SEQ ID NO: 2538

SEQ ID NO: 3384 - protein, 1149 aa, Vibrio cholerae; identical to SEQ ID NO: 2547

SEQ ID NO: 3385 - protein, 687 aa, Vibrio cholerae; identical to SEQ ID NO: 2598

SEQ ID NO: 3386 - protein, 244 aa, Vibrio cholerae; identical to SEQ ID NO: 2537

SEQ ID NO: 3387 - protein, 483 aa, Vibrio cholerae; identical to SEQ ID NO: 2542

SEQ ID NO: 3388 - protein, 1146 aa, Vibrio cholerae; identical to SEQ ID NO: 2543

SEQ ID NO: 3389 - protein, 687 aa, Vibrio cholerae; identical to SEQ ID NO: 2598

SEQ ID NO: 3390 - protein, 244 aa, Vibrio cholerae; identical to SEQ ID NO: 2537

SEQ ID NO: 3391 - protein, 483 aa, Vibrio cholerae; identical to SEQ ID NO: 2542

SEQ ID NO: 3392 - protein, 1149 aa, Vibrio cholerae
MELTSLISKFFSSSDKTSQFELICDDSLDFATSRKTLEKIKAGKADEWITAQYVALKMLEEQGDVSSFPDGFIMPADTAVRLDSELRDLFSLPPVWKGVIDADIQGKASTPTFKIDLSVTTKQGRTTLNYTVDGPFIRFSQNEQYLLTPEQLMVFIAHKTHVRSDRSEYDNLLYLHSLQEAQKNGCKLNLKHFERLRILTPNKITVEAELNSQGELILTPNMGQSASHESIQKVLGQLQSDNAVTLKVGDEIVLFSEEKLMAVKEVISNRVIPQQQVKAFLENPTAYIDASLVDLDLGFSIRVHGATVFKHAYFGETDESGIDWFGASPTSDLINPISKLTDRVRDKTTLEDVAKKIEDARQTGATVFDYEGQSYDISDPAAVEKVLNEIGHKISSPNTDLSSYGEAEDAETESEGSEIHVVDIDLNDEELSENSPKVEQLISDISWDGELNWENHKRTPFPHQDIGVRWILGVEQKSLSDSKVSGALLADDMGLGKTFMALSAIEHIYQRQQISGETKKPALIVAPLSLLENWKDEVDKTFKHSPFKDVVILQSSAELNEYRMGGVEIRGQSASDDCLEPKYSLKVGKYFGPSRLDLPERLVITTYQTLRDYQFSMCLIDWGIVVFDEAQNIKNPNALQTRAAKGLKADFKLVATGTPVENSLADFWCLMDTACPGHLGSYQEFRARYISPILKAAGDEVEEIRARLGRELRIAVGALMLRRIKEDNLKGLPLKHMYAGGEFENWKYLEELKSTMVGYQRDVYEGAISHQLENEESHALTTLMRLRDSSLHPRLSDGGRLDIPKNAKSARALYGESGKLVSLLETLDRVRSKQEKCIIFAVNKRLQSFLSVTLGQIYNLGPLSVINGDAKAVAKRKSVPTRKSMISDFEVKEGFNLIVMSPVAAGVGLTVVGANHVVHLERYWNPAKEAQATDRVYRIGQEKEVHIYIPLLHHPEFESFDVNLHRLLTQKTLLKDAVVTPEDVIPQPAGVGGVVSGDLIDKRITAAELDKLSWQQFEALCVELLAKITDSESAWLTNNGADHGADGVLLNNSGNILLQAKFTQRQYDGYKGIQEIHSAKPIYESAMRSSFGRLIFVTNSPLLAKRTHEIAATCGIEVLGRTQLLTYLEEYDITLKDILSRLGKDRLRV

SEQ ID NO: 3393 - protein, 578 aa, Vibrio cholerae
  MOD_RES (566)..(577): Any amino acid
MTDSLNLSSLWPDLSSLNVMPPQTPEQLSALFVVILWGVALFFLIWSVAAFIRARQRVVWLNKSLDDAEKSTLSGVRNDLISRAEQKKDSVGHLWLEFDETLLEVKGADDVVRLHNTFDADYFFNSSSLAGGSTENRMIAVVPGFLTALGVIGTFVGLQLGLSDLNIAGNVDVNEMKNGVAGVINGAKIAFMTSVWGVLLSVAFNFIEKILEQIIRKKIKSLQNRIDRMFPRLSAEYQLQSIANNSQQSRESLQGLAEKIGEKMQESLIQATQGIQQGLESSLEKIMAPAINKLVDETSDGNQKALESVLQSFMEGFGQQGEQQRVAMDSASQNVNKTLESMSVSMAAFVNKLEVQQNASSEREKELISTISVQVSELVTQGNEQKRVLTEFVEKQVSELGEQLTKRELAASEREQKLASSMESTIKDLVENVSAQSQVLTDFVQNQVVQLTQTFSERDGMASQMEKERNDIFVNQTQAMKAGTDELLAQVKAATESQQITTNSIIEQGKQLQNSIDSSVSASARATESMQQSANELRVAADSMNVFGSNIKDAGNKLSGAVTEAXXXXXXXXXXXXI

SEQ ID NO: 3394 - protein, 244 aa, Vibrio cholerae; identical to SEQ ID NO: 2537

SEQ ID NO: 3395 - protein, 483 aa, Vibrio cholerae; identical to SEQ ID NO: 2538

SEQ ID NO: 3396 - protein, 797 aa, Vibrio cholerae
  MOD_RES (7)..(9): Any amino acid
MHDKPEXXXKPGATVFDYEGQSYDISDPAAVEKVLNEIGHKISSPNTDLSSYGEAEDAETESEGSEIHVVDIDLNDEELSENSPKVEQLISDISWDGELNWENHKRTPFPHQDIGVRWILGVEQKSLSDSKVSGALLADDMGLGKTFMALSAIEHIYQRQQISGETKKPALIVAPLSLLENWKDEVDKTFKHSPFKDVVILQSSAELNEYRMGGVEIRGQSASDDCLEPKYSLKVGKYFGPSRLDLPERLVITTYQTLRDYQFSMCLIDWGIVVFDEAQNIKNPNALQTRAAKGLKADFKLVATGTPVENSLADFWCLMDTACPGHLGSYQEFRARYISPILKAAGDEVEEIRARLGRELRIAVGALMLRRIKEDNLKGLPLKHMYAGGEFENWKYLEELKSTMVGYQRDVYEGAISHQLENEESHALTTLMRLRDSSLHPRLSDGGRLDIPKNAKSARALYGESGKLVSLLETLDRVRSKQEKCIIFAVNKRLQSFLSVTLGQIYNLGPLSVINGDAKAVAKRKSVPTRKSMISDFEAKEGFNLIVMSPVAAGVGLTVVGANHVVHLERYWNPAKEAQATDRVYRIGQEKEVHIYIPLLHHPEFESFDVNLHRLLTQKTLLKDAVVTPEDVIPQPAGVGGVVSGDLIDKRITAAELDKLSWQQFEALCVELLAKITDSESAWLTNNGADHGADGVLLNNSGNILLQAKFTQRQYDGYKGIQEIHSAKPIYESAMRSSFGRLIFVTNSPLLAKRTHEIAATCGIEVLGRTQLLTYLEEYDITLKDILSRLGKDRLRV

SEQ ID NO: 3397 - protein, 687 aa, Vibrio cholerae; identical to SEQ ID NO: 2598

SEQ ID NO: 3398 - protein, 244 aa, Vibrio cholerae; identical to SEQ ID NO: 2537

SEQ ID NO: 3399 - protein, 483 aa, Vibrio cholerae; identical to SEQ ID NO: 2542

SEQ ID NO: 3400 - protein, 1149 aa, Vibrio cholerae; identical to SEQ ID NO: 2547

SEQ ID NO: 3401 - protein, 687 aa, Vibrio cholerae; identical to SEQ ID NO: 2602

SEQ ID NO: 3402 - protein, 244 aa, Vibrio cholerae; identical to SEQ ID NO: 2537

SEQ ID NO: 3403 - protein, 483 aa, Vibrio cholerae; identical to SEQ ID NO: 2538

SEQ ID NO: 3404 - protein, 1149 aa, Vibrio cholerae; identical to SEQ ID NO: 2547

SEQ ID NO: 3405 - protein, 571 aa, Vibrio cholerae
  MOD_RES (563)..(571): Any amino acid
MTDSLNLSSLWPDLSSLNVMPPQTPEQLSALFVVILWGVALFFLIWSVAAFIRARQRVVWLNKSLDDAEKSTLSGVRNDLISRAEQKKDSVGHLWLEFDETLLEVKGADDVVRLHNTFDADYFFNSSSLAGGSTENRMIAVVPGFLTALGVIGTFVGLQLGLSDLNIAGNVDVNEMKNGVAGVINGAKIAFMTSVWGVLLSVAFNFIEKILEQIIRKKIKSLQNRIDRMFPRLSAEYQLQSIANNSQQSRESLQGLAEKIGEKMQESLIQATQGIQQGLESSLEKIMAPAINKLVDETSDGNQKALESVLQSFMEGFGQQGEQQRVAMDSASQNVNKTLESMSVSMAAFVNKLEVQQNASSEREKELISTISVQVSELVTQGNEQKRVLTEFVEKQVSELGEQLTKRELAASEREQKLASSMESTIKDLVENVSAQSQVLTDFVQNQVVQLTQTFSERDGMASQMEKERNDIFVNQTQAMKAGTDELLAQVKAATESQQITTNSIIEQGKQLQNSIDSSVSASARATESMQQSANELRVAADSMNVFGSNIKDAGNKLSGAVXXXXXXXXX

SEQ ID NO: 3406 - protein, 244 aa, Vibrio cholerae; identical to SEQ ID NO: 2537

SEQ ID NO: 3407 - protein, 483 aa, Vibrio cholerae; identical to SEQ ID NO: 2542

SEQ ID NO: 3408 - protein, 1146 aa, Vibrio cholerae; identical to SEQ ID NO: 2543

SEQ ID NO: 3409 - protein, 706 aa, Vibrio cholerae; identical to SEQ ID NO: 2536

SEQ ID NO: 3410 - protein, 244 aa, Vibrio cholerae; identical to SEQ ID NO: 2537

SEQ ID NO: 3411 - protein, 483 aa, Vibrio cholerae; identical to SEQ ID NO: 2538

SEQ ID NO: 3412 - protein, 817 aa, Vibrio cholerae
MINPISKLTDRVRDKTTLEDVAKKIEDARQTGATVFDYEGQSYDISDPAAVEKVLNEIGHKISSPNTDLSSYGEAEDAETESEGSEIHVVDIDLNDEELSENSPKVEQLISDISWDGELNWENHKRTPFPHQDIGVRWILGVEQKSLSDSKVSGALLADDMGLGKTFMALSAIEHIYQRQQISGETKKPALIVAPLSLLENWKDEVDKTFKHSPFKDVVILQSSAELNEYRMGGVEIRGQSASDDCLEPKYSLKVGKYFGPSRLDLPERLVITTYQTLRDYQFSMCLIDWGIVVFDEAQNIKNPNALQTRAAKGLKADFKLVATGTPVENSLADFWCLMDTACPGHLGSYQEFRARYISPILKAAGDEVEEIRARLGRELRIAVGALMLRRIKEDNLKGLPLKHMYAGGEFENWKYLEELKSTMVGYQRDVYEGAISHQLENEESHALTTLMRLRDSSLHPRLSDGGRLDIPKNAKSARALYGESGKLVSLLETLDRVRSKQEKCIIFAVNKRLQSFLSVTLGQIYNLGPLSVINGDAKAVAKRKSVPTRKSMISDFEAKEGFNLIVMSPVAAGVGLTVVGANHVVHLERYWNPAKEAQATDRVYRIGQEKEVHIYIPLLHHPEFESFDVNLHRLLTQKTLLKDAVVTPEDVIPQPAGVGGVVSGDLIDKRITAAELDKLSWQQFEALCVELLAKITDSESAWLTNNGADHGADGVLLNNSGNILLQAKFTQRQYDGYKGIQEIHSAKPIYESAMRSSFGRLIFVTNSPLLAKRTHEIAATCGIEVLGRTQLLTYLEEYDITLKDILSRLGKDRLRV

SEQ ID NO: 3413 - protein, 605 aa, Vibrio cholerae
MLEVKGADDVVRLHNTFDADYFFNSSSLAGGSTENRMIAVVPGFLTALGVIGTFVGLQLGLSDLNIAGNVDVNEMKNGVAGVINGAKIAFMTSVWGVLLSVAFNFIEKILEQIIRKKIKSLQNRIDRMFPRLSAEYQLQSIANNSQQSRESLQGLAEKIGEKMQESLIQATQGIQQGLESSLEKIMAPAINKLVDETSDGNQKALESVLQSFMEGFGQQGEQQRVAMDSASQNVNKTLESMSVSMAAFVNKLEVQQNASSEREKELISTISVQVSELVTQGNEQKRVLTEFVEKQVSELGEQLTKRELAASEREQKLASSMESTIKDLVENVSAQSQVLTDFVQNQVVQLTQTFSERDGMASQMEKERNDIFVNQTQAMKAGTDELLAQVKAATESQQITTNSIIEQGKQLQNSIDSSVSASARATESMQQSANELRVAADSMNVFGSNIKDAGNKLSGAVTEAVNSTKDLAEQNHLGAVKVQALREQLLEDTSKFSAIADQINNMLISAEQSFSTLRTTQNEFLAEQKGNLNELTSEMKRNVKELTEQMAQLLEDYAEQANGQTAEHLKVWANSSTQYAESMNTAVRAISSVVDEIQDKVSQHA

SEQ ID NO: 3414 - protein, 244 aa, Vibrio cholerae; identical to SEQ ID NO: 2537

SEQ ID NO: 3415 - protein, 307 aa, Vibrio cholerae; identical to SEQ ID NO: 3083

SEQ ID NO: 3416 - protein, 239 aa, Vibrio cholerae
MVGANHVVHLERYWNPAKEAQATDRVYRIGQEKEVHIYIPLLHHPEFESFDVNLHRLLTQKTLLKDAVVTPEDVIPQPAGVGGVVSGDLIDKRITAAELDKLSWQQFEALCVELLAKITDSESAWLTNNGADHGADGVLLNNSGNILLQAKFTQRQYDGYKGIQEIHSAKPIYESAMRSSFGRLIFVTNSPLLAKRTHEIAATCGIEVLGRTQLLTYLEEYDITLKDILSRLGKDRLRV

SEQ ID NO: 3417 - protein, 687 aa, Vibrio cholerae; identical to SEQ ID NO: 2602

SEQ ID NO: 3418 - protein, 244 aa, Vibrio cholerae; identical to SEQ ID NO: 2537

SEQ ID NO: 3419 - protein, 483 aa, Vibrio cholerae; identical to SEQ ID NO: 2538

SEQ ID NO: 3420 - protein, 1149 aa, Vibrio cholerae; identical to SEQ ID NO: 2547

SEQ ID NO: 3421 - protein, 687 aa, Vibrio cholerae; identical to SEQ ID NO: 2598

SEQ ID NO: 3422 - protein, 244 aa, Vibrio cholerae; identical to SEQ ID NO: 2537

SEQ ID NO: 3423 - protein, 483 aa, Vibrio cholerae; identical to SEQ ID NO: 2538

SEQ ID NO: 3424 - protein, 1149 aa, Vibrio cholerae; identical to SEQ ID NO: 2547

SEQ ID NO: 3425 - protein, 687 aa, Vibrio cholerae; identical to SEQ ID NO: 2598

SEQ ID NO: 3426 - protein, 244 aa, Vibrio cholerae; identical to SEQ ID NO: 2537

SEQ ID NO: 3427 - protein, 483 aa, Vibrio cholerae; identical to SEQ ID NO: 2538

SEQ ID NO: 3428 - protein, 1149 aa, Vibrio cholerae; identical to SEQ ID NO: 2547

SEQ ID NO: 3429 - protein, 687 aa, Vibrio cholerae; identical to SEQ ID NO: 2598

SEQ ID NO: 3430 - protein, 244 aa, Vibrio cholerae
MRRGVRSHTQNSVDEENPYWVSFSDLMSALLVIFILAAVALIIELTQKTNDVEAGIEELKQAELARKNIIYDVRDELAKRNVIVEIADNDTVIRIPESTLTFASGKSSIPNDATIQQAVKDIGVVLHSAIQKKDRFQYLDTIFIEGHTDSDSIHYRGKGNWGLSTDRAISVWNVWQNELSLTPKLGDLENAYHAKLFSVSGYAATRRANLHEANQQEKSQNRCIDIRFTVKKPSIAELERIVGP

SEQ ID NO: 3431 - protein, 483 aa, Vibrio cholerae; identical to SEQ ID NO: 2542

SEQ ID NO: 3432 - protein, 1146 aa, Vibrio cholerae; identical to SEQ ID NO: 2543

SEQ ID NO: 3433 - protein, 687 aa, Vibrio cholerae; identical to SEQ ID NO: 2598

SEQ ID NO: 3434 - protein, 244 aa, Vibrio cholerae; identical to SEQ ID NO: 2537

SEQ ID NO: 3435 - protein, 483 aa, Vibrio cholerae; identical to SEQ ID NO: 2538

SEQ ID NO: 3436 - protein, 1149 aa, Vibrio cholerae; identical to SEQ ID NO: 2547

SEQ ID NO: 3437 - protein, 687 aa, Vibrio cholerae; identical to SEQ ID NO: 2598

SEQ ID NO: 3438 - protein, 244 aa, Vibrio cholerae; identical to SEQ ID NO: 2537

SEQ ID NO: 3439 - protein, 483 aa, Vibrio cholerae; identical to SEQ ID NO: 2538

SEQ ID NO: 3440 - protein, 1149 aa, Vibrio cholerae; identical to SEQ ID NO: 2547

SEQ ID NO: 3441 - protein, 712 aa, Vibrio cholerae
  MOD_RES (561)..(573): Any amino acid
MTDSLNLSSLWPDLSSLNVMPPQTPEQLSALFVVILWGVALFFLIWSVAAFIRARQRVVWLNKSLDDAEKSTLSGVRNDLISRAEQKKDSVGHLWLEFDETLLEVKGADDVVRLHNTFDADYFFNSSSLAGGSTENRMIAVVPGFLTALGVIGTFVGLQLGLSDLNIAGNVDVNEMKNGVAGVINGAKIAFMTSVWGVLLSVAFNFIEKILEQIIRKKIKSLQNRIDRMFPRLSAEYQLQSIANNSQQSRESLQGLAEKIGEKMQESLIQATQGIQQGLESSLEKIMAPAINKLVDETSDGNQKALESVLQSFMEGFGQQGEQQRVAMDSASQNVNKTLESMSVLMAAFVNKLEVQQNASSEREKELISTISVQVSELVTQGNEQKRVLTEFVEKQVSELGEQLTKRELAASEREQKLASSMESTIKDLVENVSAQSQVLTDFVQNQVVQLTQTFSERDGMASQMEKERNDIFVNQTQAMKAGTDELLAQVKAATESQQITTNSIIEQGKQLQNSIDSSVSASARATESMQQSANELRVAADSMNVFGSNIKDAGNKLSGXXXXXXXXXXXXXSTKDLAEQNHLGAVKVQALREQLLEDTSKFSAIADQINNMLISAEQSFSTLRTTQNEFLAEQKGNLNELTSEMKRNVKELTEQMAQLLEDYAEQANGQTAEHLKVWANSSTQYAESMNTAVRAISSVVDEIQDKVSQHA

SEQ ID NO: 3442 - protein, 244 aa, Vibrio cholerae; identical to SEQ ID NO: 2537

SEQ ID NO: 3443 - protein, 483 aa, Vibrio cholerae; identical to SEQ ID NO: 2538

SEQ ID NO: 3444 - protein, 902 aa, Vibrio cholerae; identical to SEQ ID NO: 3144

SEQ ID NO: 3445 - protein, 706 aa, Vibrio cholerae; identical to SEQ ID NO: 2536

SEQ ID NO: 3446 - protein, 244 aa, Vibrio cholerae; identical to SEQ ID NO: 2537

SEQ ID NO: 3447 - protein, 483 aa, Vibrio cholerae; identical to SEQ ID NO: 2538

SEQ ID NO: 3448 - protein, 1149 aa, Vibrio cholerae; identical to SEQ ID NO: 2547

SEQ ID NO: 3449 - protein, 706 aa, Vibrio cholerae; identical to SEQ ID NO: 2536

SEQ ID NO: 3450 - protein, 244 aa, Vibrio cholerae; identical to SEQ ID NO: 2537

SEQ ID NO: 3451 - protein, 483 aa, Vibrio cholerae; identical to SEQ ID NO: 2538

SEQ ID NO: 3452 - protein, 1149 aa, Vibrio cholerae; identical to SEQ ID NO: 2547

SEQ ID NO: 3453 - protein, 687 aa, Vibrio cholerae; identical to SEQ ID NO: 2602

SEQ ID NO: 3454 - protein, 244 aa, Vibrio cholerae; identical to SEQ ID NO: 2537

SEQ ID NO: 3455 - protein, 483 aa, Vibrio cholerae; identical to SEQ ID NO: 2538

SEQ ID NO: 3456 - protein, 1149 aa, Vibrio cholerae; identical to SEQ ID NO: 2547

SEQ ID NO: 3457 - protein, 687 aa, Vibrio cholerae; identical to SEQ ID NO: 3081

SEQ ID NO: 3458 - protein, 244 aa, Vibrio cholerae; identical to SEQ ID NO: 2537

SEQ ID NO: 3459 - protein, 483 aa, Vibrio cholerae; identical to SEQ ID NO: 2538

SEQ ID NO: 3460 - protein, 1149 aa, Vibrio cholerae; identical to SEQ ID NO: 2547

SEQ ID NO: 3461 - protein, 244 aa, Vibrio cholerae O1 biovar El Tor; identical to SEQ ID NO: 2537

SEQ ID NO: 3462 - protein, 483 aa, Vibrio cholerae O1 biovar El Tor; identical to SEQ ID NO: 2538

SEQ ID NO: 3463 - protein, 1149 aa, Vibrio cholerae O1 biovar El Tor; identical to SEQ ID NO: 2547

SEQ ID NO: 3464 - protein, 706 aa, Vibrio cholerae O1 biovar El Tor; identical to SEQ ID NO: 2566

SEQ ID NO: 3465 - protein, 244 aa, Vibrio cholerae O1 biovar El Tor; identical to SEQ ID NO: 2537

SEQ ID NO: 3466 - protein, 483 aa, Vibrio cholerae O1 biovar El Tor; identical to SEQ ID NO: 2538

SEQ ID NO: 3467 - protein, 1149 aa, Vibrio cholerae O1 biovar El Tor; identical to SEQ ID NO: 2547

SEQ ID NO: 3468 - protein, 706 aa, Vibrio cholerae O1 biovar El Tor; identical to SEQ ID NO: 2536

SEQ ID NO: 3469 - protein, 244 aa, Vibrio cholerae O1 biovar El Tor; identical to SEQ ID NO: 2537

SEQ ID NO: 3470 - protein, 483 aa, Vibrio cholerae O1 biovar El Tor; identical to SEQ ID NO: 2538

SEQ ID NO: 3471 - protein, 1149 aa, Vibrio cholerae O1 biovar El Tor; identical to SEQ ID NO: 2547

SEQ ID NO: 3472 - protein, 706 aa, Vibrio cholerae O1 biovar El Tor; identical to SEQ ID NO: 2536

SEQ ID NO: 3473 - protein, 244 aa, Vibrio cholerae O1 biovar El Tor; identical to SEQ ID NO: 2537

SEQ ID NO: 3474 - protein, 483 aa, Vibrio cholerae O1 biovar El Tor; identical to SEQ ID NO: 2538

SEQ ID NO: 3475 - protein, 1149 aa, Vibrio cholerae O1 biovar El Tor; identical to SEQ ID NO: 2547

SEQ ID NO: 3476 - protein, 706 aa, Vibrio cholerae; identical to SEQ ID NO: 2536

SEQ ID NO: 3477 - protein, 244 aa, Vibrio cholerae; identical to SEQ ID NO: 2537

SEQ ID NO: 3478 - protein, 483 aa, Vibrio cholerae; identical to SEQ ID NO: 2538

SEQ ID NO: 3479 - protein, 1149 aa, Vibrio cholerae; identical to SEQ ID NO: 2547

SEQ ID NO: 3480 - protein, 706 aa, Vibrio cholerae O1 str. KW3; identical to SEQ ID NO: 2566

SEQ ID NO: 3481 - protein, 244 aa, Vibrio cholerae O1 str. KW3; identical to SEQ ID NO: 2537

SEQ ID NO: 3482 - protein, 483 aa, Vibrio cholerae O1 str. KW3; identical to SEQ ID NO: 2538

SEQ ID NO: 3483 - protein, 1149 aa, Vibrio cholerae O1 str. KW3; identical to SEQ ID NO: 2547

SEQ ID NO: 3484 - protein, 706 aa, Vibrio cholerae; identical to SEQ ID NO: 2536

SEQ ID NO: 3485 - protein, 244 aa, Vibrio cholerae; identical to SEQ ID NO: 2537

SEQ ID NO: 3486 - protein, 483 aa, Vibrio cholerae; identical to SEQ ID NO: 2542

SEQ ID NO: 3487 - protein, 1146 aa, Vibrio cholerae; identical to SEQ ID NO: 2543

SEQ ID NO: 3488 - protein, 244 aa, Vibrio cholerae; identical to SEQ ID NO: 2537

SEQ ID NO: 3489 - protein, 483 aa, Vibrio cholerae; identical to SEQ ID NO: 2538

SEQ ID NO: 3490 - protein, 1149 aa, Vibrio cholerae; identical to SEQ ID NO: 2547

SEQ ID NO: 3491 - protein, 706 aa, Vibrio cholerae O1 biovar El Tor; identical to SEQ ID NO: 2536

SEQ ID NO: 3492 - protein, 244 aa, Vibrio cholerae O1 biovar El Tor; identical to SEQ ID NO: 2537

SEQ ID NO: 3493 - protein, 483 aa, Vibrio cholerae O1 biovar El Tor; identical to SEQ ID NO: 2538

SEQ ID NO: 3494 - protein, 706 aa, Vibrio cholerae O1 biovar El Tor; identical to SEQ ID NO: 2536

SEQ ID NO: 3495 - protein, 244 aa, Vibrio cholerae O1 biovar El Tor; identical to SEQ ID NO: 2537

SEQ ID NO: 3496 - protein, 483 aa, Vibrio cholerae O1 biovar El Tor; identical to SEQ ID NO: 2538

SEQ ID NO: 3497 - protein, 1149 aa, Vibrio cholerae O1 biovar El Tor; identical to SEQ ID NO: 2547

SEQ ID NO: 3498 - protein, 706 aa, Vibrio cholerae; identical to SEQ ID NO: 2536

SEQ ID NO: 3499 - protein, 244 aa, Vibrio cholerae; identical to SEQ ID NO: 2537

SEQ ID NO: 3500 - protein, 483 aa, Vibrio cholerae; identical to SEQ ID NO: 2538

SEQ ID NO: 3501 - protein, 1149 aa, Vibrio cholerae; identical to SEQ ID NO: 2547

SEQ ID NO: 3502 - protein, 706 aa, Vibrio cholerae; identical to SEQ ID NO: 2536

SEQ ID NO: 3503 - protein, 244 aa, Vibrio cholerae; identical to SEQ ID NO: 2537

SEQ ID NO: 3504 - protein, 483 aa, Vibrio cholerae; identical to SEQ ID NO: 2538

SEQ ID NO: 3505 - protein, 1149 aa, Vibrio cholerae; identical to SEQ ID NO: 2547

SEQ ID NO: 3506 - protein, 706 aa, Vibrio cholerae O1 biovar El Tor; identical to SEQ ID NO: 2566

SEQ ID NO: 3507 - protein, 244 aa, Vibrio cholerae O1 biovar El Tor; identical to SEQ ID NO: 2537

SEQ ID NO: 3508 - protein, 483 aa, Vibrio cholerae O1 biovar El Tor; identical to SEQ ID NO: 2538

SEQ ID NO: 3509 - protein, 1149 aa, Vibrio cholerae O1 biovar El Tor; identical to SEQ ID NO: 2547

SEQ ID NO: 3510 - protein, 728 aa, Haemophilus paraphrohaemolyticus HK411
MDALLAFFSKFFPGLPYSINPQTGEWIIDQSAQSNLLTLIILIILVICFFIYWCKVQSQYKDSVKGIQFYEKYITGVEQDKEQNQLAEKRRELLEQAKESKKFGAIWQEFNESLVEVEITKDKRKLYNTADAAYFFNNHTLAGGLTENRLFSAVPGFLTAIGVLGTFLGLTFGLGGLSEHFKEGATPKEIMEGINLMVSGASTAFITSLYGVITSLIFNWKEKALERKVKNRITKLQVRIDAIFPRIVAEQTLTEIKAINRDTETHLASLSEKIGEQMQKVMKDISSEISRSITDSLKESLAPAVTNMMENSREGSEKMVEVLLQEFISKIGNAGEMQKNAMNNASQAFAESSTQMMSRLSIFVEQLDAKVTEVRDGTRQMLEQMQQHFSTQIGDMQSQTQQQNEQAVEFMQTLSSSMIEFNQHNQSMFSSMQTMLSEKAEEQSLQFAKREQDLTVSTNNFMEKLTQAIETLNNNNSQMLKAMESGLTERINTQAEADKARSEDFIQQAEKGRQTQQILTDSVKEVLATQGKQNDELSLQLTTLANSFERVAQAHKASSESMENASAKINSSATGFDNVATRLKAALTEFDTKLATMLINVEKVTRENSNTATLFNASTSRLETSGVFLEKTADNLSDTAHTTKAAFESMQTNFNQFALQLRTHIEALNAEVSKLLVDYSKQVQSQTNNRLNEWNNQTREYTTNMVNAVKALSDTVDEIETKLPHRGA

SEQ ID NO: 3511 - protein, 263 aa, Haemophilus paraphrohaemolyticus HK411
MRWCNPNSSASTDEENPYWMSFSDMMASLLVIFMLAAAALMLQLVIKTEDLEKKSQKVDKQVDEVARAEKVRKQIIDEIVDELKQKQIVVEKSDNDTVLHIPESSLRFASGSSDIPESLQANVREIGNVLYEALNRDIESQNKEKRARFTLLDTVFIEGHTDNNFYKNPMLRGNWGLSAMRAISVWQFWADDPNQVSNGLSQMINHANEALFSVSGYGDTRPRDDAKHCEKNDDICHSKNRRIDIRITVKKPSIKDLEEIKGK

SEQ ID NO: 3512 - protein, 507 aa, Haemophilus paraphrohaemolyticus HK411
MSDELKLPCISLPSITFTLPEREINLTKEVKKLAQLTKRAGMGSDVFKTNFLRISSALEKGEFSPFMLQTPNQVRAYLTIATSNEVKDEVKKQVHLSPELIDQFAAVRSPMSRLSLMMLIQLYFDRFDTLESGENFENLCKFLKNQVNKLDKIRQRKEAVDLVKSDLARYTEFASQLFSPTAPHKIVKMARQNQQDFTHTLQDMGIVAFKNGRLLQISQSIYYIETLKTIPLGEYHQIFEEVTKADIIQVQYDKHYWIGHKVVEILIDRTAKEGGEISEVWQNVILDIADDPRIASEINLNQWWLPLGEKRVEQMRSWLSRHDLKLFLKLLEQSAIDLGKAKMERMFADRKRFLEALFDKDLIRHSRLFFTREAANYLRYHYAEPHRLDAYARVSGEASVIYLQLKNGWHLVEGTHSFRVRYFHQIPKHSRIADYQHRFYERDELSGGLEGWYRLNFGKQMYSTAHDVHSSWKFKLLDWFKKTGINLPADEVLDSWEYYRYREKNGA

SEQ ID NO: 3513 - protein, 999 aa, Haemophilus paraphrohaemolyticus HK411
MGLLDLIKSFISTSKIEEKIQWKINAFEDIEFIFPPQAVENPESFAKNNPFFALQYGYLKALQDSYSINRVSDGFIVPSIILPDLGEDFIHLFEMPPHFTGSYQIDIRGNTTRTDFSVNLKLLMPDGSTVFQPQRLGAFLSLTNKEKYSLTPAEYQALKALERHQELREKDRSEYENNWLMFQLQTAKVVGMPIDLAHFNQGNLNLVKPETIGVAVNQLANGDIELIPAIKGVAPEDIRERLGQLDKQDKRILRVKKQFVLFDEKTISAINEIFPVDENGESRHIRRINKAEVANFLKNPTAYLNGAVVDLDTGFSLRVAGAEKFVYKYFGGEQESGIDWLGDQHFINSPIAFEEIIRSEAELEEVKALIENARNVGASVIQVGEASIDISDTETVETILAKITQSIQNQDEDEENGIPSDTDNAEQSEKAVVDIEDNDEENRFKRFVSLLNLQEIPPLDQENLKRLPYPHQQEGIHWILSHLKTIEQEQTESGALLADDMGLGKTYMTLVSIAEYYRRQNELSKTLKPILVVAPLSLLENWQAELDETFKQLPFDDVIVLQGQGLKKYRLSGSEIKQHLHNDVASADEIRYSLKVGNNYKQDRLDMPARLVLTTYQTLRDYQFSLCRIDWGMVIFDEAQNLKNPNTLATRAAKGLKSEFKLLATGTPVENSLKDFWCLMDTATPGLLGSWREFRETYITPILKADESETDEKKYEIGRILREKVDRFMLRRTKAEKLKGLPEKVIYSGCRSDQHYLPQLEALMKGVQLQSYNDVVTRIRNATNKQGLMLASLRDLKMISIHPQIRDLESKNYLPDANLSAKIGSLLSIIKEIKQRQEKVIIFAESKLVQSYLIALMMIDYGISVDVINGETAAVATSKNTRSRKNIIDAFQAQQGFGVLIMSPVAAGVGLTVTGANNVIHLERHWNPAKEAQATDRVYRIGQQKQVNVYLPMAVHPEIRSFDLQLHQLLNNKVDLSEAVVENPDIESEQMMSMFNYQY

SEQ ID NO: 3514 - protein, 677 aa, Gallibacterium anatis
MSFEAILRKYQGQFAEHLDDDMTEEIKQLNAPRISVAWEEFQKHLVRGRNFFNQPELRSVVGAEYFFNSTNLVSRAGSKLYSAVPSILLGIGLIGTFFGLYYGLMRVDFKDAASMQVLLQAAGAKFVASIWGLVLSLVFTGYEKNKEQKLDEQLVRIQNLINHEIPRQLSEQSLVELEIYASEQRDQLNSLSLNIAEALGEKITASLVDNLLVPIQNMARNLGGTPENTLYDRLSVLAGGIGDNFSRNMDELLRNVIKEISSTVGADADKLKQTLQSLEESLAGLKATFESQQKQMSDNTSHHLKTLGESIKTMTEGIENQNRELKQSLAGLSHTMSEQTSELSQSLSVLSLQMNRQSEVLEQSIEKIAQGAQLSQQNITDSSKNVVDLLNQQAGKVSEQIEGKATEALGRIEQTMLDQAKHFETALAGLKVQMTEQSHLLKEVVDEIGKNAGIANEKLASGSQAAFIQIQQALQDVRETITDSQKKLQDIPDHLERFHTSTQTLGNMADSTKDASLRLQQVVEGLQDSQSKWHSAIQQSITSFAQSLSTFGGSLSSQEQQLSRISQQLNTIVRDTQNVCQQLASSYEEIIGTNSESAQQLREQLDGYLSAFIQKIKNIQDEMNQRCEDSYAQMSEHFQDALAKLEQPLESFGKAVSDACSELNDSIHELSVPRHKS

SEQ ID NO: 3515 - protein, 298 aa, Gallibacterium anatis
MRRLSMRTKLDVKEENHYWISISDLMTSLLFIFILAFAYTVKSIQEEVPNIEELERLRQENITLKMRVAELTQENLILSEKVTALTKENQTLKDELKLLREENQSLKEQLVDLKAQSLVAGENFTQRAQLLLLVQQKLKEKNIDVDIDPKNGNMRINSEVLFESGSAILKENGKQVIGEIAIQIKEKLANNEKYRRAIDTIFIEGHTDSTPFNRGYCFGRPCSNMELSSQRAINTYIYMDEAANIALMKNALGKQLFSYSGYADTRPIEGNDNSTPENRAKNRRIELFFALHNPQNKG

SEQ ID NO: 3516 - protein, 479 aa, Gallibacterium anatis
MSIHHGFDRYPTKKFLNGLEKSTKQLVQIANGSGSNLEEEYQKMRVAMWQFIRQENTTLSLSTLREKKLALLVLRNEKYKVGQESRDCLSLLWQSKKWMTFFDLIQLNISIGAESLCKRLLRLYYQHYLFFWNNKYDSDGQGRSEAEKLTCFFKVLRYCADRAPGKQTSVQAVKQYPQLILDDNKHLSLLDSDEPMEDLQKRFGWEDGDNIVAFVQLRRLLQEVKTWSANEYNARIQMTLEEVLRYKDAHINSGRTLLEEVVREMLVKCKSINQIRARWENFIILNVGDPRNSRALSAWRRIGEEYRKWLYSHLSRGDLREFLENLTSAGGDEIFKYRRKFWLQYIDYLVYAKIMLGENDYLKLQRENPEFARRFDEHPETYGRMKDSDKSCIYMQIRNLHIIEGTFSAKVRFYAKIPINLSHRDYKYADFYSAQTRRKARLIDEYVHNASDSYHWQRILIKDINRLTGIRMSLQDVML

SEQ ID NO: 3517 - protein, 1033 aa, Gallibacterium anatis
MLTITLKDNYEKFVAKRLFDDGLVQSFDGKDTMVMTDEQVYHLLEEEDSVLDRFSLPEVFNGYLGIQMRGLPIQPSCQFLVTFVDERGRAMMGAKQSGCLLLLGNSKQYLLPRHFFDLLSLQQQLMHSYNEALCWKIIEIAKNDVSKKIIFKGLPENDVVTDVHYVSIDLQLHDDGSATPKPRIQNLSQQTQAVADVKLLNPDCLLLVISHVQDGHQIRYIAQKDVIMAYRRIQNIGTLSKENLIKFQENPIAFVLEEDESENDFPINFDSFRIIGAGEPYVGYFGSKNLDSPIAAALFSDDKQIKKQVSEKVNKVCQSASTEELETYIQRIQEAQQNHLAEVDFGGEKLYPVEYASALDLLEKMKKEEMIGGALYADAENDSSLVLQIQPNDEETFKFREKELEKLAAINTANDNPGDLFDHLAFPPKSYQVAGVNWLVDLYQQGFKGGILADDMGLGKTYQLISFIYFLLRRTEFQAEGKKRILIVAPTILLDNWQNEFAKFLPPEVHQKLVIQTLKAGHLSRIKREEHNQQGKYNTFDVDKFLSKNQDIIITSYETLANYQFAFVDERFNFGCIIFDEAHKIKNPNAKISQAARAIGSLIKFCVLLTGTPIENELRDLWALFDVFAPEHFGSWKSFREEFINVAEEGLDKKLRECCSNYLLRRLKKDYLGHELPQKIEKTYEVVFSGEEVAQYHQYRHSGLDAITKLHKLKSFSLHRQLANGEVSNIRLDDFSKSKKLIEVLEQIRQKQEKVIIFVMRRAAQDLLRYGLNQHFGLDIQIINGDNNKNAEHLLHRFRTSQGFDVIILSTLAAGVGLTLTEANHVIHYERWWNASKEDQASDRVYRIGQAKDVFIHHILGTMPNDEISIDKAIHQLISQKRTTAGFLIPPKSVSTNEVGTMVIPSLSLEEKLGLLEWTEFEKLVATLYRRLGYTVELTPSDSRDYGADVIAYKGSEKLAIQCKHSSNAQAKNQEAVYQLVTEAKDYYSPTHLIAICNTKFTKTTHTLAQQHGIQLIEKEGLIDLIEKTELSI

SEQ ID NO: 3518 - protein, 677 aa, Gallibacterium anatis
MSFEAILRKYQGQFAEHLDDDMTEEIKQLNAPRISVAWEEFQKHLVRGRNFFNQPELRSVVGAEYFFNSTNLVSRAGSKLYSAVPSILLGIGLIGTFFGLYYGLMRVDFKDAASMQVLLQAAGAKFVASIWGLVLSLVFTGYEKNKEQKLDEQLVRIQNLINHEIPRQLSEQSLVELEIYASEQRDQLNSLSLNIAEALGEKITASLVDNLLVPIQNMARNLGGTPENTLYDRLSVLAGGIGDNFSRNMDELLRNVIKEISSTVGADADKLKQTLQSLEESLAGLKATFESQQKQMSDNTSYHLKTLGESIKTMTEGIGNQNRELKQSLAGLSHTMSEQTSELSQSLSVLSLQMNRQSEVLEQSIEKIAQGAQLSQQNITDSSKNVVDLLNQQAGKVSEQIEGKATEALGRIEQTMLDQAKHFETALAGLKVQMTEQSHLLKEVVDEIGKNAGIANEKLASGSQAAFIQIQQALQDVRETITDSQKKLQDIPDHLERFHTSTQTLGNMADSTKDASLRLQQVVEGLQDSQSKWHSAIQQSITSFAQSLSTFGGSLSSQEQQLSRISQQLNTIVRDTQNVCQQLASSYEEIIGTNSESAQQLREQLDGYLSAFIQKIKNIQDEMNQRCEDSYAQMSEHFQDALAKLEQPLESFGKAVSDACSELNDSIHELSVPRHKS

SEQ ID NO: 3519 - protein, 298 aa, Gallibacterium anatis; identical to SEQ ID NO: 3515

SEQ ID NO: 3520 - protein, 479 aa, Gallibacterium anatis
MSIHHGFDRYPTKKFLNGLEKSTKQLVQIANGSGSNLEEEYQKMRVAMWQFIRQDNTTLSLSTLREKKLALLVLRNEKYKVGQESRDCLSLLWQSKKWMTFFDLIQLNISIGAESLCKRLLRLYYQHYLFFWNNKYDSDGQGRSEAEKLTCFFKVLRYCADRAPGKQTSVQAVKQYPQLILDDNKHLSLLDSDEPMEDLQKRFGWEDGDNIVAFVQLRRLLQEVKTWSANEYNARIQMTLEEVLRYKGAHINSGRTLLEEVVREMLVKCKSINQIRARWENFIILNVGDPRNSRALSAWRRIGEEYRKWLYSHLSRGDLREFLENLTSAGGDEIFKYRRKFWLQYIDYLVYAKIMLGENDYLKLKRENPEFARRFDEYPETYGRMYGRDKSCIYMQIKNLHIIEGTFSAKVRLYEERPIDLSHRYYEYTDFYSAQTKRKARLIDEYVHNASDSYHWQRILIKDINRLTGIRMSLQDVML

SEQ ID NO: 3521 - protein, 1033 aa, Gallibacterium anatis
MLTITLKDNYEKFVAKRLFDDGLVQSFDGKDTMVMTDEQVYHLLEEEDSVLDRFSLPEVFNGYLGIQMRGLPIQPSCQFLVTFVDERGRAMMGAKQSGCLLLLGNSKQYLLPRHFFDLLSLQQQLMHSYNEALCWKIIEIAKNDVSKKIIFKGLPENDVVTDVHYVSIDLQLHDDGSATPKPRIQNLSQQTQAVADVKLLNPDCLLLVISHVQDGHQIRYIAQKDVIMAYRRIQNIGTLSKENLIKFQENPIAFVLEEDESENDFPINFDSFRIIGAGEPYVGYFGSKNLDSPIAAALFSDDKQIKKQVSEKVNKVCQSASTEELETYIQRIQEAQQNHLAEVDFGGEKLYPVEYASALDLLEKMKKEEMIGGALYADAENDSSLVLQIQPNDEETFKFREKELEKLAAINTANDNPGDLFDHLAFPPKSYQVAGVNWLVDLYQQGFKGGILADDMGLGKTYQLISFIYFLLRRTEFQAEGKKRILIVAPTILLDNWQNEFAKFLPPEVHQKLVIQTLKAGHLSRIKREEHNQQGKYNTFDVDKFLSKNQDIIITSYETLANYQFAFVDERFNFGCIIFDEAHKIKNPNAKISQAARAIGSLIKFCVLLTGTPIENELRDLWALFDVFAPEHFGSWKSFREEFINVAEEGLDKKLRERCSNYLLRRLKKDYLGHELPQKIEKTYEVVFSGEEVAQYHQYRHSGLDAITKLHKLKSFSLHRQLANGEVSNIRLDDFSKSKKLIEVLEQIRQKQEKVIIFVMRRAAQDLLRYGLNQHFGLDIQIINGDNNKNAEHLLHRFRTSQGFDVIILSTLAAGVGLTLTEANHVIHYERWWNASKEDQASDRVYRIGQAKDVFIHHILGTMPNDEISIDKAIHQLISQKRTTAGFLIPPKSVSTNEVGTMVIPSLSLEEKLGLLEWTEFEKLVATLYRRLGYTVELTPSDSRDYGADVIAYKGSEKLAIQCKHSSNAQAKNQEAVYQLVTEAKDYYSPTHLIAICNTKFTKTTHTLAQQHGIQLIEKEGLIDLIEKTELSI

SEQ ID NO: 3522 - protein, 677 aa, Gallibacterium anatis 7990; identical to SEQ ID NO: 3514

SEQ ID NO: 3523 - protein, 298 aa, Gallibacterium anatis 7990; identical to SEQ ID NO: 3515

SEQ ID NO: 3524 - protein, 479 aa, Gallibacterium anatis 7990
MSIHHGFDRYPTKKFLNGLEKSTKQLVQIANGSGSNLEEEYQKMRVAMWQFIRQENTTLSLSTLREKKLALLVLRNEKYKVGQESRDCLSLLWQSKKWMTFFDLIQLNISIGAESLCKRLLRLYYQHYLFFWNNKYDSDGQGRSEAEKLTCFFKVLRYCADRAPGKQTSVQAVKQYPQLILDDNKHLSLLDSDEPMEDLQKRFGWEDGDNIVAFVQLRRLLQEVKTWSANEYNARIQMTLEEVLRYKDAHINSGRTLLEEVVREMLVKCKSINQIRARWENFIILNVGDPRNSRALSAWRRIGEEYRKWLYSHLSRGDLREFLENLTSAGGDEIFKYRRKFWLQYIDYLVYAKIMLGENDYLKLQRENPEFARRFDEHPETYGRMKDSDKSCIYMQIRNLHIIEGTFSAKVRFYAEIPINLSHRDYKYADFYSAQTKRKARLIDEYVHNASDSYHWQHILIKDINRLTGISMSLQDVML

SEQ ID NO: 3525 - protein, 1033 aa, Gallibacterium anatis 7990
MLTITLKDNYEKFVAKRLFDDGLVQSFDGKDTMVMTDEQVYHLLEEEDSVLDRFSLPEVFNGYLGIQMRGLPIQPSCQFLVTFVDERGRAMMGAKQSGCLLLLGNSKQYLLPRHFFDLLSLQQQLMHSYNEALCWKIIEIAKNDVSKKIIFKGLPENDVVTDVHYVSIDLQLHGDGSATPKPRIQNLSQQTQAVADVKLLNPDCLLLVISHVQDGHQIRYIAQKDVIMAYRRIQNIGTLSKENLIKFQENPIAFVLEEDESENDFPINFDSFRIIGAGEPYVGYFGSKNLDSPIAAALFSDDKQIKKQVSEKVNKVCQSASTEELETYIQRIQEAQQNHLAEVDFGGEKLYPVEYASALDLLEKMKKEEMIGGALYADAENDSSLVLQIQPNDEETFKFREKELEKLAAINTANDNPGDLFDHLAFPPKSYQVAGVNWLVDLYQQGFKGGILADDMGLGKTYQLISFIYFLLRRTEFQAEGKKRILIVAPTILLDNWQNEFAKFLPPEVHQKLVIQTLKAGHLSRIKREEHNQQGKYNTFDVDKFLSKNQDIIITSYETLANYQFAFVDERFNFGCIIFDEAHKIKNPNAKISQAARAIGSLIKFCVLLTGTPIENELRDLWALFDVFAPEHFGSWKSFREEFINVAEEGLDKKLRECCSNYLLRRLKKDYLGHELPQKIEKTYEVVFSGEEVAQYHQYRHSGLDAITKLHKLKSFSLHRQLANGEVSNIRLDDFSKSKKLIEVLEQIRQKQEKVIIFVMRRAAQDLLRYGLNQHFGLDIQIINGDNNKNAEHLLHRFRTSQGFDVIILSTLAAGVGLTLTEANHVIHYERWWNASKEDQASDRVYRIGQAKDVFIHHILGTMPNDEISIDKAIHQLISQKRTTAGFLIPPKSVSTNEVGTMVIPSLSLEEKLGLLEWTEFEKLVATLYRRLGYTVELTPSDSRDYGADVIAYKGSEKLAIQCKHSSNAQAKNQEAVYQLVTEAKDYYSPTHLIAICNTKFTKTTHTLAQQHGIQLIEKEGLIDLIEKTELSI

SEQ ID NO: 3526 - protein, 584 aa, Fibrobacter succinogenes subsp. succinogenes S85
MNFIGKIMGDTCTLVVLIFLFIIFVYYIWKVIKICKITISQIGNVANRPNLLEYLEKPYLVTRFISKEYKRTICFKDRDDSLKTSEFASDYFNLGAILTAAKINVNAMGAAAGILVGIGVLGTFIGLTIGLGDIDLTQIKDNPDQLIKGVGGLIAGMKTAFVTSVAGMLLSTIYTLAEKYSLNILTKKCVTISDKLDEVYYISELEKQTIIQERQKKDMSYLVKGLVSEMNKSMDSQIKFVAAEMTKNFTAIDGNGNTVTSGNMLNAVMKSCAEQKSMIEGVLEEFYDRLSDGLRESALEPLMQKLDELTKAIQSPAASMASSIGDDLRRSIMEMIDELKNSVSNATTERLEILGRQLDNASDTMSTLPEILQKLTENIQNNVGQMSEQISAANAQTAQVGANLVEKQSQMNDKSVALMQEFEKQANASTATLKETAALLTKFERLHKTVESAASKLESASGHVENSATSLQQSQDNLVQTYKKSIEETDHTFKQIEESLDHSKEVSAQYAQEFSEISESLEGIFKELSDGLNQYSETVAKRTKEFLDAYTQNVTKVSESLSNTYGELSDTLEKLPNVLNGARK

SEQ ID NO: 3527 - protein, 243 aa, Fibrobacter succinogenes subsp. succinogenes S85
MARRHKITLDAGGDQNPFAMSTGDMMSGLMFVFVLLIIALVWQITKQDNIKKQAINKYQDTRDEIYKELKSTFKDSLNVWGAELDSATLTVRFNEIALDGTPVLFASGDTLLPPRYKSMMKFFFPKYLEILDGEKFREHIEEIRIEGHTDSTPCYSLCKTLERNYLYNMNLSQARSRNVLRYGLTETDVSKDTTLLEFARKYIIATGLSFSQPRATQEKSRRVEIRVRTKAQEQIEEIIKTLK

SEQ ID NO: 3528 - protein, 455 aa, Fibrobacter succinogenes subsp. succinogenes S85
MINLPDFDKKAFVKRAKNVFPAKLEVLLNEHLQKMEALVAKLDVVEETEISESAVLAIRRKIVAYFRNTPEQDPFSIRERRLMCYFAGDIVGGPVTYEKIATIINTGWGDRYLAPLMRVCLNKWNSVSDEIAPMHDLFLKKLKAYKGPQSRYNEWKEKLDYFKAGNTRVLNGAVNLGKNLRMGYESPLDFKSVIDFPKDMIHSEYFQKVIRTFYTADVGKGIPQSLDNVLEEHGNSDTSMIVLSDFIRGCEERSVKRDQLKLQSMALRRIGHPADKGKWTLFDKRDSELQKKVENARQIVNFWLIQEYINEIFQTLIVDPRRKEFWLQLTKTISDVKVIGPADGKRRLSRIESLKDSLDYCFKVTASQTSAYAFVMTIGSYKFIEFSEKGNALYIYRNDENVDQLLGANRIYSVNDLKKPYLPNMDTSYAYSCRMVHKSSNWEYPLLMWMKRYVR

SEQ ID NO: 3529 - protein, 1045 aa, Fibrobacter succinogenes subsp. succinogenes S85
MLDSIKITETSFVFDNTNAPFLKTLTDNGFATLLADGGIDVPFENVYELNEFEREIVGLPPLYPFEILVSHQGIPFTPAFTYEVSYKSFAPCGDELPKKEQKGPVVSLIVKGEQIEYLLTLEQYRLVKALAEFNGLQSKSKLESYKSFAEIKELSKESASALDETLNNRNVVLPKNVRLDISYNNGELEITPSIDDSSNDEFVKKFDGSSEVHDHYPMAKGVQKTIVVLDTPVQESLKKVKQKRKVKNPEEIKAIVEHPEEFFDPEVTDLSAFYSDRVIGKGLYEPKVYPFITPYKSQWIPSFEVEDRTNGTTKIAIKNATELAEFSEAIATAKRENKPYCEYKGANISIGEAEKMEKFAKEQLRKKEAVTATGPNSIEEKKKQHEVLLIEENLEVTGYDVTKEQNYLPKHLTLEENPYLQKEFKLKDHQVEGIAWLQNLAKNAKGGLLADDMGLGKTLQVLYMLDWHSRFNNAANKPYLIVAPVSLLENWVREYKRFFKEGMNIEIVERIPNENKGFVAFHAYKHIMVVGYEAMRRGQFTLAAIDFAVIVLDEAQKVKAPGAMVTNAAKALKSDLRISMTGTPVENTYMDLWCIMDFAVPGLLGNAKEFARKYQDPLKDAETDIAMLGNKLRHELGGYFLRRIKSEVSKDLPEKHVEYHKVPMPSEQYSRYVAAINLGIKTHAHPFERIQSLRKISDHPYLDFKDVDHLSVDDLIRSSAKLSATMRILEDIRAKNEKVIIFTDRRDMQRMFQRILLQKFGIEASVINGDTSTSDRGNKVSRQKTVDIFQEKSGFNVIIMSQLAAGVGLNVVGANHVIHYSRHWNPAKEMQATDRVYRIGQTKDVYVHFPMAVCDNFDSFDVVLDALLQNKTHLASASLYPTDRIEVVQKELDGKLFGTTMADDQSYVALEDIDDMNEYLFEAFVAVFYAALGYKTVVTPRSGDKGVDVLAFGSKDNLAIQCKHSRNKVGVEALGEVAVGANVYKEKYSGKVFKPVVFTNSEFGVDAKERAKSSDITLVDGSSLSKSFKSNTYQWNDVYMADSNR

SEQ ID NO: 3530 - protein, 584 aa, Fibrobacter succinogenes subsp. succinogenes S85; identical to SEQ ID NO: 3526

SEQ ID NO: 3531 - protein, 243 aa, Fibrobacter succinogenes subsp. succinogenes S85; identical to SEQ ID NO: 3527

SEQ ID NO: 3532 - protein, 455 aa, Fibrobacter succinogenes subsp. succinogenes S85; identical to SEQ ID NO: 3528

SEQ ID NO: 3533 - protein, 1045 aa, Fibrobacter succinogenes subsp. succinogenes S85; identical to SEQ ID NO: 3529

SEQ ID NO: 3534 - protein, 535 aa, Fusobacterium nucleatum subsp. animalis 7_1
MEYLFTLPYSIKKLKNQERTIKELDDINIFFEAENLADKNITEKEILKIKNEFFYKEDDIEKYPLLSKVWKEYSSTMLKTDKNNYYQIIDAEDLFNENSLVKEKMNMKILNYIPQLFVGLGIFGTFLGLSLGLSQINLKDTGDLGQISNLIEGVQTSFYTSLYGMFFSISITLLFNNYMSQIEKRIFILRNKLNNLFFLNNGGELIQDMRTELKEIRAYNSDMASQITNGINKELVQMTSVLDNKISGFTNGITGTFQQTMSENLEKIFSEDFIKDFANIKDEFLEASRENNKFIAEYKDEMKEIVTTTKSLKDEFLVFADEINQKYNDTNKNLKENFEKISIVLNDIKEIHSSINEFTENVQFIATENKQIISDFKDVSLNLKEFAKGQDTILELWEGYKDSFASFEDSINSNFENYQSILEDVSDKYGNTIDKLTTEYVKTMNMGMEDVFRGYDNHLTEIIEKFQGVLRSFKENLELSDENLKVNVDLLQENLENQSILGELNKDISEKNRILLEKIQKTQQHLEFLEKKGDQ

SEQ ID NO: 3535 - protein, 207 aa, Fusobacterium nucleatum subsp. animalis 7_1
MASILMIFMLLFIVKTIETGQELRKKEEIIEGFTGLKKNIISKIQKDFEERGIKVDLDPQTGTIKIDDKILFNTGEYLLKPEGKKYLNEFVPIYINLLLNDEQVKKELSQIIIEGHTDDVGSYIYNMELSQKRAFEVIKYIYDEMPNFKGKEELKRYITANGRSNIKVLRDNSGNIDRDKSRRVEFQFKLKEDETLMKIEKTLKEGN

SEQ ID NO: 3536 - protein, 402 aa, Fusobacterium nucleatum subsp. animalis 7_1
MNEINFKKFYPVNLEKKKDEINNFWNQIFKVVRDEKIFELIERVLKKKNLKVDEIIILLFNIKKVHDYLIHKNVELADFIMNIKFDLSEKKVKRKECIMDIYQAIVSYFNENDVELALNLFVDENINFEKEDEREIIQVYQEYSKSKKDYTLFLYDETVKAIKNNKLKDTLDRLFISEEREVFLDIMNKVLFDIVYFVKLEKDYINKILADFFDRVTHKVRIESFKKVLNYYVEEYEKTDDISVCSRAIMEKIHEYLKDPHKNSPKWQWGDFSEAQIEIMRIWLVSADLEKYFSIEVNDKVRLQFWRRYIKYIKEVRYFERLKQAIVMLTDEHIFIEFGEKGNAAYCYKKDYISFSEINNLSTNFRLKNRASAEFFMSHSGNWEVKLKSTLYRLGYSVKVWR

SEQ ID NO: 3537 - protein, 1163 aa, Fusobacterium nucleatum subsp. animalis 7_1
MGIIERLFKKTKETDKKLKLSLEYEEKYIKIILKVGDKIISLKDLKDEVDISSLSKSDIFEVDENGDILLLDYDEIYSLDRSTLKLLKLPNFFPGVVYIDNKGYFGSSKVEFHYKISFGLDEYHIVNANYVESISSSERYILTKEQYDLIKLINQYNNDDSKNKEANEQYRMLNAIKDVSHKTNLLLNETIKKEDDLVLLENIELDFLESDEDYLEVVPQSSQLSKEQNESLKKAFKNANLSQNFYLLNIDNKKVKVVVNRELKDALKVVKNNEKISKKDFVKRESPIFDDIDSEKVEFNYGPRVIGLGYLNYRPSPTPNISEIDWFSKEFPKIMTDTPITLKPEHLGYMQGKFNDLDEFEETELKFDVEGEEKKFFISKENLANEIKKLETSIKDITDYNKSKALDEIIELAEAYNYKPDYIEYKGNYIKKFDKEVAEQYRDDLRAIEIEKREEKKNSKKEKEKVLLTEDNLNEEGYAEGTEQITQEEEVELPKSLRYSEGIDLKEHQKEGLLRMQSLYKKSNVNGLLLCDDMGLGKTIQILSFLAWLKEKDALKPSLLIMPTSLITNWYDEKNIGEIQKFFLDGTFKVKILDGKKTRDEIFELRNYDLVLTSYESLRINHKETGYIEWKVVVCDEAQKMKNPKTLLTRAIESQNALFKIACSATPIENSVLDLWCLTDFVKPGLLGSQKDFSQKYMKPLSSNNINDEKRQEINNELSDKLGDFYIRREKEKVLTSDFPKKIVIYDKIRPSSQQEDIIENLKNTGKAALAIIQGMIMTCSHPQLVDRDVDEVPLGSEESLIEEAYKLEHIYTILTEVKKKNEKAIIFTKYKKMQKILWNVIKYWFDIEVGIVNGDADKTSRRRILDDFRKKEGFNVIILSPEAAGVGLNIVEANHVIHYTRHWNPAKEEQATDRAYRIGQKKDVYVYYPIISNVENIEREEYHTVDEWIRKQLEIDMTDSSPEEKLNRIIIKKKRMLKDFFLTCGGEFDDDIAKEFAAMSNGIEKDLSIEMIDNIPYQEFEKLAVVLLEKEYNSKYGIVTVESGDKGIDGLIFSENGNILIQAKHTKRLDSNAAGDLFRGEKFYSDELNKDFPKLIVFTSASKNNISEDIKKLEKMGKVEIYYREKVTELLNKYPTKITELIDRDIRYSIEDIKSYVKTMNI

SEQ ID NO: 3538 - protein, 535 aa, Fusobacterium nucleatum subsp. polymorphum F0401; identical to SEQ ID NO: 3534

SEQ ID NO: 3539 - protein, 207 aa, Fusobacterium nucleatum subsp. polymorphum F0401; identical to SEQ ID NO: 3535

SEQ ID NO: 3540 - protein, 402 aa, Fusobacterium nucleatum subsp. polymorphum F0401; identical to SEQ ID NO: 3536

SEQ ID NO: 3541 - protein, 1163 aa, Fusobacterium nucleatum subsp. polymorphum F0401; identical to SEQ ID NO: 3537

SEQ ID NO: 3542 - protein, 583 aa, Fusobacterium nucleatum CTI-1
MKNEKKFICFLFAITCILSLGGQFYLMNFKILEMFNFFNINVVFFWLIFGIFIYFTLFNKKIKNQERTIKELDDINIFFEAENLADKNITEKEILKIKNEFFYKEDDIEKYPLLSKVWKEYSSTMLKTDKNNYYQIIDAEDLFNENSLVKEKMNMKILNYIPQLFVGLGIFGTFLGLSLGLSQINLKDTGDLGQISNLIEGVQTSFYTSLYGMFFSISITLLFNNYMSQIEKRIFILRNKLNNLFFLNNGGELIQDMRTELKEIRAYNSDMASQITNGINKELVQMTSVLDNKISGFTNGITGTFQQTMSENLEKIFSEDFIKDFANIKDEFLEASRENNKFIAEYKDEMKEIVTTTKSLKDEFLVFADEINQKYNDTNKNLKENFEKISIVLNDIKEIHSSINEFTENVQFIATENKQIISDFKDVSLNLKEFAKGQDTILELWEGYKDSFASFEDSINSNFENYQSILEDVSDKYGNTIDKLTTEYVKTMNMGMEDVFRGYDNHLTEIIEKFQGVLRSFKENLELSDENLKVNVDLLQENLENQSILGELNKDISEKNRILLEKIQKTQQHLEFLEKKGDQ

SEQ ID NO: 3543 - protein, 207 aa, Fusobacterium nucleatum CTI-1; identical to SEQ ID NO: 3535

SEQ ID NO: 3544 - protein, 402 aa, Fusobacterium nucleatum CTI-1; identical to SEQ ID NO: 3536

SEQ ID NO: 3545 - protein, 1163 aa, Fusobacterium nucleatum CTI-1; identical to SEQ ID NO: 3537

SEQ ID NO: 3546 - protein, 583 aa, Fusobacterium periodonticum 2_1_31
MKDEKKFIYFLFIATCILGLVGQLFLMNFKILQLFNFFNINVVFFWLIFGIFIYFTLFNKKIKNQERTIKELDDINTFFETEKLLDKNITEKEILKIKNEFFSKEEDIEKYPLLSKVWKEYSSSFLKTDENSYYQIIDAEDLFNENSLVKEKMNMKILNYIPQLFVGLGIFGTFLGLSLGLSQINLRDTGDLGQISNLIEGVQTSFYTSLYGMFFSISITLLFNNYMSQIEKRIFILKNKLNNLFFLNNGGKIIQDMKNELKEIRAYNSDMASQITNGINKELIQMTSVLDNKIGGISSGITGTFQQTMSENLEKIFSEDFIKNFENIKDELLETSRENNKFIAEYKDEMKEIVTTTKSLKDEFLIFSDEINQRYSDTNENLKENFEKISIVLNDIKEIHSSINEFTGDVQFIATENKKIISDFKDVSLNLKEFAKGQDTILELWEGYKDSFAGFEDSINTNFENYQSILEDVSDKYGNTIDKLTTEYVKTMNMGMEDVFRGYDNHLTEIIEKFQGVLRSFKENLELSDENLKVNIDLLQENLENQSILGELNKDISEKNRILLEKIQKTQQHLEFLEKKGDQ

SEQ ID NO: 3547 - protein, 232 aa, Fusobacterium periodonticum 2_1_31
MFFINKKKKEIQIEETNYWLSIGDLMASILMIFMLLFIVKTIETGRELRKKEEIIEGFTGLKKNIISKIQKDFEERGIKVDIDPQTGTIKIDDKILFNTGEYLLKPEGKKYLNDFVPIYINLLLNDEEVKKELSQIIIEGHTDDVGSYIYNMELSQKRAFEVIKYIYDEMPNFKGKEELKSYITANGRSNIKVLRDNSGNIDRDKSRRVEFQFKLKEDETLMKIEKTLKEGN

SEQ ID NO: 3548 - protein, 401 aa, Fusobacterium periodonticum 2_1_31
MNEINFKKFYPINLEKKKDEINDFWNQIFKEVRDEKIFELIEKVLRNKSLKVDEVIILLYNIKKVDEYLIRKNTELSDFIISIKFDLSEKKEKRKECLMDIYQAIVSYYNKNEVETALNFLVEDNIDLKKEESEIAQVYQEYSSSKKDYILFLYDETIKAIKNNKLKETLEKFYVSEEREVFSYIMEKVLLDIVYYVKLEKPYIEQILADFFDRVKHEVRIESFKRILSYYVEEYEEDEDISICSRVIMEKIHEYLKDPHKNSPKWQWGDFSEAQIEIMRIWLVSADLEKYFSIEVNDKIRLQFWRRYIKYIKEVRYFERLKQAIVMLTDEHIFIEFGEKGNAAYCYKKDYISFSEINNLSTNFRLKNRASAEFFMSHSGNWEVKLKSTLYRLGYSVKVWR

SEQ ID NO: 3549 - protein, 1162 aa, Fusobacterium periodonticum 2_1_31
MGIIERLFKKTKETDKKLKLSLEYEEKYIKIILKIGDKTISLKDLKDEIDISSLSKSDIFEVDENGNTLLLDYDEIYSLDRSTLKLLKLPSFFPGIVYIDNKGYFGSSKVEFSYKISFGLDEYHIVNANYVESISSSERYILTKEQYDLIKLINQYNNDDSKNKEANEQYKMLNAIKDVSHKTNLLLNETIKKEDDLVLLENIELDFLESDEDYLEVVPQSSQLSEKQNKSLREAFKKANLSQNFYLLNIDNKKVKVVVNRELKDALKVVKSNEKISKKDFVKRESPIFEDIDSEIVEFNYGPRVIGLGYLNYRPSPAQNMSEMDWFTKEFPKIMTDTPITLKPEHLNYMQDKFNNLDEFEETELKFNLEGEEKKLFISKENLANEIKKLENSIKDITDYNKSKALDEIIELAEADNYSQDYIAYKGNYIKKFDKNVAEQYRDDLRAIEIEKREEKKNTTKEQEKVLIPKDNIEKLDYIEDMEKITEEEVELPSSLRYSDGIELKEHQKEGLLRMQSLYKKSNVNGLLLCDDMGLGKTIQILSFLAWLKEKEALRPSLLIMPTSLITNWYDEKNIGEIQKFFLDNTFKVKILDGKKSRDEISELRNYDLVLTSYESLRINHKETGYIEWKVVVCDEAQKMKNPKTLLTTAVKTQNALFKIACSATPIENTVVDLWCLTDFVKPGLLETQKDFEKKYMKPLSANDINDEKRQEINNKLSDLLGEFYLRREKEKVLTSDFPKKIVIYDKIKPSSQQEDIIEKLKNTGKAALAIIQGMIMTCSHPQLVDRDVDEVPLGSEESLIEEAYKLEHIYTILTEVKKKNEKAIIFTKYKKMQKILWNVIKYWFDIEVGIVNGDADKTSRRRILDDFRKKEGFNVIILSPEAAGVGLNIVEANHVIHYTRHWNPAKEEQATDRAYRIGQKKDVYVYYPIISNVERIERDEYRTVDEWIRKQLEIDMTDSSPEEKLNRIIVKKKRMLKDFFLTCGGEFDDDMTKEFAAMSNEVEKDLSIEVIDNIDHMEFEKLAVVLLEKEVNSKYGLVTVKSGDKGIDGVIFSERGNILIQTKHTKRLDSNAAGDLFRGEKFYSDELNKDFPKLIVFTSASKNNISEDIKQLEKMGKVEIYYREKVTELLNKYPTKITELVDRDKRYSIEDIKNYIIERHI

SEQ ID NO: 3550 - protein, 583 aa, Fusobacterium periodonticum ATCC 33693
MKDEKKFIYFLFIATCILGLVGQLFLMNFKILQLFNFFNINVVFFWLIFGIFIYFTLFNKKIKNQERTIKELDDINTFFETEKLLDKNITEKEILKIKNEFFSKEEDIEKYPLLSKVWKEYSSSFLKTDENSYYQIIDAEDLFNENSLVKEKMNMKILNYIPQLFVGLGIFGTFLGLSLGLSQINLKDTGDLGQISNLIEGVQTSFYTSLYGMFFSISITLLFNNYMSQIEKRIFILRNKLNNLFFLNNGGEIIQDMRTELKEIRAYNSDMASQITNGINKELVQMTSVLDNKISGFTNGITGTFQQTMSENLEKIFSEDFIKDFANIKDEFLEASRENNKFIADYKNEMKEIVTTTKSLKDEFLVFADEINQKYNNTNENLKENFEKISIVLNDIKEIHSSINEFTENVQFIATENKQIISDFKDVSLNLKEFSKGQDTILELWEGYKDSFAGFEDSINSNFENYQSILEDVSDKYGNTIDKLTTEYVKTMNMGMEDVFRGYDNHLTEIIEKFQGVLRNFKENLELSDENLKVNVELLQENLENQSILGELNKDISEKNRILLEKIQKTQQHLEFLEKKGDQ

SEQ ID NO: 3551 - protein, 232 aa, Fusobacterium periodonticum ATCC 33693
MFFINKKKKEIQIEETNYWLSIGDLMASILMIFMLLFIVKTIETGQELRKKEEIIEGFTGLKKNIISKIQKDFEERGIKVDLDPQTGTIKIDDKILFNTGEYLLKPEGKKYLNEFVPIYINLLLNDEQVKKELSQIIIEGHTDDVGSYIYNMELSQKRAFEVIKYIYDEMPNFKGKEELKSYITANGRSNIKVLRDESGNIDRDKSRRVEFQFKLKEDETLMKIEKTLKEGN

SEQ ID NO: 3552 - protein, 402 aa, Fusobacterium periodonticum ATCC 33693
MNEINFKKFYPVNLEKKKDEINNFWNQIFKVVRDEKIFELIERVLKKKNLKVDEIIILLFNIKKVHDYLIHKNVELADFIMNIKFDLSEKKVKRKECMMDIYQAIVSYFNENDLELALNLFVDENINFEKEDESEIIQVYQEYSKSKKDYTLFLYDETVKAIKNNKLKDTLDRLFISEEREVFLDIMNKVLFDIVYFLKLEKDYINKILADFFDRVTHEVRIESFKKVLNYYVEEYEKTDDISVCSRAIMEKIHEYLKDPHKNSPKWQWGDFTEAQIEIMRIWLVSADLEKYFSIEVKDKIRLKFWKRYIKYIKEVRYFERLKQAIVMLTDEHIFIEFGEKGNAAYCHRKDYISFNEINRLSTNSKLKDRDEAVFFIPHSGNWEIKLKTRLYELGYRVKIWR

SEQ ID NO: 3553 - protein, 1166 aa, Fusobacterium periodonticum ATCC 33693
MEIKMGIIERLFKKTKETDKKLKLSLEYGEKYIKIILKIGDKTISLKDLKDEVDISSLSKSDIFEVDENGDTLLLDYDEIYSLDRSTLKLLKLPSFFPGIVYIDNKGYFGSSKVEFSYKISFGLDEYHIVNANYVESISSSERYILTKEQYDLIKLINQYNNDDSKNKEANEQYKMLNAIKDVSHKTNLLLNETIKKEDDLVLLENIELDFLESDEDYLEVVPQSSQLSEKQNKNLREAFKKANLSQNFYLLNIDNKKVKVVVNRELKDALKVVKSNEKISKKDFVKRESPIFEDIDSEIVEFNYGPRVIGLGYLNYRPSPAPNMSEMDWFTKEFPKIMTDTPITLKPEYLNYMQDKFNNLDEFEETELKFNLEGEEKKLFISKENLANEIKKLENSIKDITDYNKSKALDEIIELAEADNYSQDYIAYKGNYIKKFDKNVAEQYRDDLRAIEIKKREEKKHTTKEQEKVLIPKDNIENLDYIEDMEKITEEEVELPSSLKYSDGIELKEHQKEGLLRMQSLYKKSNVNGLLLCDDMGLGKTIQILSFLAWLKEKEALRPSLLIMPTSLITNWYDEKNIGEIQKFFLDDTFKVKILDGKKSRDEISELRNYDLVLTSYESLRINHKETGYIEWKVVVCDEAQKMKNPKTLLTTAVKTQNALFKIACSATPIENTVVDLWCLTDFVKPGLLETQKDFEKKYMKPLSASDINDEKRQEINNKLSDLLGEFYLRREKEKVLTSDFPKKIVIYDKIKPSSQQEDIIEKLKNTGKAALAIIQGMIMTCSHPQLVDRDVDEVPLGSEESLIEEAYKLEHIYTILTEVKKKNEKAIIFTKYKKMQKILWNVIKYWFDIEVGIVNGDADKTSRRRILDDFRKKEGFNVIILSPEAAGVGLNIVEANHVIHYTRHWNPAKEEQATDRAYRIGQKKDVYVYYPIISNVEKIERDEYRTVDEWIRKQLEIDMTDSSPEEKLNRIIVKKKRMLKDFFLTCGGEFDDDMTKEFAAMSNEVGKDLSIEVIDNIDHMEFEKLAVVLLEKEFNSKYGLVTVKSGDKGIDGVIFSERGNILIQTKHTKRLDSNAAGDLFRGEKFYSDELNKDFPKLIVFTSASKNNISEDIKQLEKMGKVEIYYREKVTELLNKYPTKITELIDRDKRYSIEDIKNYIIDIHI

SEQ ID NO: 3554 - protein, 677 aa, Desulfovibrio vulgaris DP4
MNTDFFGWVAQLITSPLGAWAACGIIIAIANFYWLKFRKSINRRIKNLQEAIIKLNEMDDMNGFAADYRDFSGWAKAHSMLGHAWREFEESLVFPDPTDEEQYICNTQDACCFFNAALIDDKTTNLSFYKALPNYLTGLGILGTFLGLVCGIYLAGHGLASEDPALLKDALRQLLEGASLAFWTSIAGLATSMLFSAYEKRKLNEVNSALEDWNEALDKRIKRITPEYLASQQLKQLKEQTTHLETFVNQIAVNIADAVDQRMNGTLVPVLERLADTVDSMRTDHAEHNMPVLVRLADTVEAMRDNHEERNEDMLREVVDTFKTTMTGAAGREMEALSGTLNQLQTTLIPIIQEMQTAQTAMQKASGDMTAQMNSFYEQSNREFAAGIAQVTETIGASVREARQLLHDDLSTAFGQTATRMEEATTAITERLGASYEEYNRSLSGNIEACGRTLASNIEECSQSLTANMAEASAQIGETVRSAGELLGGQLQGAFTQAAERMHEAVRAIESTVEKVRQSGEASGDAADRTGVMLTQLSDLMERLGDHQRSVEQASAAIRQTASSLTDTGSALAQAASTTTGSATVLRSASEQIRATQQTLEGVWKEYEQRFKGVDESLEKVFVRLSENHKAFCDSTTDYMTQLDANVGKISSDIGASVNAFGDSIEELADALNKVRR

SEQ ID NO: 3555 - protein, 259 aa, Desulfovibrio vulgaris DP4
MSRRSSGGNPLTRPEEEGNYLASLSDMMSGLLFIFIITLIVFVINFNMERIEAAEQKQELTEKYDELTNARKTRAEMLTSLERSLKMKGVEVSIDKDHGLLHIPEGILFDSGSAALPPEGGRTLDIIAEQLSTLLPCYSGKADAPAPDECRDNYKPGRLEAVFVEGHTDNVPMPPRGGIQDNWDLSTKRAVTTYRHLLGHAPTLAAFVNLDGDPLFGVSGYAASRPRNPHDTPTPDAQNRRIDLRFLLAAPRGQDKATP

SEQ ID NO: 3556 - protein, 455 aa, Desulfovibrio vulgaris DP4
MSLRSTVQTWAPPARRIPDQPERTIKAMVTVAALLGNGTVAQPQSWDLERIFDTLRKALQRDGTIAHVEARTLRYAPWVLFRSFNGYQGTLGERQDVATAYAAWLEQQHSARPVLTLLHVLLRDYPTTLPTFGTWCRMTEKALAASPSPRLKTWRERCNTYGLLAPDGPKRVAGRLAAGRATPHEVLAEAGLEGELAVGGFAEQAFRQLLHQTSGMLEQGKVGDTLTRLTQLVPPDVPTRGRALRFPAQAVALADSLLMPFVKSNNAGPFKKQVRQLLLDHLGDPRIEKRVWPSVREEARAVLLGWLVEQSLEAFFRILDSTADPIWQYRKAFWMRYLEKGVITEAWVALGRKAQTLAREHFGKGYAKLAGATSDQSVLLMRIGGLTIAEWSHNGTCRIWRTPTYNTPVFYQQTYHGADLRTDCDFSAVHMGSEKWAWQRKIADYIRNTTNILWQ

SEQ ID NO: 3557 - protein, 1131 aa, Desulfovibrio vulgaris DP4
MTRSLVWQRQQHGVAFSATEDDALLPVGTWARQPLSLPNGRIASTGPLLHLLEEEKVTLDAAETTLTVPDAVLATLDAWQTDALGLPAHAPVRLTLSAQGTLASAAFRLRYGFTFDDGLPATGASIDGVLFHHGKRDYLLPDPLYTIVARIDAYNAAPLQDMDERFLWWSELAALLPDAASFPSEFFRQMHTVRPDSFSLDFREEGGRLRILPRFVRSLHREDNDYGGELHEDILPAAPNEDFQRRFFGQVHPGGRYALPGNWFVVLPPPLRSALEVVHRINGASESEKRQFLHNPRAAIRERLEAHYGDNAEVVMDSLFQETPLFLSERIKHLGVWEPKGGFYIKTQGGDWFPGDPPPQSLLLPIGPQGALVDVRPADIAPIKACIADAKTRGQGAASYNGTTVSTGDAALSLLERAERMFVPHAPDNSATDGPADNSEEMSDDGQVNANADAPVVPIIFDHIDETGVRREAENLRQTVAAAPFLRPGIALHEHQHEGLAWLQEHWRHSSPGALLADDMGLGKTLQTLAFLAWVRAQQKHGVVPGRPFLIVAPTGLLKNWEEEADKFLMEPGLGPVFRAHGGDLRALMARGTMATAREFENSGLVLTTYETLRDKIAVFIAVHWGVTVFDEAQKIKNPKAMMTDMAKSLKSEFSIALTGTPVENSLADLWCIMDAVHPMRLETFKAFTGTYMPAGLHSTETLAALKDELAKPEGFPSLLRRIKERNWKERPAKHQNPVRITMPPEQAQAYRQALNKAVEDAGRPGATLEALQHIRTIALHPFTPAWGTMTPDAFVNASARLMGTFELLTDIRSKGEKALVFVEVKHMQMILAELLQQRFDCEQVLIINGEVSGPKRQERVHAFQTRKGFDAILLSPKAAGVGLTLTAATHVIHLNRWWNPAVEDQCTDRAYRIGQQHDVTVHYPMAIHPQLGDASFDVKLHELLERKRSLSRDLLTPAPAAASELDRLLADITDGAAHHDADRTDKGEARLLECLDQMEPLRFEAWVAERLERLGFSVQLTPASGDGGADVIATSRTPAVLPSLVIQCKHTQSPERPLGEDGIIEVLRAQKRYTLPGQTLCLLVTNAKRLTSSAVDKAKGGGVGVLMRSDMSDFERGGMPQILAEPRCTR

SEQ ID NO: 3558 - protein, 616 aa, Acidaminococcus fermentans DSM 20731
MGNWLSWISDFFYLLFIIAAGFCILWFFRISKAGSFVEQIISVLQNYSRESIRENYGNLQEEMGQAPYDSIWKKFERTLFKSKAEGVLMTQDPEAFYNDQTLLDNLPLDLFHAMPGIFTGLGLLGTFAGITAGISGIDLGNVETMKSGIEVLLSGTQTAFVTSVVGLILALVYNLVDSWIYRPYTKKLDTLIDQLNTLFPSKSLEEFLSHQAEQAEDQTDAMRELNGELVGRLEDMFVKLSQSIDVALKNNLTESFTQSLEPVFQDLNQSIDKLGSSAGDTLSKSIEQGAGDQIQGLAVTLQDFQGKMGSMMEVSERLNAENTARLQGSVELMVTKLNEAMDANIQKQAITSDASQTAMKQLVEEMNTNLKAALEQMVEAGRTANQALLQTTEATRGTIQEITDTMSRSTRTQKEEMIQVTANMKDSVLEVLKQLQHDMQERNRTMDAYMAGLKEMLGHNREIMASAGKTADKFALASTPMQKVADTLGSQLNLVVSASNQFNSHVDQNVQKLVQVSQSSQKDLELIRDSMSTMRSAWENYQQTFQGVSREMRDATDTLARTLEQYNTSTSKWLSETLGQYDKSIKEAMNSVSTINQSLSDSIQDLSDAMDKNRRH

SEQ ID NO: 3559 - protein, 235 aa, Acidaminococcus fermentans DSM 20731
MWKKKKEQKAQQSGDAFTTSVSDLMAGLLSIFILALCYFMLNFQTVTNKYTGNTELRNQLLKDVGKDLQAQGLQVRIDTKQGVLRIPESVLFESGEANIKEQGQAAVGKLSQSLLKTMTRPEYREALETVFIEGHTDNVPIHNEFFQSNWELSTQRAINTWNLMRNDVPEFNWLVNPRGEPIFSCSGYAETRPVRENGLDPNSEEGRAANRRIDIRFVMMPPQDPGEKPSGGSHG

SEQ ID NO: 3560 - protein, 467 aa, Acidaminococcus fermentans DSM 20731
MDKSLMHSLERLKSFKIRLPEVCLHPGRPVELEKWLKKTVSDSGRRPALDPVTMEELYTKVKVQERGKKVQLDLRREVPFLPVLLTREKKEKPRFYEVLLQDILKVIQEGIPRSARRNTFRNLVFAYFTVYGQPYKGERMQKCISLFLQKDPELLKSVLYLRNRKQLLKPNGHKLLTREIQKQRSFRKALEEFCWPVNLWYGSFSQWAVKDFFQLEEEDDWDELFGVLKEICEDKACGNMVPYAAEKMIYLTDRFGDGNREKEVRILLFQALGDPRDPGASLNWVDVEERAREIFLSWLKKNDLNLFFTIISKTVRQVATSENMWKYRKNFWEKYLDAMYYTRVFLGPDAERIAWRMELAKQGMGFGRLNGSGDSMRSLLMFSIGDYVFIEASHNGKLRIWKRGKEPLPFYQAKYTYKGFSYSDVTQASNVEKDFVHSSSETGSWQRKVNEWVRRHCGVQPKESRWR

SEQ ID NO: 3561 - protein, 969 aa, Acidaminococcus fermentans DSM 20731
MTNHHFWIAQEKGYFYPCHQTKPTGDWPLIQGQLEILASEGKVEEEPEGFLLPHVQAVDLDPEISEILELPDYFPYTITLRSHGSLGSPSFRYEVEYLRPDGTPFYGLVVRGSYVELSRETCYRFNRDQYDLLSLVEESNRESQKIQDRGKVSQYNTLQLARIKERAEKIHATLDRFMERQKVVTADKLSVRLEKNPDGSFSVLPVLLRRDGDSYTRIEADSLDQGFRSNPYNTRKIYGPDKTQYVFTPEQAEGIRQMRQCQRLSPEAARQVAEHPREVFGSEAFDFDLGVYGDRVVSIGEFLAPDLPFSLSSGRKWLPPEGTVEEDGREGSAHKTETFHLKEKDYPELFLKVSDALDRGEKWIVLGSQEVELTPEFLDYVDQLKAKAAEKQTDQVQGPENTGEKKKDASLQIQENFLSQEYHSRKAKREKQLGGNRLGSFLGKGLKEGIRPMPHQQVGMEQLAACWESGCHGVLLADDMGLGKTLQAFGFLSALKKAYGSRDMASVLIVAPVSLLQNWMEEYRKFVAEGVFDSIVPMYGSELKKHWARNPDGSRCYFRPPDPNLKEVSMLDFQDRERQIDYSQNHLILTTYETLRELQLSFGRVAWSVMILDEAQKIKNPATRTSVAARAMNCDFGLALTGTPVENSWTDLWTIMDFVEPGKLESLKDFNSHYQHQLQNLENKGGRLKELGDQLRKNLDPCFIRRLKEDVNLGLPAKEILRFKDPMPEEQRKLYGEVVREAQAGQGEKSITMLQAIARLRDISLCPSLGAGNGKRYSLGDPDCFFGSSARLMRTRTILDGVRTKGEKALIFVESRKIQLLLRTFLEQVYGIQVQPPINGTTQAVARQKMVNQFNQASGFQVLLLSPEAAGVGLNITGANHVIHLSRCWNPAKEDQATDRAYRIGQKKAVTVYLPMAVDTDFPEEASFDLNLDALLQYKRDLSRSALYPTEASEENALAMLKRIEEAAG

SEQ ID NO: 3562 - protein, 681 aa, Rhodobacter capsulatus SB 1003
MSSIADLVLDHLGQPVETAVLFLAGLLRSEGTPGVVVVLLLAAMLGFLAFGIGRMRGQAVLLRRFAEVLDQVPVEEIAQGGLERVAPELGRVAAGNSGATLREAWDEFSETLIIDDRAEPPVVRNTARPGVFFNIEDLGYGPGFLRILPGMFVSVGLALTFLGLIAALHQMSDGQITSATMQNLLKIASAKFIMSLTGLVCSIVLTIQLRISMGGVEAALHRLVRLLEERLSFASLEQIALEQLRAQSKAEEANRKLGWELVAELGRPLREELPLAISTSISEAMQPILDKVSAQGTSSVSTMAHDLSQQVSNGVERALTVASDRIAQAGDRIAQLAERMDQSSGRMGTEMDQAVQRVAQAVDDLRGAMSATAQSTSGAFTQGAEQLLSVMNATLEGIRQNTGEGARAMSEAAADMRSAASSMREEMEGAARSGAEAAQARMQAAGVEAGAAIDGASRSVLEAFASASGKITTLTDEMFVKAGAELLSPISNAAEQLDALVGALEESAANARQTAESLRAGAQAGAEAAGTFRGASADLVAAAGPVRATTERIEGAIRTLSDSTAQVAGTVSRSAEATATSARQTLEAARETLGAQQRSIEAALQGVESLVRRMQGQGERLDTLDEKLGRAFELYANQTEGAMQSIRAHVVDMSKGLNTALATLQTIVDQLQEFQPQQGRR

SEQ ID NO: 3563 - protein, 334 aa, Rhodobacter capsulatus SB 1003
MRFATRRRREEEEAESAFVSMTDMTVSFLFIVMILLAFFASQYNDKEVVPRPVHETVVQERDSARQDVERLLLSIARLQAQIEDLKQTVATKDARIAELERQLAEALEKLKQRDPLEAYSARSTKARHEMIERLASAVKEDIAREKIEGLDVSAQGDALRFQGSGLFASGQGGLSGNSLRIIRLLGAHLEGQLPCFTVGPRGAIAASCNPDLVLIETVQVEGHTDADASQASNLTLSMLRATSAFNAIAPDAAQDDAPPMLAFQNLLGQPVLAVAGYGEMRPIGPNDSPEGKAANRRIDLRFIMYVPPGRDLIPQTVADIGRISTELQRRRGQP

SEQ ID NO: 3564 - protein, 444 aa, Rhodobacter capsulatus SB 1003
MTGQNGGISLSEVLASRRSLHLPPAPSFEILDRTIERVIERFGAHAQIAERDPERLISEMLARIRAWDWQKVPMRHVNAVGRLVFAAPWRDRPDCDPIRTFLLDEVAVSTRSGFLNPLVQTYITTFSTQSAACRRLGQALARARERLGAQWRALLTEVPEFFDTDRAPQALARKMMQMEDIWRGLRKLGLRHFNELGLMDAAHLAYLEQIGPKLTDRAEIERLLAWLRPAGQPPRATGAAEAIAALLRPWAGKAVPEDLRALICERLIEIYGDPRPVPNATWLAVGEDNLALFRRWLTKAELTFFIGVVNATQNSDMWPPRRDFWELLYRQGRIAEAWVAFPKPARDYARRNLQLWGQGNDRRFGEQIAGGSRTNTSLLIMRIGDKIVVDGCHSYKTHIFDAKDPQAPKLYQRKYDCEDIRLRSRVSRAHNPIPNWSDWVLRHI

SEQ ID NO: 3565 - protein, 1030 aa, Rhodobacter capsulatus SB 1003
MNLTFSHTPEQITLTATASRGGLLNRLRARKPADLTLLPPEERRLALALADLRALADEHHEPLQIESDGIRLSHRLAAALDADAAEALGLPPLTDLVLRTDVEGIVGEAGFRLRAEWMRAGVRKLPRRVGAILETDRGPQRIPLWMMEALDLAESHRSGAGDAADWEALARFRRALDPGVVQAGNVRAARLSLTDFLAGLEVSLADRFSISPNASGSDFEVVPFSGQRIADLETVPETMAELSGPELGDFQRKLRMRGALNAFRLAPGRFLVIDRAAAPVLGVMAEMQRAPREERAAFIRNPRPRLTAAIEAALEARGDLAGLDDAAREDSIERAAGPVLVETAEYEAFSARVTGIELFEKPALDLFTGSGTTWLPEVFAADVARQIAELPVERLETLAQDLERAIAAGEVSVAAGDVQVPARPEALAAVQGEIIARRGQPEPTEAALQEHAPGPLVLQTADNFEELHWRPATPPRSAVLPLRLPHTLRTPLKDHQIEAFDWQGQAWRAGLPGVLNADEQGLGKTLQTIAFLVWLNEEMTANPIRRGPVLVVAPTSLLQNWEQEVARHVDAPGLGHLIRLYGTGIGARRKAGQRGMDTQSGEALLDFADLERAAAAGAGHLTWVLTTYTTLTNYQHSLARIPFAAAVFDEIQAIKNPASLRAAAARAVKADFRIGLTGTPIENSTVDLWAIMDQLAPGALGTLREFRSRYGEPDEANMAELHARVFTPQGGLPALALRRMKDKVARDLPAKTRVLVPREMPALQAQVYDAARLQLASGTPGAALKLLHHIRTVSVHPALGSYGADAEFIAASARLSATFDILRQIRARGERALVFIENRQMQYRFIEIARAEFGLARIDLINGDTPIAQRQQIVNRFQAHLEDGGGFDLLVLGPKAAGTGLTLTAATHVIHLSRWWNPAVEEQCNDRVHRLGQTRPVQIHVPMAIHPGYRAHSFDCLLHTLMQRKRRMASAALWPMGDTDTDAQHLRGMVAQDVIGQGRGQIVPQAMAETFAREGVACPEPGEGGRYAFE

SEQ ID NO: 3566 - protein, 681 aa, Rhodobacter capsulatus DE442; identical to SEQ ID NO: 3562

SEQ ID NO: 3567 - protein, 334 aa, Rhodobacter capsulatus DE442; identical to SEQ ID NO: 3563

SEQ ID NO: 3568 - protein, 431 aa, Rhodobacter capsulatus DE442
MASRRSLHLPPAPSFEILDRTIERVIERFGAHAQIAERDPERLISEMLARIRAWDWQKVPMRHVNAVGRLVFAAPWRDRPDCDPIRTFLLDEVAVSTRSGFLNPLVQTYITTFSTQSAACRRLGQALARARERLGAQWRALLTEVPEFFDTDRAPQALARKMMQMEDIWRGLRKLGLRHFNELGLMDAAHLAYLEQIGPKLTDRAEIERLLAWLRPAGQPPRATGAAEAIAALLRPWAGKAVPEDLRALICERLIEIYGDPRPVPNATWLAVGEDNLALFRRWLTKAELTFFIGVVNATQNSDMWPPRRDFWELLYRQGRIAEAWVAFPKPARDYARRNLQLWGQGNDRRFGEQIAGGSRTNTSLLIMRIGDKIVVDGCHSYKTHIFDAKDPQAPKLYQRKYDCEDIRLRSRVSRAHNPIPNWSDWVLRHI

SEQ ID NO: 3569 - protein, 1030 aa, Rhodobacter capsulatus DE442; identical to SEQ ID NO: 3565

SEQ ID NO: 3570 - protein, 681 aa, Rhodobacter capsulatus B6
MSSIADPVLDHLGQPVETAVLFLAGLLRSEGTPGVVVVLLLAAMLGFLAFGIGRMRGQAVLLRRFAAVLDRVPVEEIAQGGLERVAPELGRVAAGKSGATLREAWDEFSETLIIDDRAEPPVVRNTARPGVFFNIEDLGYGPGFLRILPGMFVSVGLALTFLGLIAALHQMSDGQITSATMQNLLKIASAKFIMSLTGLVCSIVLTIQLRISMGSVEAALHRLVRLLEERLSFASLEQIALEQLRAQSKAEEANRKLGWELVAELGRPLREELPLAISTSISEAMQPILDKVSAQGTSSVSTMAQDLSQQVSSGVERALTVASDRIAQAGDRIAQLAERMDQSSGRMGTEMDQAVQRVAQAVDDLRGAMSATAQSTSGAFTQGAEQLLSVMNATLEGIRQNTGEGARAMSEAAADMRSAASSMREEMEGAARSGAEAAQARMQAAGVEAGAAIDGASRSVLEAFASASGKITTLTDEMFVKAGAELLSPISNAAEQLDALVGALEESAANARQTAESLRAGAQAGAEAAGTFRGASADLVAAAGPVRATTERIEGAIRTLSDSTAQVAGTVSRSAEATATSARQTLEAARETLGAQQRSIEAALQGVESLVRRMQGQGERLDTLDEKLGRAFELYANQTEGAMQSIRAHVVGMSKGLNEALATLQTIVDQLQEFQPQQGRR

SEQ ID NO: 3571 - protein, 334 aa, Rhodobacter capsulatus B6
MRFATRRRREEEEAESAFVSMTDMTVSFLFIVMILLAFFASQYNDKDVVPRPVHETVVQERDSARQDVERLLLSIARLQAQIEDLKQTVATKDARIAELERQLAEALEKLKQRDPLEAYSARSTKARHEMIERLASAVKEDIAREKIEGLDVSAQGDALRFQGSGLFASGQGGLSGNSLRIIRLLGAHLEGQLPCFTVGPRGAIAASCNPDLVLIETVQVEGHTDADASQASNLTLSMLRATSAFNAIAPDAAQDDAPPMLAFQNLLGQPVLAVAGYGEMRPIGPNDSPEGKAANRRIDLRFIMYVPPGRDLIPQTVADIGRISTELQRRRGQP

SEQ ID NO: 3572 - protein, 444 aa, Rhodobacter capsulatus B6
MTGQNGGISLSEVLASRRSLHLPPAPSFEIIDRTIERVIERFGAPAQIAEKDPERMISEMLVRIRDWTWQKVPMSLIARIGRLVFAAPWRDRPDCDPIRTFLIDEVAVSTRSGFLNPLVQTYIATFSAQSAACRRLGQALERARERLGAQWRALLTEVPEFFDAARAAQALARKMVQMEDIWRGLRALGLRAPHGPGLMDAAHLAYLEQIGPKLTDRAEIERLLAWLRPAGQAPRPTGAAEAITALLRPWTGKAVPEDLRALICERLIEIYGDPRPVPNATWLAVGEDNLALFRRWLTKAELTFFIGVVNATQNSDMWPPRRDFWELLYRQGRIAEAWVAFPKPARDYARRNLQLWGQANERRFGEQIAGGSRSNTSLLIMRIGDKIVVDGCHSYKTHIFDVKDPQAPKLYQRKYDCEDIRLRSNLSRAHNPIPNWSDWVLRNI

SEQ ID NO: 3573 - protein, 1029 aa, Rhodobacter capsulatus B6
MNLTFSHTPETITLTVTTPRGGLLDRLRARKPADLTLLPPEERRLALALADLRALADEHHDPLRIESDEIRLGHRLAAALDADTAEVLGLPPLTDLVLRTDVEGIVGEPGFRLRAEWMRAGVRKLPRRIGAILETDRGLQRIPLWMMEALDLAESHHAGAGDAADWEALARFRRALDPGVAEAGNARAARLSLTDFLAGLEVSLADRFSISPNAAGSDFEVVPFSGQRIEALATVPEAAAELSGPELGDFQRKLRMRGALNAFRLAPGRFLVIDRAAAPVLEVMAEMQRAPREERSAFIRNPRPRISAAIEAALDARGDLAGLDDAAREESIERTAGPVLVESAEYEAFSARVTGIELFEKPALDLFAGSGTTWLPEVFSADVARHVAALPIGRLETLARDLERAIAAGEPGVAAGEVQVPARPETLAAVKGEIAARGRAPEPTAEPQGPSPGPLVLQTADNFEDLHWRPATPPRAAILPLRLPHALRTALKDHQTEAFDWQGRAWSAGLPGVLNADEQGLGKTLQTISFLVWLNEEMAANPARRGPVLVVAPTSLLQNWEAEVARHVEWPGLGQLIRLYGSGIGARRKAGQRGMDTQSGEALLDFGDLERAAGAGAGHLTWVLTTYTTLTNYQHSLARIPFAAAVFDEIQAIKNPASLRAAAARAIKADFRIGLTGTPIENSTVDLWAIMDQLAPGALGTLREFRSRYGEPDEANMAELHARVFTPQGGLPAPALRRMKDKVARDLPAKTRVLVPREMPALQAQVYDAARLQLASGTPGAALKLLHHIRTVSVHPALGSLSADAEFIAASARLAATFDILRQIRAKGERALVFIEHRQMQYRFIEIARAEFGLDLIDLINGETPIAQRQQIVNRFQAHLEQGGGFDLLVLGPKAAGTGLTLTAATHVIHLSRWWNPAVEEQCNDRVHRLGQTRPVQIHVPMAIHPGYRAHSFDCLLHSLMQRKRRMASAALWPMGDTDADARQLQGMVAREVTGLERGQSVAQAMAETFAREGVACPEPGQGGAYAFV

SEQ ID NO: 3574 - protein, 681 aa, Rhodobacter capsulatus R121; identical to SEQ ID NO: 3562

SEQ ID NO: 3575 - protein, 334 aa, Rhodobacter capsulatus R121; identical to SEQ ID NO: 3563

SEQ ID NO: 3576 - protein, 431 aa, Rhodobacter capsulatus R121; identical to SEQ ID NO: 3568

SEQ ID NO: 3577 - protein, 1030 aa, Rhodobacter capsulatus R121; identical to SEQ ID NO: 3565

SEQ ID NO: 3578 - protein, 681 aa, Rhodobacter capsulatus Y262; identical to SEQ ID NO: 3562

SEQ ID NO: 3579 - protein, 334 aa, Rhodobacter capsulatus Y262; identical to SEQ ID NO: 3563

SEQ ID NO: 3580 - protein, 431 aa, Rhodobacter capsulatus Y262; identical to SEQ ID NO: 3568

SEQ ID NO: 3581 - protein, 1030 aa, Rhodobacter capsulatus Y262; identical to SEQ ID NO: 3565

SEQ ID NO: 3582 - protein, 673 aa, Prochlorothrix hollandica PCC 9006
MNEIGIWFEKIISPNLPLISFIVVFFLVGCGAEFYSFWRNWGKLKRLDLSIAYLTDALQGGKQQISKPQPESQDEQHYSWVRQHIEGIEKIAETEKNRRYIYQLSVGSSSLPILLSYPIELATISRSNLTVIPTILTALGILGTFWGITTGIQGVEINSSNVEASLDSTLNLLDGMGTAFSTSLMGLSCSLLFSLVITASNYQRRRYCYDLRDRLGKVAALKPPTQSSQELYRSSQELYSIVEGLPQRIGETINLDPMQNAAQDMQKAARILARFSQQLETQFNAEKIGQAVGGQIGIVFEDLLATHLRPVFVQIEESQTRLEGLNADQQTVLRDLIGNMRTELIEPVATRLDTSADMTERASQAVERLHIELADLADRLARSIATLTNTVETIETFQNRTLEQLQRFTQHLEITLTEFQTNTKEVLQETAKEIRSGTIDILQQAEITFQKQSDTLAEIGQEASSLMATARIELITSLGSIDQRLQDMSEATQKQLEAFRLAYQDNLQDFFTQQNNLLEGTLGQQRNSLAAVVENLNLVFQQEYGRRSELNQGLDDRIKLIAKTIKDVNKLVATSETLYTQDKLDLLQTLADRLAESDRELQTIARQNQKMRADWTQELNQYVESLAQERKQFFNDADTAMAQVSGKLLETAKLIADLLSEMPTQTTDGNQEN

SEQ ID NO: 3583 - protein, 248 aa, Prochlorothrix hollandica PCC 9006
MQLDFDPSEPQTEEDNSIFLSVGDLMSGLLMIFALLFSIVFIQYQVAIQEQKRLLKEAEQLKQQVEQYEKAFRELPLLLRTQLEAELGTGGFEVDPETGDLIIADKILFDENVTTLKPAGQAFLRQFIPVYSNIIFSLPPEIAGQITAISLEGSTSSSGPDQDNMDVSLSRASSVYQYIFNDPTFPNFPTKAQLRQRILVAGRGEIDANQQTIIASDRRVTFQFQVRPPTLADFTQSATPPVPAPTTP

SEQ ID NO: 3584 - protein, 488 aa, Prochlorothrix hollandica PCC 9006
MILSLPPLSPQRPQQLIALAQQQQSQFQQIPSVDQVLEKLTQGHTNITPLEWYCCLKAKAEWDQQQSPDQQRHSATLIWRQIGQDSWLCIFLLRRLLDQCQSREQLCLAPSILDTVDTIYNQAWLGNQKDFVNLVYAVYQTLGKAVDQTTQHPVSALGPVAAQYRLNKGDYIAQLSKRLSLSWQDTNLLNLHFIEQAAIYFNHKIEHKSYQSSDEKWMTSCLNDPAVSKAELAIGITTILEAAPTNFSSTCPQLIELFIQLRWQQPELYNLLGDQAKIRLNALIGAANYTLFSELVDTLLKYSPIFQETEGSENKERNRIDMRRYFWSNYSDRFEAVKILVPPSSYQILEQANHDMNYIEKLDVSSVPAEEETEFCFFDFGNYIIAEPLRGTKDMYLFRDKVGKMLMEKPNLSLKQMGSVVSWRHDHMLLWQNFCERWLAIHKIFPNDGITKFRQDSENYHPYSRSQGMPRPSQEGIKKREEQLRRYK

SEQ ID NO: 3585 - protein, 701 aa, Nitrosococcus oceani
MNPEEEKFDWAGLLPDLETLGSYPETPEQLSALFVVVLMAVAFLFLCFSLYRLFKAWYQTSRISKFLKNETSKSVLMNRQDLREKASRVNDEVGHLWKEFDETLVEARAGDDVRLHSIYEASHFFNGSTLARGITESRMLAAVPGFLAALGVIGTFIGLQLGLSELNIGNEAAVKDMKAGLAHVISGAKIAFLTSVWGVGLSVAFNFVEKLLECCALSGIRQLQDCIDQLFPRFSAEVQLQKIADDGSQARESLQGMAERIGDKMQESLLEATSGIQQGLEASLEKIMAPAINKLVNETTDGSQKALEKLVEGFLDRFGEQGEIQRQAMDTASKGVGDALAAMNQTLEGFIRELDQNQVAAADREQQLIKHISERVDELAEKNTEHGQRLATAAEQQIGKITETLQHSQQAQEEREIQLGRKFSRVVADMDQTIAQLIKHISERVDELAEKNIEHGQRLAIANEQQIGKIAETLQHSQQAQEEREIRLGEKFSRVVADMDQTIAQYTTASNALMEQSKQLQQQVAASQSNFERVAHGINAGAAELRSAASQLKDYGEGVKQSSMQLSGAINEAARSTAKLADENKKSSVTVGQVHQEMSHSIEKLQAVAVQLESVVQAADSTFKYMEVHQKSYLESLKRNVQELSEQGAKLLSDYAGQANAQTTEHLGIWARHTTNYAEQMNGAARALSSVVDEIEDKLSH

SEQ ID NO: 3586 - protein, 250 aa, Nitrosococcus oceani
MHALIRPKPRRVDEENPYWISFSDLMSALLVIFILAAVALIIELTQTQKKIEKDIDQLKNAEQARRDILHEIRDELAKRNIEILIADNDTVLRIPESTLAFASNSYALPADEKVRSSVVAIGQVLHAAINRSFKPGVSEKRRFDYLDTVFIEGHTDSRPTRRIKGNWGLSTFRAISLWEYWDDVLDVSPALTDMSNAFGDKLFSVSGYAATRRVNEAEITREGRRENRRIDIRFTVKRPRISELEDIVEQ

SEQ ID NO: 3587 - protein, 476 aa, Nitrosococcus oceani
MRLPLNKLHFSLSDESLLSYKGRIDAATQEIKQLARGSGTGSAAFKQAYERVLKALREDRNLSDVLRTPTDLRAFAVSFNTELASKIRLTEPVLQKINQIRQKPTALLVDAIYAHYLTVYDTLPDMVAVENWLRVAKGRRGKLSEEVPAILGGNGPKWLAEDAHRQGVDFDEQVGRVGLDRFRSGRFMTVAKNIYYLDVLRKLEPNQDHPLLDEMQKRPVYNSRYDERHLLGHQILGILIEKAPVNAVGEAWLNAVLAIGGDPRVPPCHPNHQKWWSQLDPQLKNKAQGWLSKLDLRLFLESLEDFSCQPGKEDLKRMYPARKHFMEGLLNKQLITGTRLYLSPSAESYLKKAYRAEHLPHYSLVMDGGKALIHIQLGGVHLVEGSHNCQLWIYETLDPSAIVFNDSKTRVTYHSLTQGLSLIMRKKGLPPKANITHHPGWQYRAIVALKEIGVPIEAKDVLTPKDYHRYKRLYGA

SEQ ID NO: 3588 - protein, 1150 aa, Nitrosococcus oceani
MSLKEWITGLVGAKATGCAWNYDSEGINFIFTEKQGLQVRSGGANDLLIHQYIALSMLVEQGQAEELPNGVLVPSDVVVQLDENTRLLLGLPDRWKGVLNANIKGKTGSASFQVELAAADAGGGFTHGFSVEGPVIRFSAEKHYVLSPAHLLIFEAHKKHTHSAKTEYDDLSLVLSLQKAQELGASISLGHFEKLNIRTPASITVAAELDEHGRLVLTPQMGQAASHERIQRVLGQLRVEQATSLRVDGEIILFDEEKLAAVREILRNRVIPKDKVNAFLKNPTAFINASLVELDLGFSARVKGATKFRHAYFGETDESGIDWFGKKFSPTEVFAPAKLVDVVSDRDQLDDVRQKLANVAETGAQEMEFEGRIFDVSNPKLVNSILEKLERKLIEGNVTIEERENVSAVEADSASKKEQAEPTVVDIGLNDVDLETPSASLDSVINDVLIAEAALDWGTFKRLPFPHQVLGTRWILGLALDRDGRGGGLLADDMGLGKTFMSLAAMEHLYKSYRDRKLAEKPCLVVAPLGLLQNWKDEVGQTFKESPFNDIVILQSDGRLSEFRAGGVETKNQNITEDETAPIRYSLKIGSGFAQERLDLPKRLVITTYQMLRDYQFSLCSIDWGIVVFDEAQNIKNPNALQTRAAKGVKADFRLIATGTPVENSLTDFWCLMDTACPGLLDSYQAFRSAYITPILRAAGDEIEHVRGVVGRRLREHVGPWMLRRVKEDNLEGLPDKSVFVGMKDDIWAYSPALHSTLEEGQLESYDTILMRASSSDSNVALAALQKLRDVSLHPRLVFGGGLDTPRQLADWVNLTDESGKIRSLLSILDQIRDRGEKCIIFVINKKLQAFLALALAKIYLLPPVSVINGDAKAVAKRAARPTRQSMIRAFEDRGGFNIIIMSPIAAGVGLTVVGANNVIHLERHWNPAKEAQATDRVYRIGQKRKVNVFIPLIHHPEYQSFDVNLHQLLSRKGQLKDAVVTPEQVMPSPEGLHQGNWSPSQRISFNELRNLSWQQFEALCAELLYKEYQVDNCWLTHSGADFGADVVLTKNGIGLLVQCKHTSGSAYDGYKAILEVHSATVKYEAELGKRIDSLILATNAVCLGSATQKTATQYSVEILDGKMLSRLLRRHVVTCADVLNRLEKKRLRV

SEQ ID NO: 3589 - protein, 648 aa, Geobacillus stearothermophilus
MYTVFETLFSLINKIGNEGFTDLFLYFQFSLFLVMAVWQFVRIHREIAVMNQLKPKLLELNRPLDGSVYEIDQAIHNLFAQVKKSKYKELWERYYNRVSQKNEDERINVEPFFGFDVMYHHMGYRTLMDMGAGIHVSLGVLGTFVGLSVGLAQLHVTDTEMLRSGIDSLINGMKVAFYTSVWGVLLSLIWTMFDRWISGVLERNIDWHSERLDFLLSTDDEELFLNRLEKLSRHQADHLKTLLTDALERAMQPIALSLQQSHGSLQQVFGQLHDQFAQLHEGMETQAKLLESQIELTKSTSADVTSRLVDEITGGTQQSIGKFREFVQQSQVLHSEMMKTIESFTSRFAYMEERQAMTLERTEKMFAQFEKMAGELELMKDSYQKTAGIMNGLGETFYQLQQLTKDHLPVQQEVMRSNQLLAQKYDDLVERFTHFNAQVETHYSQLLEQLVHAASSLSASFQTMANKFEESLRIQKESLHDSQQLLGDVQSAVAALSPLVPELRETFNCVRELKEQLLKMQEAQKQLLPELVQLRAQTNETVEEALQTTKVYMHEMTEQIATLQQNWAMTKEQLAKITEALHLSMKDFAENIDSGLSKTYQHFDETLTKAVQEVSGLVYQFSEVQNDFIENMEDLVDHLDKWKAGAST

SEQ ID NO: 3590 - protein, 223 aa, Geobacillus stearothermophilus
MKYRKRTEVNYWMSYADLMSAMLMVFALLLMSVILDYRELLEEKEKQIEEVVSVKTEIIRALTEAFKKSNLAIEIDQQTGAIRFPGSILFESNSAEISPEGKAFLQQFIPKYMGILLQDRFKDEISSIIIEGHTDRNGTYMYNMSLSQRRAYAVLEYIYSKEFPNFKERELSKKYITANGRSFSNPLTDENGKYDPDRSRRVEFLFRLKDDEAIKAIEKLVNE

SEQ ID NO: 3591 - protein, 426 aa, Geobacillus stearothermophilus
MKYEYEPVLLKRWLREPRRPLLKQTVDYRAEKYQGVLERLSDRFAEVANAPISVFQEWVQQLSRREKLLLPNLYKKELPEELKKAMIESIQRHIQHERRLFRVLVDVMYETCDLDEIWKLLRYAYATHIEKIEKRLEKEKSEKWRRYLLSKDPIVYLATTAYESEKGILDELETFYLTKNFPLFKLVLIEIFQLADESFFLKEQNLYRELFVSSTNEQQQKMANALIKKCKLNHVKPLGKLIFERLQTYHRKPMLWRYVGEEEKRRFAQWIMKLQLKDFFGGVNKNHERFQYWEKFIPKLEDVVVTDERTTLIMYFHDVVIMEVLGTGAVYIYRADVFRRHFQPKIDRMLAEREQFANKAWRKVREVKRTELMDRDLTIPGGWLRHNGGWQWKFDEWLRRELGWEVRRDVLLQKETENDEGSFDAE

SEQ ID NO: 3592 - protein, 874 aa, Geobacillus stearothermophilus
MFFFKKKRKMMKAVLTPNEDGIHFSFQLHDGKTVAELKLPMAKEDIEKYYKVQGFQQYVAWEELYDSGVLVDSTLPYSEYYELLKDESAKEVLQYLGLPVVEEQVGGKLSLRSLPHEADLVLQLFDAGGRNLDRVGKQAGAIYVLPDRLMLLPERVYRLKQALLGSYESGYEKIGICQQLANEAGIELENFLQNETYHVVDAYNVDVAVHRHDHIELVVKGRNEEETRHLQRLQRVSSIKKGHGRSRFVSTEQVHADMMHLQQKRHITGEEVPLFLENPAAVLPEHDYLFDLDQFSERVRGLIPIERVRPFFHERTGMQWFDEESGHTVPYDETFLRELMEKYPDQQYVEYNGKWIYLDPLLRRKLLQLPKDADEALKRRYILDIKDNEEQLEYKIDSAQEASCRRYPIPSELQAEFFPHQIEGFEWLCHLAEQERGGLLADDMGLGKTIQVIAFLLHQKANGRLKPTLIVLPIALIENWVAEIEKFAPSLLDGLYIHKGRGRLASSQLISQFDIVLTSYDTLKMDQLLLGKIEFQAIICDEAQNIKSHTSQRSRAIRAMQGRFRLAMTGTPVENSLDELWAIMDFVQPGALGSLKEFRFRYVETSDYDALLAALQPYYLRRTKQQILDDRLPKKHLVPPIYVEASPIQKEIAQSMLATKEVGQVAILNMIMRLRQLYGHPGAVIPKYEQLSYQEVPKLKETMHIIETIRQKGEKVLIFTEFRKLHFLLKRIFMETYGISVPVIDGDAKNRQLIVRRFNEMQGFGIMILSPKAAGVGLTITSANHVIHYTRWWNPAVENQATDRAYRIGQQKDVYVYHIITRDSSHFPQGTVEELMHELLESKRHLAENVIIPFNMSEIQQAVAEKVVGRRQLV

SEQ ID NO: 3593 - protein, 648 aa, Geobacillus stearothermophilus; identical to SEQ ID NO: 3589

SEQ ID NO: 3594 - protein, 223 aa, Geobacillus stearothermophilus; identical to SEQ ID NO: 3590

SEQ ID NO: 3595 - protein, 426 aa, Geobacillus stearothermophilus; identical to SEQ ID NO: 3591

SEQ ID NO: 3596 - protein, 874 aa, Geobacillus stearothermophilus; identical to SEQ ID NO: 3592

SEQ ID NO: 3597 - protein, 648 aa, Geobacillus stearothermophilus
MYTVFETLFSLINKIGNEGFTDLFLYFQFSLFLVMAVWQFVRIHREIAVMNQLKPKLLELNRPLDGSVYEIDQAIHNLFAQVKKSKYKELWERYYNRVSQKNEDERINVEPFFGFDVMYHHMGYRTLMDMGAGIHVSLGVLGTFVGLSVGLAQLHVSDTEMLRSGIDSLINGMKVAFYTSVWGVLLSLIWTMFDRWISGVLERNIDWHSERLDFLLSTDDEELFLNRLEKLSRHQADHLKTLLTDALERAMQPIALSLQQSHGSLQQAFGQLHDQFAQLHEGMETQAKLLESQIELTKSTSADVTSRLVDEITGGTQQSIGKFREFVQQSQVLHSEMMKTIESFTSRFAYTEERQAMTLERTEKMFAQFEKMAGELELMKDSYQKTAGIMNGLGETFYQLQQLTKDHLPVQQEVMRSNQLLAQKYDDLVDRFTHFNAQVETHYSQLLEQLVHAASSLSASFQTMANKFEESLRIQKESLHDSQQLLGDVQSAVAALSPLVSELRETFNRVRELKEQLLKMQEAQKQLLPELVQLRAQTNETVEEALQTTKVYMNEMTEQIATLQQNWAMTKEQLAKITEALHLSMKDFAENIDSGLSKTYQHFDETLTKAVQEVSGLVYQFSEVQNDFIENMEDLVDHLDKWKAGAST

SEQ ID NO: 3598 - protein, 223 aa, Geobacillus stearothermophilus
MKYRRRTEVNYWMSYADLMSAMLMVFALLLMFVILDYRELLEEKEKQIEEVVSVKTEIIRALTEAFKKSNLAIEIDQQTGAIRFPGSILFESNSAEISPEGKAFLQQFIPKYMGILLQDRFKDEISSIIIEGHTDRNGTYMYNMSLSQRRAYAVLEYIYSKEFPNFKERELSKKYITANGRSFSNPLTDENGKYDPDRSRRVEFLFRLKDDEAIKAIEKLVNE

SEQ ID NO: 3599 - protein, 426 aa, Geobacillus stearothermophilus
MKYEYEPVLLKRWLREVRPPLLEKTMENSNEKYRGLLERLSDQFAGLVDAPSSAFEQWVKQLSRREKILLPNLYKKELPEEMKKAMIDVIQQHVRHERRLFRVLVDVLYETCDLDEIWKLLRYAYASHIEKIEKRMEKEKSEKWRRYLSSKDPIVYLATTAYESEKGILEELETFYLTKNFPLFKLVLMEIFQLADESFFLKEQELYRDMFVSSTNEQQQKMANALIKKCKLNHVKPLGRLIFEKLQTYHRKPMLWRYVGEEEKQRFARWIMRLELKDFFGGVNKNHERFQYWEKFIPKLEDVVVTDERTTLIMYFHDVVIMEVLGTGAVYIYRADVFRRHFQPKIDRMLAEREQFANKAWRKVREVKRTELMDRDLTIPGGWLRHNGGWQWKFDEWLRRELGWEVRRDVLLQKETENDEGSFDAE

SEQ ID NO: 3600 - protein, 860 aa, Geobacillus stearothermophilus
MTPNEDGIHFSFQLHDGKTVAELKLPMAKEDIEKYYKVQGFQQYVAWEELYDSGVLVDSTLPYSEYYELLKDESAKEVLQHLGLPVVEEQVGGKLSLRSLPHEADLVLQLFDAGGRNLDRVGKQAGAIYVLPDRLMLLPERVYRLKQALLGSYESGYEKIGICQQLANEAGIELENFLQNETYHVVDAYDVDVAVHRHDHIELVVKGRNEEETRHLQRLQRVSSIKKGHGRSRFVSTEQVHADMMHLQQKRHITGEEVPLFLENPAAVLPEHDYLFDLDQFSERVRGLIPIERVRPFFHERTGMQWFDEESGHTVPYDETFLRELMEKYPDQQYVEYNGKWIYLDPLLRRKLLQLPKDADEALKRRYILDIKDNEEQLEYKIDSAQEASCRRYPIPSELQAELFPHQIEGFEWLCHLAEQERGGLLADDMGLGKTIQVIAFLLHQKANGRLKPTLIVLPIALIENWVAEIEKFAPSLLDGLYIHKGRGRLSSSQLISQFDIVLTSYDTLKMDQLLLGKIEFQAIICDEAQNIKSHTSQRSRAIRAMQGRFRLAMTGTPVENSLDELWAIMDFVQPGALGSLKEFRFRYVETSDYDALLAALQPYYLRRTKQQILDGRLPKKHLVPPIYVEASPIQKEIAQSMLATKEVGQVAILNMIMRLRQLYGHPGAVIPKYEQLSYQEVPKLKETMHIIETIRQKGEKVLIFTEFRKLHFLLKRIFMETYGISVPVIDGDTKNRQLIVRRFNEMQGFGIMILSPKAAGVGLTITSANHVIHYTRWWNPAVENQATDRAYRIGQQKDVYVYHIITRDSSHFPQGTVEELMHELLESKRHLAENVIIPFNMSEIQQAVAEKVVGRRQLV

SEQ ID NO: 3601 - protein, 460 aa, Geobacillus kaustophilus GBlys
MWTMFDRWISGVLEHNIDWHSERLDFLLSTDDEELFLNRLEKLSRNQADHLKTLLTDALEKAMQPIALSLQQSHGSLQQAFGQLHDQFAQLHEGMETQAKLLESQIELTKNTSADVTSRLVDEITGGTQQSIGQFSEFVQQSQVLQTEMMKTIEAFTSRFAYTEERQAMTLERTEKMFAQFEKMAAELELMKDSYQKTAGMMNGLGETFHQLQQLTKDQLPVQQEVMRSNQLLAQKYDDLADQFTRFNAQVEAQYSQLLEQLVHASSSLSASFQTMANRFDESLRVQKESLRDSQQLLGDVQSAVVALSPLVSELRETFDRVRELKEQLLEMQEAQKQLLPELVQLRTKTKETVEEALQTTKVYMHEMTEQIETLQQNWATTKEQLTKITEALHLSMKDFAENIDSGLSKTYQHFDETLTKAVQEVSGLVYQFSEVQADFIENLEDLVDHLDKWKAGAST

SEQ ID NO: 3602 - protein, 211 aa, Geobacillus kaustophilus GBlys
MSYADLMSAMLMVFALLLTFVILDYRELLEEKERKIEEVVSVKTEIIRALTEAFKQSNMAIEIDQQTGAIRFPGSILFESNSTEISPEGKAFLQQFIPKYMGILLQDRFKDEISSIIIEGHTDRNGTYMYNMSLSQRRAYAVLEYIYSKEFPNFKERELSKKYITANGRSFSSPLTDATGKYAPDRSRRVEFLFRLKDDEAIKAIEKLVNE

SEQ ID NO: 3603 - protein, 426 aa, Geobacillus kaustophilus GBlys
MKYEYEPVLLKRWLREPRRPLLKQTVDYRAEKYQGVLERLSDRFAEVANAPISVFQEWVQQLSRREKLLLPNLYKKELPEELKKAMIESIQRHIQHERRLFRVLVDVMYETCDLDEIWKLLRYAYATHIEKIEKRLEKEKSEKWRRYLLSKDPIVYLATTAYESEKGILDELETFYLTKNFPLFKLVLIEIFQLADESFFLKEQNLYRELFVSSTNEQQQKMANALIKKCKLNHVKPLGKLIFERLQTYHRKPMLWRYVGEEEKRRFAQWIMKLQLKDFFGGVNKNHERFQYWEKFVPKLEDVVVTDERTTLIMYFRDVVIMEVLGTGAVYIYRADVFQRHFQPKIDRMLAERERFAHTAWQRVREVKRSELMDRDLTIPGGWLRHTGGWQWKFDEWLRRELGWEVRRNVLLQKEAENDEGSFDAE

SEQ ID NO: 3604 - protein, 860 aa, Geobacillus kaustophilus GBlys
MTPNEDGIHLSFQLHDGKTVIELKLPMAKEDIENYYKVQGFQQYVAWEELYDSGVLVDSTLPYSEYYELLKDESAKEVLECLGLPVVEEEVSGKLSLRSLPHEADLALQLLDSSGRNLDRIGKPAGAVYVLPDRLVLLPERVYRLKRALLESYESGYEKIGICQQLAKEAGIQLENFLQTETYHVVDTYDLDIAVHRPDHIELVVKGRTEEETRHLQQLRRVSSIKKGHGRSRFVSTGRVHADIVHLQQKRHITGEEVPLFLENPAAILPEHDYLFDLDQFSERVRGLIPIERVRPFFHERTGMQWFDEESGRTVPYDEAFLRELMEKYPNQQYVEYNGKWIYLDPLLRRKLLQLPKDADEALKRRYILDIKDNEEELEYKMESAQAAPFRRCPVPSELQEELFPHQIEGFEWLCHLAEQGRGGLLADDMGLGKTIQVIAFLLHQKAHGRLRPTLVVLPIALIENWIAEIEKFAPSLLDSLYIHKGSGRLASSQLISQFDLVLTSYDTLKIDQLLLGKIEFQAIICDEAQNIKSHASQRSRAIRAMQGHFRLAMTGTPVENSLDELWAIMDFVQPGALGSLKEFRSRYAETSDYDVLLKAIRPYYLRRTKQQILNDHLPKKHLVSPIYVEASPLQKEIAQSMLATKESGQVAILNMITRLRQLYGHPGAVIAGYENLPAAEVPKLRETMRIVETIRQKGEKVLIFTEFRKLHFLLKRIFMEKYGISVPVIDGDTKNRQSVVQRFNETNGFGMMILSPKAAGVGLTITSANHVIHYTRWWNPAVENQATDRVYRIGQQKDVYVYHIITTDRSHFPQGTVEELMHELLESKRHLAENVIIPFDMREIQQAIAEKMMEQRPLV

SEQ ID NO: 3605 - protein, 540 aa, Thermoanaerobacter thermohydrosulfuricus WC1
MLFKEITLFIIRLIPDFNDIFCFGIILLAGVVFFLAHRKPKQYTRLIDLYIEKIHNIPDKDMLLGELIELTDEIIEKEKNDKYITGLLEKFKNRCYSGNIKNAVDVLDYTALVEIPGRRKIFDMMPGVFTGLGILGTFAGLVLGLSDLNFSGSTQALEEGINNLISGINLAFLTSIAGLVSSLGWSYFDRKRLHYYREKIDSFHSSYKKVFVQKEIDDYLKDIREIQEEQKTYMQKFVSDLSLELSNVLSNMLEQRIFPEFANIIHQQVTSKIVESFDNTIGEIKQSTESSKQMIERFANLAYDNQLEGVQRIVNKFIESMDLSLKGKFADLGESIGEMIKWQQMVKEGMNELIERLSNNILNLQEVNKAIENTIVNFSDYFDNVNAANNHLVENISKLESVSLNINGLIEGMSKMIKDINEQKDLLLKDKTEHIQIISRYILEINEKFSLLEKSYANISKDIDILNNSLKQSMEEFANKTHEGLKRSLSLFDEELASITSYLNSTLSEIEEAVDELPKVIIEFKKTLRNDEKEMQTIEG

SEQ ID NO: 3606 - protein, 230 aa, Thermoanaerobacter thermohydrosulfuricus WC1
MKDEDKVHDYWQSYSDLMAALLLMFALLIVIMIYKYAGIAAELNLQKAKVDDLIGVRARIIDQLFKEFSNSDMTLSIDPQTGAISFSEGVFFDKDKFELKEEGKRYLNEFIPRYLSILMDPRFKKYISQIIVEGHTDDTGDYMYNLELSQKRAFEVVRYILQSNIKGIDSKTKADLMSYITANGRSYSQLIIENGKVNRQKSRRVEFKFRLKEEEMIMEMQKILGKGSVK

SEQ ID NO: 3607 - protein, 931 aa, Thermoanaerobacter thermohydrosulfuricus WC1
MIKISKDLSDRGIKIACHVLKKRKPAEIKIPLFLNPVEWLKDILPDEMEVLNVLEGLWQEGILQEENNFYVIPYEFLYNIAEDQRRILCLPVEDNSIKVHIKAKGILGSSDFALIPDIYIKDEKMGPLDKRIKNVVSHNGCFYLIPLNLYSLLNEIDAYKPTADPLLQAKIIAKVKYKAKSANVTFDKFLESEEVYYSEKLDVDIVKHSDDHIQIVPVLGNEIDSLLKDSKDKVLKQHNTLYGEGIKRKRIFLEDRVVQNYNKILRQGHLKGTQIPRFLTNPYSILPEDIDLSNFSKRVKELGLKVYRANPYINIKRDKDSGWFDFEIGGIIHEDTGFSLDEDGDYIRKNELKNNVKIDVEEYRHLVQKAVESGEDYVNYKGNWVKIDREQASRFLNIVDNEQFRKTQRIDITRLPYVLKIYENIENLEYNETALSLKKQLTGDFSISDFRYPMYLKNCQLYEHQKEGFLWFKGLYENHMGGLLADDMGLGKTLQIISFLCYLKECNEIKPTLIIAPYTLLDVWESEIRKFSEITSVYRHTGYKRYKTPELLKNYEITLTTYETLVKDQLLLGQIDWQAVVCDEAQKIKNSTTLTTTAVKALKARIKIAMTGTPVENNLGELWCIIDYVQPGLLSSYYEFRKTYQIPIEDAISNRSEAYVEVKNKLLNTIRPVYLRRVKDGILSLPAKNEFFLEVELTALQEKLYCQLIEDYKNKGKSESPLGVLQKLMELCAHPRLVRDEGEVNTFQLLSESGKLQRLIELLNEIKRRGEKAVIFTHYIKMQAILRKVIMDVFGINCPVINGSIKGDRMNVIDKFKESSGFGVIILSTRAAGVGITITEANNVIHYTRDWNPAVEKQATDRVYRIGQTREVNIYYPICISSRGKTVEERLNEVLQKKLQLLNEVIVPSRCLSITEENYDYLLQDFSDWSA

SEQ ID NO: 3608 - protein, 743 aa, Acetonema longum DSM 6540
MVVVLQILVDLLQMLFPIAVVIEKPTPANISMLLFMALMFWLLYFYGYRRFYLQGIRPLLLILNDLKQVAVRPAELSQREHLLRLRNAFRSYPMLLPLWTEWESAFYRDAAADQGVTYSSAEAEYVFSEQRMLAALGFNLQFYQALPGYFTGLGLLGTFWGLTLGLSQINLSTPELEVLKEGIRRLLDGMGTDFGCSLWGVILSLSWSWYEKRKRAQVREKLAELQDLLNQLVTRRTPESWLTEILSECRVQSRTLTAINNTMAETMATALEKRMTPVFLQLASAIDGLRQAGTSQIAHAIGEGAGQQLKSLGDMLVQVQRTMETTVGRSADVQEQMRETMAVQTQSMAETFRQVLDAAAVRQQEMNRQTDCMIQSATTRQAEMNEQTGQRLQDLLAVIAASLRQQQAEVAGTIERAGTLQEQMNQQAGANVASMVQATHQVLDLAAARQQAMAEQTQAKMQQLLELMAASLLQQQGRLENTTEKVTADFAARMGQMSQQMDKSLQETTRQAGDSFRDQMSEMSREMKGSLQAFEISVIDNASRMQQETRAVAETLHQAFENVANRYEKERDQVTVLLGQVQETMEAFRQSAEQTGRTAKQFEQAAHPLYDSARQLQTALEQMQQYQDEFRRYIHDSEQRLRDNLGVSQASVETIQESLRQTQISWQAYESKFGVLRTDLEQIFDSISKGLREYRAITDESLSQFLQLTQNSLGQCVGQLSAVINELSETVEDLYPILENRPK

SEQ ID NO: 3609 - protein, 232 aa, Acetonema longum DSM 6540
MFRKKYYPENPEAVDDPFQASISDLMASLLSIFILAFIYYILNFQQATAQLSENQSKRTEILLAVQRELKQKDVDAIIDIEHGVLRLPEGVLFDTGEARLKESGIATAGILGPILENVLNRPEFADSVDTIFIEGHTDDLPIHTALFSSNWELSTQRAINTFHALTDAATGLKQFTNSKREPVLSCSGYADTRPLQPNTTEKNRRENRRIDFRFSMTPPTEDDAGILRPANR

SEQ ID NO: 3610 - protein, 476 aa, Acetonema longum DSM 6540
MNSLLTGELSDSIKQLQTARDFGRPQRLTEQADAIVRQFQAVFTAPHEKDVEEFLLTLRRRWIKGGQKGISWLRVREIKLLPWVIYSQQPPRVIDDDYFRSDILQVLRENWQISLRAFIAAYLMKFELPAAGQEAVRRELENLVRGYAGNRTSLSKWRRRSDTLFVTDALPVTARLLGEGPKPAAAVLEQLGFDSRFATSGFLRQAVVRALETLVKSYPRFLERLPALVTRQDLTGKDVARFDDIAVQTAGTFIVRAGPQAPAKVRDLLCCLYLRILGDPDAAAGRFYWRKVSPKAAAVMTGWIIRLDLEMFFSLLGRLEERRRANMYRYAFWQAFLPYISQTWLAISPGLKNMSQEDGTGEYLASRRPARLVSSQLGQALLLIRLGDYVFAQWSQEQRIMVWTADALPLGREAYGKEWLRTPPLAAWDISKGTETYLWQRQIEVWIYHHTGRSRVISYQMEDPDPVEKGSDSKRR

SEQ ID NO: 3611 - protein, 411 aa, Thermosipho africanus H17ap60334
MPLMTLQNFLNLIIHSTFTKIYLLVEIVIFVYFIIRRNSYISKFKNPIDEMQIEEILNFASFWPNLFITLGILGTFAGIILGISNLNFQNDTTLKNSINSLLSSMGTAFSSSILGILFSIISQWLNKKLILEIPKNSSNKILDELIGIRNDIKELNEIFSRPLETISENAGQTVEKYTQKISEINESFSSNFNKNINIFSNTVSKISEEISNQLESIRQQSELIEKKGELIQKQSENLQNFSEIIENSKNLFNEILNSQNNIVNKMNELIDLTNSIISNQENFEKLNKNVSNLIEKLEEFTTYFNTNINNFVNSISEINNKVPNQMILNYKKAFEEIELFTKDFFSKLKDITVYLDDSIENFDNSLNEFNETLLKVKNEIHNSIELFSNSLISSLDNFYTNNNNNFDKLQE

SEQ ID NO: 3612 - protein, 218 aa, Thermosipho africanus H17ap60334
MSKKFNPWISYSDLFSALILMFALLLSLVLLQYIYTFQEKENRLIEIIGIKAKIVEDLVKAFKDLNLNIDIDPDSGAIIMNNEILFNYDDYNLSENGKDILLRVINTYLKVILKPEYESFIASIYIEGHTVPTGSYDYNIELSLKRALEVFKFLKSVSNKIPNQDIFFKKLVVSGQGFNSPIIENGKINYQKSRRVEIKFTLKDQDMMNEIKKILTGY

SEQ ID NO: 3613 - protein, 832 aa, Thermosipho africanus H17ap60334
MKFEIFEDSIEIKLGFRDRNIKKIYRIIFGERISKYNIKNDFLENLYKEDPEILEKLGFNINFEQIKLKINYINNINLNTIEFYYNNYRLNFQNRFLINREKGIIIFLFEELYDLITSLDSKIKLLEKLQKLNILEEKYKIKIESPKEFKKLDYSLKVEKSENGVAIDYTIYGLPKKKSVLLNGIWSTKNHIYFLENEKKTDLELLEKYRESKGGKIVINEKNIDSFYEDYQLTFSEEFVKKLSDRVKFLTFVPKNVSIKKNLTTEISSEFLDYNIIQLQDLAEGGVDNIELTDELKKLIDDARKKNKRFIFYNDSWIKIDSMPYFEGTENLKSKTDLTESKEINNQLFDIQIKENLEELEYFKVKDDSRELIEKRLELKYFEGDLKEFQKLGVMKIIAAYLEGFRGFLLADDMGLGKTAQAIAFMAWLYENRSLFPVLIAVPNSLISNWKDEISKFSPELRKFIDTGDLEIINYEKLFRRKDFLVKDWNLIITDEAQRYKNYRSKISRIIKGYKFKFHLALTGTPVENSIDELWNIIDAIVPGFLGKLKDFNDRYNIINSKPDSVQAEEKSLEILNNIDPIFLRRTKFDESVNINFPEKKEFKIDCFFTDIQEEIYLEKYQQNRFINGRKNFLGLVIKLLQVCDFAVEGFNSDFLKYSGKLKRLKEILLNIKNRKEKVLIFTKFLLTQKILKTFIESEIGMNCEILNGTLSREMQNQVINYFDRDLVDVLIINPRVGGVGLNLVKANHVIHFTPEWNPAVTSQATDRAYRIGQNKKVFVYYFYSKFKNSNKKTVEEYFMKLLDRKKQIKNILLDNIAINKEFENIKNELLN

SEQ ID NO: 3614 - protein, 667 aa, Rubrivivax gelatinosus IL144
MSETAKLLGGIHPSLQTLHGLPLWVFLLVVLLTSIFLLGYLLKGTQVWWQLRSTVRAVRSFGGQKAPPDPKAVGRAFQSEPLKHLWEEYDDTLHELRKAASGEVALVEVRATVPAEAMFTRDVLVDSRLFDDFTRHLPGVLTGLGIIGTFAGLLAGLQDFKPFPIEEAVKGLGPLLLGVQHAFVASGVAIGCAMVVVFVSRFTLAYLYGLVEQLTHGIDSLYSTGAGEEYLARLVRSSEQNAASTAQLKDALVEDLHKMMTNLVDRQIAAQEASTLALGKHIGEAISTAVAGPMERMGNAMEATARGNGEQVNSMLETLLTGFMAKLEDTFGGQMRGINEQMQRSMDSMAAVQASLQGLLADIKQTNEHAATQMSGTLEEAMKRAADNQQLLTDQMREFVQDFRRLVTEEQNKSKAAMDEAVMKVLREVAVAIEGLEGARKASAAEEAGRNDRLASQTNQLVGGLTAQVEALLGAVSDQVAKTQRNIDALSQVSLSAIDGMNHGALTMSSAAQRFETAGSAVSTVFERSTKVADTLASASAALQAASTAVQRGFEQYDSTRRTVDSQVAVLTGLIEAAKKEAGVSQELVASIKASADSMRAAEAQSREHLAGVNAALLKAFEDFGIQLVSRIKDAIAETDRHLAQGTGHLNGVVQELANAVQRMKRA

SEQ ID NO: 3615 - protein, 208 aa, Rubrivivax gelatinosus IL144
MSALMVLFLVVMAVTLVAVTQSIDAATRASIERSQAISKLMSLIAEDSKKSGVGVDQSNFRIDLGKDVRFDSGSYTITPAARQFLRSYVPVLLKAKDTPEGKRWLRSVVIEGFTDEDGTYLYNLLLSLDRSRSVVCALFEGASGSEGLRRDQLQKVQELFLVGGYSFNSIKKDKAESRRVEFKVDFWGLEETPVPPSDVLKDKEFGKC

SEQ ID NO: 3616 - protein, 565 aa, Rubrivivax gelatinosus IL144
MLAAQALQVLTRDLAACIARMGLGGGNFGVPGLVEKPVREAERIFQGYAKAQPRQEDSYAAARAFLRGQRLDAWQRDLVASAVAQPIREAGDETALGSQRFDTLLGEYQAEAERGDLWRLTWHGLLYSYFQYDISAAGGTAAQTGWEKLRAFLERTWPLIDRQVGAGLVPDWVHVLRKEGAVLSRSPVDKYARGYLRGDSAAVDQLAEDLGIPPSSWFWHALVLGAVKRATADSDAEFQRLVPQLIQLIKTRPGFRDEALEYILVRYHACRAAPQDELLRDFVCAPAVWRNPKLKAAGYATAWNRVPEPVWQMVLGWVNERNLKDFFDILAARNQADEGRLAFWSQYLKQITWTRLVFGADTMALQRRSPEVRNLIAREEGAYARLDGKSEVDAFMMQIGSYLIVEFSKKPNACYAYKVDELPFEPYAKHYDGGTTDLAYGYRGEKAARIVHTPGWQARAAEELRRLGIRPDRPDAQRVVGGGAATGSATAGGSRPDSASPGPDMPALEALMRRFRGATIDDRRGPGGGRLWVEDPLQRVQLGSELKALGFKWANPRQAWYYPES

SEQ ID NO: 3617 - protein, 1287 aa, Rubrivivax gelatinosus IL144
MGLFDLFKRAVRAKSDEPQLQTSWTPGGVRIEFASRLASPTPDGLLEAIHDAGPDETVLGAYLAQLAAEDRCLLSPDGALVRWEDVFALQAMAEHAGALRLLGLPPQGPLRPVLDCTGGLSDADFELEVAGWTDGSQQVRPDSIVGAVASVAGEEQLLSAAAWATLTEVERFRARDASGRAQHEQELAWGRIRRLADKAGALYASTFLETTLVLTPDSLRLPLTREETPFGRVVTVGPTFDGAPDGWLKAFDGFNSVQQHYDLTKGGGRVRVVISEPVRKVLSVIKREMPGRKVSGAKAEKFIHNPFAFLGDVAHEVLREEEFEADRAQAGAVAAVFSIVGRYEIGRINSVDLVVTEHFGDAHSRTDSKPFASPEELEQFLLALKAALEQERERFPWDEYDLDIDGETTIQFEAGLQLAHVWRTQPAQRISFEDVYELEGYSGRIEGIGAAKPIYVPVFQRDKKEGEDGGWLPSDLTPMVKVTLQGHEGDVLIPLTKEWVQAFDEQVTQAEKDGRAEVKNDSLPTAVSTQQARAFADAFQNMVGAQDRIKRDGGSKQKERKGPRQTLLVKTNFHGVDYLEERRASLALPEGAAADLPRCLRPDIELKKHQLYGVAWFQHLVGKGTSQCRGALLADDMGLGKTLQLLSLLAWYYERNPTSAPSVIFAPKSLLENWANESKKFFTQSFPEVVVLYGDALSSRKQPLGLIDSQLQEMGIVELLKPDWAGSSKVIVTTYEVLTAYEFSLAKQPFALVICDEAQRIKTPGTLVTLAAKKLKADFRIACTGTPVENSLADLWCLFDLVQPGLLGALEEFGKTYRRPIECESEDQVEALKRLQAAIAPQTLRRTKADIAADLPKKYFAAKKSSEAALAFKDCLGEEERLEVQLTEHQRMLYKGGLKKLQDAAQESNGRKRAQLSFGALHLMRAVCAEPYCLPGSKFLVDKGGRETHLANSPKLAWLLDRLQEVRNAGEKAIVFTELREVQAALYYFLKDAFGLRPFIINGDSQGRQGYIDRFSATSGFDVIILSTLAAGAGLNVTAANHVFHFTRAWNPSKEAQATDRAFRIGQERDVFVYCPTVVADDFTTFEVRLDQLLKRKAGLAGATLDDGGLTSMLNGSGKDASYRELVGDGDGGEAVPKRFLTIDDVDRMDGDSFEAFCCLLWAKQGFDATVTPKRGGDGGIDVVALKGTEGDLLQCKSSKSAEVGWDAVKEVVAGAARYQARFKGTRFRRLAVTNQHFNRGAIEQAEANRVSLVTRPRLEELLGAHPVSNHEFDEALHSFVEFAAEA

SEQ ID NO: 3618 - protein, 636 aa, Legionella anisa
MINPEYLFTLITKDSTVYFFVAFIFAIALIPFWQATYTIGKVNRAIKKANELIKSLGNESSSKFYNEFENIKAQLNGIDYLKNIWGEFIGSTYYLTNNNTQQINSNKIFLSHRPSYYFNKNSVLGAQLNLNQFFSFPNYLIGLGLAFTFIGLAAALHIAQSGLANGEGQTALSELLKVASVKFFSSITGIGCSLIISFIQKIRIKGFQNNLNNFCGLLEKCTEYKPAEKLIFESIQEEKTHTLALQSMANDISIGIGDVLNNQLPASVANALAPLADEIRALAQKFSGSNENALEKVLNEFLDQLRKSSGDEMQGLIDGVNTLKDSLLRLVENMETMGKSFGSNTKDSTDRLMASLDAFTSTFMPVQQGIGKFGQSLDSLENIAKSIQQASGNITGAADISNQSMSNLAGTVTQITENLTPIQDLLNVINLSLKKVDESSENLHGAGRTIASVADGFKNSAESIEQASNRFDQKINKFEVVIDGISGTANVLERASNNVSNAVKPLSDTSEGLTKVIHAIQETESRIHGSQKQLSDLLINLENFTEKLPSLLSQYEERFSKVDQDLANAFGELAKGSDEFRTSISQFVISFDQQFDKAIRQLSGVIQDLQEERENAELTTNNYHKAEYVDADTRIA

SEQ ID NO: 3619 - protein, 234 aa, Legionella anisa; identical to SEQ ID NO: 1368

SEQ ID NO: 3620 - protein, 482 aa, Legionella anisa
MPLDNLANTKEQLKHFFKLNKLNVSKNLLTLPTILQTVKELEKKFAVTDHSPSIVEIEKIYFRFAQAIENKELTSISNREWRMSPYIFWYQNGESKPLGSNYDFINQYINWLKRNSTPGNWRKLIHVFLRDYNQRSNYKLIFQQISCVIREELDSCSQKNNLIRWTERDRQINLFSRDFCLNKAINSFIQDANCDWDEFALLSGLHGDLGQTGYAESIGKELLNKINTLPSEELLNATINYYFNNGQIRFNDHRVKLIEALLSPWATNTYKISSELKKRIHDILIENFKDPRIIAHQRNGWRSVNQSSLQIMLRWLVGDSIEQFFDIVDQMALDHQWKYRKAFWMAYFALGYLDEAWFALGPDAQYYAETHFGNKLSFGKIVKECSSNQSVLIIKIKDLVFAEWSHNGKCRAWLTTDPGCPSHYKDNYSGSNLKAKSLKIVPHYQTDGIQHQGSENYSWQEKLNDFIYQHTGIKVYHYDFRI

SEQ ID NO: 3621 - protein, 574 aa, Legionella anisa
MIFGFKRKAKITTKFLCHEQLQDGIYRFIFQLENKNTIVPIQEWRNSNHPGAIWLLDYLHDNDLIQEDLLYNLTISLRSEQLIEILKGQECYLQHLLELPPLFDGGLHIECQGLLAKDDYTINYSWIDGNSRPITQAERRGIFLIFGNKKYLLSYFAWKFAEDIDAIREKLHLSNSMHARLEILENFKSIRALLPEEESRKFSDDGSISNIKLYFANAFRIDATPEGNSFKIQPVLLKRHETHNQDCVFENILPPIEQQRYIDQFSNSTKLQPYYTLGPGKYILINDQLNKALSTIHKIQHSNDTEKLNFLKNPKATLADSLEGMISDEELNLIFSDRVTGIGEWNAKVIPWIQLPPGEWIPDGKFPNSPFGIDIAGKKIQFETISDLSVTLDKIKEAKKSGVLFVDHEGINIPVNDNSISALEKFIPRQPLYNEDNKHNQANSLDQDRILQTPVMLVKENLEYVEFHVVRLPRKRYPQSIKLPETIRTEPKQHQIEAYKWLCAHYQAGSRGVLLADDMGLGKTFQSLMFLEWLREGMIKEDICDKPLLIIAPTGLLKNWEAVSFRQGCVTEFK

SEQ ID NO: 3622 - protein, 667 aa, Bacteroides ovatus SD CMC 3f
MSDIITLASGAVIILVFLLFCFEERKLYSIKEILVKLVNSENILDSLNNSKIASLGEKYEKTIIVNTKDGKKSNIPASEFIYDNSVCKCNKVNLRMLDTASGTLVGLGLLGTFLGLTLGIQGFDSSNTDKINESIQGLLNGMGTAFLTSLLGMFLSIVFTFIDKSLRHRLYKNVNGLTEKLDALYYIDDIALANLNQQNIIDRLYNALKSDFQVQTNTIKDSFNELSGKLSYTNESGVIIPVANAVREILSENAQQTKALKSFSTDLAIELNQGFDETLSRQMQQKILPLMESVDATTKTVVEHIDQMAKTVSSPASDMMQRVVDELKQSMKLLMNEFSSGLSGSATTELENLAHQLGSATQAMADFPKNMENISATLQVTIEEVKHSISEISNTSANTNSMAMRQMQEQITFATGAISNAINEVKEVMSGISQSSQEQSNQMVSKLADAADKMGTFLTGTISTLSSSVTESVKSITDDVNSKQANLIALQEDTTSQTKRLLDSFNIGLERLEKMNEYISGTMNGFRQAQGEITISTSNLRTISGDMKLATELFNKGQNDYATRLAELQTMSQRGIDQVTEMLRDSGQLSEDYVQKFEIIKQGLGTIFTQLQNGLSEYSRTIKESTDKYLAQYTTSLTQTTGALASAIERQNEVTEMLTDTITRNKR

SEQ ID NO: 3623 - protein, 231 aa, Bacteroides ovatus SD CMC 3f
MKKKRTEYESKDENAFALSTGDLMASLLFIFILLLMGALLQVQEKAEQDEEIVKRYDQIKTQLYIDLQQEFKDDLAVWRATIDSTLCIRFQEPSMLFDEGQSLLKPKFKNILDDFFPRYIAVLSRDEYRDNIEEIRIEGHTNSNGGYYSNMELSQDRTRAVLQYCFSLMSDDLEEWLKGLVTANGLSSSHLILKMNGEEDKDLSRRVEFRVRTNAEKQLEDIANKRFIHKQ

SEQ ID NO: 3624 - protein, 616 aa, Bacteroides ovatus SD CMC 3f
MEDIYALLNINKDLLQDFHLLAERTVDHQTELAISRNMRTLQEIEVRMMTDRTVIASQQTIDEIMQKVIENAKTENKETSIWSIHELRIVSYYLIKLQGNEQAYMYALHILETNWRDMFFNGLSFYCLDSWNMIDPELRSLTCDLLSKQLKQYNGSNKKYMVMKNHANLFDEAGPLRLCALLSQKKQDVKNAPAYFSNKLSTISQSYYSDVIVNFISSNKIIDFDYIESVLNAHKYDRTKKLIFADLVLRVNETGDDVKRTQLCKYANRILGDITLGATWAPFAGATEKQAQQLKKAKQHVNLWFSQKIIETFFEVCVQDRDRKDFWLKYVEYVSSFKIVGSTTTKRILQGDNRVSGIFLPHFIETDSFASQTSALVLFIKNKMIVEFSDTGALYVYNQDHEKVKMVTGKKRYIPSTADLKITSMGSLIDISDWYYNTYYEEGRMTHRGNWQGRLSGWLQQKVISSNNIGISFQDAEDNNLFKATPIQKEEFKPSSNSVPRTSSNRPIKTVYEANIRFSLSSKWISNGKCRIVCGYKGFYLNFSAGNQFVHLRPLISGATPTGSVWIRKARNDNGWQEVVHSNSGREISVGYLKETNGTVLYKQRSEQTDYMTIKI

SEQ ID NO: 3625 - protein, 221 aa, Bacteroides ovatus SD CMC 3f
MLTQVVNKIGILFIVNFNGHDLHFQEWKATDDSIYYMPLSTLVDNGYAYASKDGCLVPYENIYLLDEEDKLLLGVPQPYNMAMRLIGTSMLNASDFEYKVEFLSHVPDGELLSYEQCGNILIVNKKKYLLSEAQYELINRIHEFNSSPEEEKTTDFNLRNFGEIKALAEQAGCELDSYLANENVYVPERIKIEVGRDEDGFTIDPAIDIDENKNFSSILIE

SEQ ID NO: 3626 - protein, 729 aa, Cronobacter sakazakii ATCC BAA-894
MSWLNSFLLTLTSVQPHNVPITVGILVGVAFGCFIYFYLFRAIKIINGLKKYTHSINSLENTAPVEQLDHLRNLFQKPEFRHAWNEFEESLHPQRELENGEETIVRVRATAPSASFFSEQQLIDIPLNTEFFKHLPGILTGIGIIGTFYGLMIGLNHFDPSTPEQVSSSVNNLLHDVLYAFLGSAAAIFASIVVTWIEKLSIAKCYKYLEKFTASLDKLYISGVGEEYLASLVKSSNDSATQARHLKESLVTDLRDMLLHLTESQKVENERLANTLSATYRESGMQFADQVSGAIENSLKSPLDKIAGAVQTASGDQSGMVQNMLQDVLTAFMAKLDTTFGQQFTNLNDMMGQTVGAIQTMQSGFSALLQDMRQVSDDSRQGSAQLIEQLLAEMKSGQQAMQAGMNDMLTSLQASVARIGAEGEGAGERMARQLEKMFADSEAREKAQAEHMAAFIEAIQNSVQQGQSATMEKMASSVEALGEQLGGLFSQMDKGQQQISAHQQANQQSLHEQTQRVMGEVDDQIKQLIDTVSQQHKSTTETLRQLAEQTNRQIQDMQHGADKMRVAAERFEEAGDRVSQANHITVDVLNKAQSAGSTLSGATSELTSVVADYRNNREAISKSIAMLELLAANTQSEQTTRSQFIADLKQHGERLQSYNREAQTFMDNVSDVLGKGFEDFAEGVSRSLDKTLGKLDVEMAKASTLLAGAVEQVGESISELDDVLSRVRV

SEQ ID NO: 3627 - protein, 246 aa, Cronobacter sakazakii ATCC BAA-894
MFGNTWSIKKRRGDEAEKPFWISYADLMTAMMVLFLVVMVASLSSVTQRIQKAEQGEKTRGQDITRLCERLELHARNLNKTIVVDCHDNRISFGEAGRFDHNRFFLNAEGQKALQDVVPLVLEAAESEEGKKWFKQIVIEGFTDTDGSYLYNLHLSLQRSEWVMCSLLDSRSPLQKNITIEQQLQIRKLFLAGGVSFNNAKESKEASRRVELRMQFFGLKDKRDGDETVDFPPVINKEVCQLVMPQ

SEQ ID NO: 3628 - protein, 562 aa, Cronobacter sakazakii ATCC BAA-894
MTSALNSLSQRITAALSVTQQSETFLRNDFDALTSAGIEMEKRFDKADKIPAPPHEIRLEALRRLRLAQELSGRDWRMIFYGLADNDPLYPNQPILLEDDTLFPKVDSKIKKCIASNNLKRKDWAALCASYFAYQNETPEQNPHWCVLRGHIAQGYLVVKSAIRREKPWMKTIEFYHDIFTPQAGGVISRQLLAGEHNSLSSLEKIAQIHDSSWLWKRIFTVLLAQLDTMDDPEYLDKISWLLDLAAQWVRFRNDIISATLTRYYHSTYRDQAHSALKVAALEYWDNPQLKSQQNKWYQYVSEPVAGMVRSWLAKQDLMHFFELLRGNGDVDQARLFYWLRFANQMGFTRIVMGTDAWRDRGSDFAKFREENKGRLSYLRGGRNLDNAMIMQINDYLFVEFSGTGNAMYAYRVGQAPFNPESDTFDINLQLKDQNQKRCILRMPHMPRAEGYSKAHITGWMLKYDDELRKLGIRWLAEEPVKFIEKQKSSSISFSKVKIINPQRDTAIQRLVENVPCIVSDNRQKGGVLSVQLNTPDDALERELLRLGFSPVAKEPRRYWIK

SEQ ID NO: 3629 - protein, 1080 aa, Cronobacter sakazakii ATCC BAA-894
MLKRLLSKLTGDRQQIERHLKDKYQVEENGLSFSLSLVDDSQLWALASWLEQLAEEDYLISLTDRWLLSWQALYCLLEDEDHASSLPLIGVPEVLPLRASLCSRGALSDSDFRVWISQWATVPGRKPIRFSRLGAILTHDNQQYLLSRENWALLQAIEQLSVQQIQIPGETTNQLGWAAIRKCAKQAGAKFDDYLEKTHVVKPTSLSLRLRKATVADTAVIEIEPHFEDQPANWLSNFDKNSQVHDSYRIPGENGELSHVILAPEVKEVLNSIHSIPGRRVAGSEALSFVRNPYAFLGEDAASVIAPEEHEKALFNARIFFHHFRLIPQWNPYNKIADITLVLEPISPVPQPEITFVFSAPWELEKFVQQLGISVAAQMPAGSWQGYELELSQFTEQQWHDCQALLARWQQEIEGKEFSDVLDIAKYGDRVIGIGEFEKISSPWLTKAQSENWLPDDIDFSVFAVETLTDWQPENLHHFDELQKRINQAEAAGETHITAPWNDSELPLDTAKIFSKKWGKKQSAANGSAGNIVDKPTRAVLKIEQNIEEAAYIKQRRNLLLSARNAEPEIPLSLKEHIRLKDHQREGLAWLQQLFIRSPEETAGCLLADDMGLGKTLQILSFLVWFIEKFPQEPPSLIVAPVSLLDNWERELDNFFYTTGVPVLKLYGETIKALKYPKQAIPAHLQSQGIKNLLKPGWQGESKIVLTTYETLRDQEFSLARQSWSIMVCDEAQKIKNPAALITHAANAVQARFKVACTGTPVENTLVDLWSLFDFAQPGLLGALNEFGKHYVRSIENEAGRDTERLETLRALIEPQTLRRTKEEVARDLPRKIEVESCKQLIFSGVQKKLYLSSVANWQQQQAFSEEMQQAGTGMLGLLHKLKLICAHPAVVDPAPHFRDNSPKLNWLLKKLAEIKATTKDKVIIFTELRDLQRELQHAIYQKFGFRPVIINGDTSTKSHSQNSRQRLIDNFQSQPGFGIIILSTVAVGFGVNVQKANHVIHFTRCWNPAKEDQATDRAYRIGQTKDVYVYYPTVRDPEITTFEVTLDELLKRRRALAKDMLCAAPDLSSTDFEDILKGT

SEQ ID NO: 3630 - protein, 246 aa, Cronobacter sakazakii E899; identical to SEQ ID NO: 3627

SEQ ID NO: 3631 - protein, 523 aa, Cronobacter sakazakii E899
MEKRFDKADKIPAPPHEIRLEALRRLRLAQELSGRDWRMIFYGLADNDPLYPNQPILLEDDTLFPKVDSKIKKCIASNNLKRKDWAALCASYFAYQNETPEQNPHWCVLRGHIAQGYLVVKSAIRREKPWMKTIEFYHDIFTPQAGGVISRQLLAGEHNSLSSLEKIAQIHDSSWLWKRIFTVLLAQLDTMDDPEYLDKISWLLDLAAQWVRFRNDIISATLTRYYHSTYRDQAHSALKVAALEYWDNPQLKSQQNKWYQYVSEPVAGMVRSWLAKQDLMHFFELLRGNGDVDQARLFYWLRFANQMGFTRIVMGTDAWRDRGSDFAKFREENKGRLSYLRGGRNLDNAMIMQINDYLFVEFSGTGNAMYAYRVGQAPFNPESDTFDINLQLKDQNQKRCILRMPHMPRAEGYSKAHITGWMLKYDDELRKLGIHWLAEEPVKFIEKQKSSSISFSKVKIINPQRDTAIERLVENVPCIVSDNRQKGGVLSVQLNTPDDALERELLRLGFSPVAKEPRRYWIK

SEQ ID NO: 3632 - protein, 1080 aa, Cronobacter sakazakii E899
MLKRLLSKLTGDRQQIERHLKDKYQVEENGLSFSLSLVDDSQLWALASWLEQLAEEDYLISLTDRWLLSWEALYCLLEDEDHASSLPLIGVPEVLPLRASLCSRGALSDSDFRVWISQWATVPGRKPIRFSRLGAILTHDNQQYLLSRENWALLQAIEQLSVQQIQIPGETTNQLGWAAIRKCAKQAGAKFDDYLEKTHVVKPTSLSLRLRKATVADTAVIEIEPHFEDQPANWLSNFDKNSQVHDSYRIPGENGELSHVILAPEVKEVLNSIHSIPGRRVAGSEALSFVRNPYAFLGEDAASVIAPEEHEKALFNARIFFHHFRLIPQWNPYNKIADITLVLEPISPVPQPEITFVFSAPWELEKFVQQLGISVAAQMPAGSWQGYELELSQFTEQQWHDCQALLARWQQEIEGKEFSDVLDIAKYGDRVIGIGEFEKISSPWLTKAQSENWLPDDIDFSVFAVETLTDWQPENLHHFDELQKRINQAEAAGETHITAPWNDSELPLYTAKIFSKKWGKKQSAANGSAGNIVDKPTRAVLKIEQNIEEAAYIKQRRNLLLSARNAEPEIPLSLKEHIRLKDHQREGLAWLQQLFIRSPEETAGCLLADDMGLGKTLQILSFLVWFIEKFPQEPPSLIVAPVSLLDNWERELDNFFYTTGVPVLKLYGETIKALKYPKQAIPAHLQSQGIKNLLKPGWQGESKIVLTTYETLRDQEFSLARQSWSIMVCDEAQKIKNPAALITHAANAVQARFKVACTGTPVENTLVDLWSLFDFAQPGLLGALNEFGKHYVRSIENEAGRDTERLETLRALIEPQTLRRTKEEVARDLPRKIEVESCKQLIFSGVQKKLYLSSVANWQQQQAFSEEMQQAGTGMLGLLHKLKLICAHPAVVDPAPHFRDNSPKLNWLLKKLAEIKATTKDKVIIFTELRDLQRELQHAIYQKFGFRPVIINGDTSTKSHSQNSRQRLIDNFQSQPGFGIIILSTVAVGFGVNVQKANHVIHFTRCWNPAKEDQATDRAYRIGQTKDVYVYYPTVRDPEITTFEVTLDELLKRRRALAKDMLCAAPDLSSTDFEDILKGT

SEQ ID NO: 3633 - protein, 259 aa, Cronobacter sakazakii 696
MEKMASSVEALGEQLGGLFSQMDKGQQQISAHQQANQQSLHEQTQRVMGEVDDQIKQLIDTVSQQHKSTTETLRQLAEQTNRQIQDMQHGADKMRVAAERFEEAGDRVSQANHITVEVLNKAQSAGSTLSGATSELTSVVADYRNNREAISKSIAMLELLAANTQSEQTTRSQFIADLKQHGERLQSYNREAQTFMDNVSDVLGKGFEDFAEGVSRSLDKTLGKLDVEMAKASTLLAGAVEQVGESISELDDVLSRVRV

SEQ ID NO: 3634 - protein, 246 aa, Cronobacter sakazakii 696; identical to SEQ ID NO: 3627

SEQ ID NO: 3635 - protein, 562 aa, Cronobacter sakazakii 696
MTSALNSLSQRITAALSVTQQSETFLRNDFDALTSAGIEMEKRFDKADKIPAPPHEIRLEALRRLRLAQELSGRDWRMIFYGLADNDPLYPNQPILLEDDTLFPKVDSKIKKCIASNNLKRKDWAALCASYFAYQNETPEQNPHWCVLRGHIAQGYLVVKSAIRREKPWMKTIEFYHDIFTPQAGGVISRQLLAGEHNSLSSLEKIAQIHDSSWLWKRIFTVLLAQLDTMDDPEYLDKISWLLDLAAQWVRFRNDIISATLTRYYHSTYRDQAHSALKVAALEYWDNPQLKSQQNKWYQYVSEPVAGMVRSWLAKQDLMHFFELLRGNGDVDQARLFYWLRFANQMGFTRIVMGTDAWRDRGSDFAKFREENKGRLSYLRGGRNLDNAMIMQINDYLFVEFSGTGNAMYAYRVGQAPFNPESDTFDINLQLKDQNQKRCILRMPHMPRAEGYSKAHITGWMLKYDDELRKLGIHWLAEEPVKFIEKQKSSSISFSKVKIINPQRDTAIERLVENVPCIVSDNRQKGGVLSVQLNTPDDALERELLRLGFSPVAKEPRRYWIK

SEQ ID NO: 3636 - protein, 656 aa, Cronobacter sakazakii 701
MFQKPEFRHAWNEFEESLHPQRELENGEETIVRVRATAPSASFFSEQQLIDIPLNTEFFKHLPGILTGIGIIGTFYGLMIGLNHFDPSTPEQVSSSVNNLLHDVLYAFLGSAAAIFASIVVTWIEKLSIAKCYKYLEKFTASLDKLYISGVGEEYLASLVKSSNDSATQARHLKESLVTDLRDMLLHLTESQKVENERLANTLSATYRESGMQFADQVSGAIENSLKSPLDKIAGAVQTASGDQSGMVQNMLQDVLTAFMAKLDTTFGQQFTNLNDMMGQTVGAIQTMQSGFSALLQDMRQVSDDSRQGSAQLIEQLLAEMKSGQQAMQAGMNDMLTSLQASVARIGAEGEGAGERMARQLEKMFADSEAREKAQAEHMAAFIEAIQNSVQQGQSATMEKMASSVEALGEQLGGLFSQMDKGQQQISAHQQANQQSLHEQTQRVMGEVDDQIKQLIDTVSQQHKSTTETLRQLAEQTNRQIQDMQHGADKMRVAAERFEEAGDRVSQANHITVEVLNKAQSAGSTLSGATSELTSVVADYRNNREAISKSIAMLELLAANTQSEQTTRSQFIADLKQHGERLQSYNREAQTFMDNVSDVLGKGFEDFAEGVSRSLDKTLGKLDVEMAKASTLLAGAVEQVGESISELDDVLSRVRV

SEQ ID NO: 3637 - protein, 246 aa, Cronobacter sakazakii 701; identical to SEQ ID NO: 3627

SEQ ID NO: 3638 - protein, 523 aa, Cronobacter sakazakii 701; identical to SEQ ID NO: 3631

SEQ ID NO: 3639 - protein, 1080 aa, Cronobacter sakazakii 701
MLKRLLSKLTGDRQQIERHLKDKYQVEENGLSFSLSLVDDSQLWALASWLEQLAEEDYLISLTDRWLLSWEALYCLLEDEDHASSLPLIGVPEVLPLRASLCSRGALSDSDFRVWISQWATVPGRKPIRFSRLGAILTHDNQQYLLSRENWALLQAIEQLSVQQIQIPGETTNQLGWAAIRKCAKQAGAKFDDYLEKTHVVKPTSLSLRLRKATVADTAVIEIEPHFEDQPANWLSNFDKNSQVHDSYRIPGENGELSHVILAPEVKEVLNSIHSIPGRRVAGSEALSFVRNPYAFLGEDAASVIAPEEHEKALFNARIFFHHFRLIPQWNPYNKIADITLVLEPISPVPQPEITFVFSAPWELEKFVQQLGISVAAQMPAGSWQGYELELSQFTEQQWHDCQALLARWQQEIEGKEFSDVLDIAKYGDRVIGIGEFEKISSPWLTKAQSENWLPDDIDFSVFAVETLTDWQPENLHHFDELQKRINQAEAAGETHITAPWNDSELPLYTAKIFSKKWGKKQSAANESAGNIVDKPTRAVLKIEQNIEEAAYIKQRRNLLLSARNAEPEIPLSLKEHIRLKDHQREGLAWLQQLFIRSPEETAGCLLADDMGLGKTLQILSFLVWFIEKFPQEPPSLIVAPVSLLDNWERELDNFFYTTGVPVLKLYGETIKALKYPKQAIPAHLQSQGIKNLLKPGWQGESKIVLTTYETLRDQEFSLARQSWSIMVCDEAQKIKNPAALITHAANAVQARFKVACTGTPVENTLVDLWSLFDFAQPGLLGALNEFGKHYVRSIENEAGRDTERLETFRALIEPQTLRRTKEEVARDLPRKIEVESCKQLIFSGVQKKLYLSSVANWQQQQAFSEEMQQAGTGMLGLLHKLKLICAHPAVVDPAPHFRDNSPKLNWLLKKLAEIKATTKDKVIIFTELRDLQRELQHAIYQKFGFRPVIINGDTSTKSHSQNSRQRLIDNFQSQPGFGIIILSTVAVGFGVNVQKANHVIHFTRCWNPAKEDQATDRAYRIGQTKDVYVYYPTVRDPEITTFEVTLDELLKRRRALAKDMLCAAPDLSSTDFEDILKGT

SEQ ID NO: 3640 - protein, 706 aa, Vibrio nigripulchritudo SOn1
MTNSLNLSSLWPDLSSLNVMPPQTPEQLSALFVVILWGVALFFLIWSGAAFIRARQRVVWLNKSLNDAERSTLSDVRNDLISRAEQKKDSVGHLWLEFDETLLEVKGADDVVRLHNTFDADYFFNSSSLAGGSTENRMIAAVPGFLTALGVIGTFVGLQLGLSDLNIAGNVDVNEMKNGVAGVINGAKIAFMTSVWGVLLSVAFNFIEKILEQVIRKQIKSLQNRIDRMFPRLSAEYQLQSIANNSQQSRESLQGLAEKIGEKMQESLVQATQGIQQGLESSLEKIMAPAINKLVDETSDGNQKALESVLQSFMDGFGQQGEQQRVAMDSASQNVNKTLESMSTSMAAFVNKLEVQQNASSEREKELISTISVQVSELVTQGNEQKRVLTEFVEKQVSELGEQLTKRESAASEREQKLASSMESTIKDLIENVSAQSQVLTNFVQNQVGQLTQTFSERDGMASQMEKERNDIFVNQTQAMKAGTDELLAQVKAATESQQTTSNNIIEQGKQLQNSIDSSVSASARATESMQLSANELRAAADSMNVFGSNIKEAGNKLSGAVTEAVNSTKDLAEQNHLGAVKIHALREQLLEDTSKFSAIADQINNMLNSVEQSFSKLRTNQNEFLAEQKGNLNELTSEMKRNVKELTEQMAQLLEDYAEQANGQTAEHLKVWANSSIQYAESMNTAVRAISSVVDEIQDKVSQHA

SEQ ID NO: 3641 - protein, 244 aa, Vibrio nigripulchritudo SOn1
MRRGIRSRTQNSVDEENPYWVSFSDLMSALLVIFILAAVALIIELTQKTNDVEAGIEELKQAELARKNIIYDVRDELAKRNVIVEIADNDTVIRIPESTLTFASGKSSIPNDATIQQAVKDIGVVLHSAIQKKDRFEYLDTVFIEGHTDSDRIYYRGKGNWGLSTDRAISVWNVWQNELSLTPKLGDLENAYHAKLFSVSGYAATRRANLQESNQQEKSQNRRIDIRFTVKKPSIAELERIVAQ

SEQ ID NO: 3642 - protein, 482 aa, Vibrio nigripulchritudo SOn1
MSLNIKKLKVSLPANPFGQAIKDFTHLSNQLEMLSKSAGIENNKFRTAYGEVCNALASKKRVEDVLDSAIHVRALALLHTDAKKNVSFTRRLLNKITEIVKTPSSLVIESFYQHFLSEYDRLADLEATAEWLLEAKRLRRSDEQFDANILSSNGPKWLAERAIQKNIDFDHLISDMKLERYANGRYLTAAKGIYYIEQLNTIPLGQDHPLLEEVQKAAVFDSRYDSESLLGHQILRILIGRSIGAHISEPWMNVILAIGGDPRVPSSNPRYIKWWKGLEPNLIQAVRGWLSKLDLKLFLEALEDYSYSSANYELQRMYPSRKSFLEGMFDAGVISNTRLYLSQDAARYLKRNYDPKHLPNFSTVKDGDKSIIYVQMNGAHMVEGSHSCYLWLYKHLDSSVCVFNYDIVRPTYSQLTSGINNQMTRLSSGAVAKITHSPIGYSWQRKALTALRGLGIKLTPKDVLSNEDYIDFKQRYGVREWS

SEQ ID NO: 3643 - protein, 1149 aa, Vibrio nigripulchritudo SOn1
MELTSLISKFFSGLDKSSQFELVCDDSLDFTTSKKNLEKIKTGKADEWITAQYVALKMLEEQGDVSSFPDGFIMPADTAVRLDSELRRLFSLPPVWQGVIDADIQGKASTPTFKIDLSVTTKQGRTTLNYTVDGPFIRFSQNEQYLLTPEQLMVFNSHKVHGKSAKSEYDNLLYLHSLQEAQKSGCKLNLKHFEKLRILTPNKITVEAELNSQGELVLTPNMGQSASHESIQKVLGQLQSDNAVTLKVGDEIVLFSEEKLMAVKEVISNRVIPQKQVKSFLENPTAYIDASLVDLDLGFSIRVHGATVFKHAYFGETDESGIDWFGAPSSSDVMNPISKLTDSIRDKTTLEDVTQKIEDAHQTGATVLDYEGKSYDISEPVAVEKVLKEIGHKISNPDTNLSSEVEAEDTETESESSEIHVVDIDLNDEELSENSPKIEQLISDISWDGELNWENHKRTPFPHQDIGVRWILGVEQKSLSDSKISGALLADDMGLGKTFMALSAIEHIYQRQQINGETKKPALIVAPLSLLENWKDEVDKTFKRSPFNDVVILQSAAELNDYRVGGVEIRSQSASDDSLEPKYSLKVGKHFGPDRLDLPERLVITTYQALRDYQFSMCLIDWGVVVFDEAQNIKNPNALQTRAAKGLKADFKLVATGTPVENSLADFWCLMDTACPGHLGSYQEFRARYISPILKAAGDEVEETRARLGRELRIAVGALMLRRIKEDNLKGLPLKHMYAGGEFENWKYLEELKSTMVGYQRDVYEGTISNQLENEESHALTTLMRLRDSSLHPRLSDGGRLDIPKNAKSSRALYGESGKLVSLLETLDRVRSKHEKCIIFAVNKRLQSFLSVTLGQIYNLGPLSVINGDAKAVAKRKSVPTRKSMIADFEGKEGFNLIVMSPVAAGVGLTVVGANHVVHLERHWNPAKEAQATDRVYRIGQEKEVHIYIPLLHHPEFESFDVNLHRLLTQKTLLKDAVVTPEDVVPQPAGVGGEISGELIDKRITAAELDKLSWQQFEALCVELLAKLTDSESAWLTNNGADHGADGVLLNNSGNILLQAKFTQRQYDGYKGIQEIHSAKPIYESAMKSSFERLIFATNSPSLAKRTHETAATCGVDVLGRTQLLNYLEEHEVTVKEVLYRLGKERLKV

SEQ ID NO: 3644 - protein, 641 aa, Desulfobacula toluolica Tol2
MVDKIDLTKLLPNFKSVLNGFPQSAEDLSAWFILILLGVFISFLIPSIWKSFKTFRQIKWLKNLLKEHTSETIAESRQDFIDKAQKVKHDVGHLWLEFNETLIEGDRNNKIRLYNTYDAAYFFNSATLAPGITGSRLIAAVPGFLTAIGVVGTFVGLQLGLAQLNIANDVSIEEMKAGVAGVINGAKLAFITSVWGVILSVLFNIIEKIIERATKTKITQVQNLIDKLFNRISPEEQLQRIANDGKQSRESLQGLAEKIGLKMQESLIQATEGIQSGLETSLEKIMAPAINKLVDETSDGNQKALENLLDKFMEKFGTEGGQQRQAMDDASDKMNASLASFGTSMQAFLDKMEVSQNNVAQKEEELVENISSQVNWLVENTSSQNKVLTEFIENTFGELSDKLNNRDDVAANRERIRGEEFINQTNEMKKGTSDLLERIDQGLKTQFKETRELLNQGQSLQSSITESVSANAKATKHMKETSSELNSTVSKLKTFGGYIHQTGMKLSETITAAVASTETLAKENQASTSEIKKIFERILVSSNEFNTLIQKMKNLVDTADTMFEKMDDQQHSYLAQLKQNVEELAVKMSNLLKDYASQANGQTAQHLRVWAEGTTQYTTSMNNAAQALASVVDDIEVKLGR

SEQ ID NO: 3645 - protein, 250 aa, Desulfobacula toluolica Tol2
MLRRFVQSQATVDEENPYWLSFSDLMSALLVVFILAAVALIIELTQTQKIIQRDIEELRNAEQARKQILYEIKDELASKNIKVEVADNDTVLRIPENTLTFDSGHDEIPEAEEVQRAVTAIGLALHLAINKPFSDTNNKMRFEYLDTVFIEGHTDSVPFKRIKGGNWRLSTDRAISLWKFWEKHLALTPSFNEMENAYKQKLFSVSGYAASRRVQTIEKTPEQRRRNRRIDLRFTVKRPSIAELEDIADR

SEQ ID NO: 3646 - protein, 485 aa, Desulfobacula toluolica Tol2
MKPAILSVQGLKFIIPDDPFGHYLAKIKRLENQLSSLAKKAGTENKKFNAALNSLVESVRRNRDLETELDSPIKVRALAVSLTTSCAEHISLTQRILNKIDQLRPKPSTLLLQSMYHFYLKRYDKLHDPRAVAKWLLKSLPKRNLKKSFHDTLLSPDGPKWLAKESIRTNREFQNIVSYLGLDRYASGRFMTIAKNIYYVEQLKLIPLNQHHNLLLEVQKSSVYESTYDESYLVGHKVLEILISRAANTKIDDSWLNVIMSIAGDPRVPKDHPLFQKWWSLLDQRLYNIVIGWLSKLDLRLFLEALENYSNLPGKEELHRMFPSRKKFLEGLDDKKLIAHTRLYLSKSAERYLKSNYKPEHLPAYSMVNDGTRSLIHVQFVNNQAHMVEGSHSCFLWLYRKLHSSAVVYDYGANFVFYSELTSGLNQKMIEKNCEAVAQIKHTPVNFRWQKNAIEALRGLGVYISPQDVLSLEDYRSFKRKFGVI

SEQ ID NO: 3647 - protein, 1149 aa, Desulfobacula toluolica Tol2
MDVIKWFDKLRTSSENEKYSVQPDFEGLNFTTTSTISVAITKGQAGGWITHQHIALTMLAEEGNAEVIPNGFIVPTEVAVNFDKSSCDSLGLPPRWDGKIDAEIKGNTGNSSFGVGLSVETPDSRFTRIYKVIGPVLKFSEDRQYLLSPAQQIIFGAHQTHGETEKNEYDNLKLLFALQKGQELGAQLNLKHFNKLNIKAPESITIEVELDENGNLILTPYMGQEASSERVNKVLGQLQADNSTALRVDDEIILFDDQKLKAVHEILENRTIPKSKVQEFLKTPTAFIDASLVDLDLGFSARVKGATVFKHAYFGETDGSGIDWFGRSSSAGEIVSFNKLESQVEDKETLEQLKALVEDAQKTGAHEIDFQGKIYDISTPDAVLKTLERIDQKINKSGDSLYTSLFDEYDEDQENPDDIEPSVTVVDIDLNDENLDRSSPTVDKAIDEILFPVEKLKWDNYARTPYPHQMIGIQWIVGLSRNSDGGVLADDMGLGKTFMALSAIDQIYKLNFESNLTKKPALIVAPLSLLEVWKDEVDKTFSSSPFKSIIILQASADLKQYRSGGIEIRNQTSCDGGQEGIKYSLKIGKHFDTERLDMPERLVITTYQTLRDYQFSLCQIDWGMVVFDEAQNIKNPNALQTRASKGLKADFKLIATGTPVENSLADFWCLMDTACPGHLNNYQFFREHYVTPIVRAAGDEIEEVRGRVGRELRIKVGSLMLRRLKEDNLEGLPEKKIFVGIEDQEWLFLNSLKKIMTGDQLSAYNATLDSRVNAERNEVLGALQRLRDISLHPRLADKGQLESPNKKKQLRSLFDESAKMRSLVEILEQIKKRKEKCIIFTVNKRLQQFLSQALGAWFGFGPLSIINGDAKAVAKRASVPTRKSMILDFEAVEGFNIIIMSPVAAGVGLTVVGANNVVHFERHWNPAKEAQATDRVYRIGQEKDVNIYVPVLHHPEFESFDVNLHRLLSKKTSLKDAVVTPEQVIPNPSGFDMKSFTPNHQITSDDLHKISWEQFEALCCLIIAKDSNPYDKWLTKSGADYGADAVVVGDPNYLIQCKHKNTKNAIYDGYKAVLEVQAARIKYENALGRSFSQLLFMTNALKLSGRTRKTAQEYNVEIMGQKELKSLLETHPISIRDVYAFMNKKRLAL

SEQ ID NO: 3648 - protein, 667 aa, Burkholderia pseudomallei
MNAISAVLGSIYPSLSTLHGFPLYIFLTVIILTGAFLLGYLIQGTRVWWQLKSVVRAIQSHASDQTPPLPADVAGAFKWEPLKHLWEEYADTLHELRKAGSGETVLAEVRATVPADTMFTREALVDGRLFDDFTRHLPGVLTGLGIIGTFSGLLSGLSKFKPTPIETAVNGLGPLLQGVQHAFVASGFAIACAMGVVFISRFVLAYFYRLVEELTRGIDSLYTTGAGEEYLARLVKSSELNSANTAQLKDALVEDLNKMMTNLVERQIAAQEASVAALGQHIGESISTAIAEPMRRVGEVMEMTSRGNGEQVNSMLETLLTGFMAKLEDTFGGQMRGINDQMQRSIDAMASVQSSLQGLLADIKQTNEHAANSMSGTLEEAMKKAADNQQLLTDQMREFVQDFRRLVTEEQNKSKAAMHETVMQVLGEVTAAMDNLEGLRKAAAADEAGRTDKLANHTNQLVGGLTSQVESLLGAVSDQVSKTQQNIEALGLVSLRAIDGMNQGALTMGTAAQRFETAGSAVSTVLERSSKVAETLGTASSALQAASTAVQRGFEQYDSTRRTVDAHVAALTALIQSAKREAGVSQELVASIKASAEAMRKSESESRVHLDQVNAALVKAFADFGNALVSQVKSTIAETDRHLAQGTGHLNGVVQELASAVQRMKRA

SEQ ID NO: 3649 - protein, 234 aa, Burkholderia pseudomallei
MLSRIVLKRGAKHEGESPFWISFSDLMSALMVLFLVVMAVTLVAVTQSIDAATRANIERSAAISKIMAMIADDPKSAGVGVDQQNYRIDLGKEIRFDSRSYTISVPAAQFLRSYIPVLLNAKDTPEGQRWMRDVVVEGFTDEDGTYLYNLQLSLDRSRSVVCSLFQNTSGSDALSPEQLHKVQELFLVGGYSFNSIKKDKAESRRVEFKIDFWGLDENRPARNDVLNGKEFGKC

SEQ ID NO: 3650 - protein, 573 aa, Burkholderia pseudomallei
MLAARALEVLGCDLAAAIGAMGLHTSEFGKPELVEKPVREAERIFQGYAKATPSKEDAYDAARAFLRGRELDSWQRDLVASALAVPVREQNEAVVLGSGRFPALLATYEQEAKRGDLWRLTWHGLLYSYFNFDPTVTKDEATQNGWEALRSFLARTWPLVDRDADNTVVPDWINVLRKESDVLTDKPVAKYASAYLRGDTTATDQISVDLGIPPSSWFWHALVLSTVKLAIENRNDDVFRGHISMLLRLIESKPAFRDEALEAILIRYHACKDARQEDHLRDYVCQPSVWKNPKLRAAGLATAWNRVPDPVWEMVLNWVNEQNLKDFFDILAARNNADEGRLAFWSKYLKQITWTRLVFGAETMALKHRNPEIRALIAREEGAYAQLTGKKEVDAFMMQIGSYVIIEFSKKPNACYVYKVDALPFERYAKYYHGGTSDLSTGFHQRCPARIVHTPGWEKRADIELSGLGIRPDHPGAHRMLSAGGTHQGSVSRRWTGAPVNQRAGSQRGPDMVTLQTLVERFQGASIDDRRNGSGGGRLWVEDPKQRTLLAAELSAMGFKWANNRQAWYFPEA

SEQ ID NO: 3651 - protein, 961 aa, Burkholderia pseudomallei
MDRAEAGPVAAEFSLVGRFEDGRVTKVDLVVTEHYVGGSARTDIKAFAEPEQLDDFLESLKRALEQERELLPWDEFDLTLDANSTSQFEQGLQLSHLWRSQPAERIDFDDIYELDGYSGRIEGIGAAKPIYVPVFQKDKKEAEEDSGWLPSDLTPMVKVTLQGHDGQVLVPLTKDWAQEFDNQVREAETNGQAEVKNASLPTAIATPQARTLADSFLSMVGAQERIKGEKTSLAKETKRAKQTLLVKTNFHGVDYFEQRRESLALPEASKPQLPRCLRPEIELKKHQLHGVAWFQHLVSKAPTECRGALLADDMGLGKTLQLLSLLAWYYESNPNAAPSLILAPKSLLENWANEANKFFTPSFPELLVLYNEELVTRKQPLGLIDSQLQENGIVELLKPSWVGTAKVVVTTYEVLTSYEFSLAKQAFAFVICDEAQRIKTPGTLVTLAAKKLKADFRIACTGTPVENSLADLWCLFDLVQPGLLGALEEFGKTYRRPIECDTEEQKLALKRLQDVIAPQTLRRTKVDIAAELPKKYFAIKKFDQQSLEFKSSLEEHERLEIAITEHQRILYKGGLKKLQDAVKESNGRKRAQLSFGALHLMKAVCAEPYCLPGTKFLVDKSGRDIHLHNSPKLSWLLKRLAEVRSADEKAIVFTELREAQAALYYFLKETFGIRPFIINGDSQGRQGYIDKFSAKPGFDVIILSTLAAGAGLNVTAANHVFHFTRAWNPSKESQATDRAFRIGQERDVFVYCPTVIADDFSTFEVRLDQLLKRKADLAGATLDDGGLTAMLNGTGKDASFADLVGDGADGEELPKRYLTLDDVDRMDGDGFEAFCRLLWDKQGFLASVTPKRGGDGGIDIVALKGREGMLLQCKSSKSAEVGWDAIKEVTAGSARYQARFAGTRFRRLAVTNQNFTSGAVAQAEVNHVELVTRLRLEELLGQYPVSNHEFDAALQEWFQMA

SEQ ID NO: 3652 - protein, 670 aa, Burkholderia pseudomallei MSHR7500
MPSMNLSGLAAEYWHIGAVALVLVCLSLDFLVRFFVRSLKLRRDLDDAIEALQAIRGEKNGELVELSAVETKAMKSEALSNPWTEYAKTLHKQLGDEDELGQQRIRCWRSTALAETFFTDQAIIDSRLKTDFFKHLPGVLTGLGIIGTFLGLIKGLVHFDVSVDPAAAQAQLQGLVSSVGHAFYVSAFAIGLAMLITWIEKTIVTVCYGQVEDIRELVDSMFRGGAGEEYLQQLAKSSQDAATQAQQMRDSLVVDLKEILTTLTERQIAAQAQYTGQMSVDVAKVISESLASPMSAMAEAVQKVSGSQGDAVNKLLTDVLASFSAQMQEMFGGQMRGMSDLLQKASESMQATAIQFGQLAANMDAAGNNTVDSMGEKLAQALDAMDVRQSAMNARMGEFIEQIRSLVAQSQSETGEKLREALAAVGTQVAGVVETLRKQAEEAAESQGQRARRFEESTDQAINSLSGQVEQLLSQSVETNKSLQTSVSALAGATDRAMASLNSGVETLYVAASDFAKAGSGVSETMRSASTATDSIKTASAQLSMATDNAKGIFADYARTRDTFATMVAELRQTFESAKKDAAMTSELVGKIQAAARELAAAQQQSEDYLKGVTEVLVGAHESFRDNIDRTLGEGNRKFQSELSNAVNLLSGAIKNLGDAVDEIPASRGR

SEQ ID NO: 3653 - protein, 241 aa, Burkholderia pseudomallei MSHR7500
MFGPKSSRRRNGRDEGEKPFWISFSDLMTALMVLFLVSMAVALIAITQKQKVIDDTIELRKKTIAQCLTEVEDVTKRPEFKGVTVHGNSIDFGAVVLFADQHHSFERSADERFIRSFVPEVLKVARAKSCETWLKRVVVEGFASRTGNYLYNLNLSYLRSQRVLCALLNTQVPDALSEADRRQIQTLFLVGGSSFNTASNDGPARMRRVEVRLEFRDFGSAAEPAPDIPLDPGKSCPNDLR

SEQ ID NO: 3654 - protein, 546 aa, Burkholderia pseudomallei MSHR7500
MNEALELLRSGLARSFTQAAKNPDLWLDAKSMEHAKERVIRDHGGAAIKVDSRTIWASIEDFRRLGHAVNFRELKYVCLGVSAMDAKGWCILAEERLREQVGKQVEEQVAIHRKLRCFQALLASYFSFALGASNLDPKAVKGWTTLRTWLQRQRQQLAIALDHVPPWFEALDRHSELLTGRPCDKFVPDLMRGDASSLEEAMDSLGIDRDSWVMEAAVFAQMEAAEKLDDVRFKAALPDLLRIAMGEAGAKVGERLRIRGVALLVSRYARCSATPEHPGLRDAAVGVIGNPWLRRASWDAHVVDAVKQPDTRAREMVFGWLKGRLIQDFFELLSAEDTGDTRRLVYWLRFAPFVDDMWFALGPTAQYRSDRLFREFRERAKGRLLDLEGASGDNNAFVMRIGAHVAIEFGATGHAFYLLRWDALPPAVSRALTSGKAKDYVALSQLKPEPHEWKQSHRDAPVALRSWEQKFDDELLPRLGVAPKERPVCVPDLEKLLEGRNVTVTDNRAKGGALRIGPDDELAGVARQLAALGMQQPRRGRGWIKE

SEQ ID NO: 3655 - protein, 1253 aa, Burkholderia pseudomallei MSHR7500
MIRLFGSRRVGEQAEVRPRSKINVSWGRHGVAFIPGPANEAWLDEPSVFGADSELVLLLRQLEEEGYIEVRPSGASMDWESYYRLEAVEGYSASLHLLKLPTKRGWRPMLSSRGGLSDATFAIGISGWRDPAGAQPSGNVEIQGAIVSADGEQSLLSESVWRVVHAIAERRSRSAEGYSPEDNKRDWARIRRHAIDANADLADFLAKTIVLTPERIDIQMRKGGEGAQDMVEIMPGFDGAPSRWLEVFDRFEVVPERYEIPNGSGLVHVLMSEDARAVLSEIRRMPGRRVAGARAEAFLRNPFATLGPSAAVAIDPDQFERAREDAGIVFERFSARVVEDQSGYPCDVGLLIEQVFEGKLVAEESKFQSATELGSFIAKMEQRFATGAQCCHWKGFDLEILGDSPDQVEKLRSALAKLTLPRKITASDIFDLSLYSERIEGFGVEKPYYSPFIAKKGDGGWVPENVDLGLWFTDSKGETVAIPLDGRNLDKFRKEVEQAEQEKRESFSFPGCPRPVPTGWAKEALETLGKVKEEVKGGNYIPGKDKSAGKMVERKGLVVKPNVDGLDYEERRGDLSVDKAPPAIPSSLRPDIELKDHQRDGLAWLQNMWRNSPSACRGALLADDMGLGKTVQLLAFMASLIELEPRIDPFLVVAPVSLLDNWKAEIEKFFVEGAMDVLTLYGPNLAAKRAPRSALDDGLIESGSPKLLASDWLGSANVVLTTYETLRDLEFSLAAQKWSVMVCDEAQKIKNPNAMVTRAAKKQNARLKIACTGTPVENTLADLWCLFDFVQPGLLGSLKDFGSKYRRPIEVETDDEMARIEELRGLIEPQKLRRTKAEVAKDLPKKILHEGCRKLPLSARQRALYADAVAQFKSRGQGQGSGLQSPLGLLQYLRRLCSDPRPPGHIATSDESVETIKKASPKMDWMLRRLREIEASGSGDKVIVFCESRDLQRVIQRAISEVFGFVPDVINGDTSTESGAASSRQTRITAYQQNPGFGVIILSPLAVGFGVNIQAANHVIHYTRTWNPAKEDQATDRAYRIGQQKDVYVYYPVVVGGDFVTFDEKLDVLLERKRALSYDMLNGVGDVTPSDFADIEAPGGGSPFGEDLFNPADVGSLGPDAFESFCALLWSKQGYSRTIKTPKTGDGGVDIVAINGNRGALIQCKSSGVEGKEMGWEAVKDVAAGSVAYSARYPGVEFKLIAATNRRFNQSARQQASLLNVTLIEGSDLVDLLSKHPTKRGELDRFAMAGWSQ

SEQ ID NO: 3656 - protein, 667 aa, Burkholderia pseudomallei MSHR4303
MGDVDLWGLAEEYWHIALVASFLVALVVDFSIRFFVRSITLSAELKRSLKALRDFQAQNEQPVVDIADISKKAFSSPVLSGPWREYQKTLHPQSESDGLGQVKIARYRATALAETFFTEQLIVDSRLNTDYFKHLPGLFTGLGIIGTFVGLIRGLTHFDVSLDPGHAQEQLRGLVNSVGYAFFVSGAAISLAMVVTWIEKTLVTSQYRKVEELRELIDGMFAGGAGEEYLERLANSSEIAATQLAQMKDSLVADLKEILTTLAKEQIAAAEKNVGQMSVDVGKAIADSLSGPMDAITKAVQGVSSNQGEAVNRVLTDVLSNFATQMREMFGGQMAGMSELLVKASESMQATASQFQQLAASMDAAGTNTVDAMGDRLSKALDAMDARQAAMNAQMATFVEQIRALVSESQTESSQKLKETLSTVGEQVAAVVDQLRKQAEQAASSDGERQARFEQATGQVIGSLSGQVEQLLAQSMDTNRSLQNSVASLAQATDKAISGLNSGAETLYVAASDFAKAGQGVSETMRASGVATEAIKAASTQLVTSTNGAQAIFTDYAKTRDAFALMVSDLKGTIENAKRDASMTSEIVSRIEAAAEKLAVAQKQSEEYLQGVSSVLAEAHEKFGQEVERTLRESNRHFQHELANAVGLLSTAIKNLGDVVDDMPVRG

SEQ ID NO: 3657 - protein, 239 aa, Burkholderia pseudomallei MSHR4303
MLGLKAARRRGSREEGEKPFWISFSDLMTALMVLFLVAMAVALMAVTQGLQQIKKATQERDQTIESCVANVKALTKLDEFKGVTVRGHSIDFGTLVQFQDNAHKFENPEDEHFVRRFIPRVLDVARAPTCDKWLKRVVVEGFASKTGDYLFNLNLSYLRSQRVLCALLNTQASDALSAADRSLIQTLFLAGGSSFNTTASRAAQMRRVEIMLEFRDLDSTKEPPPDIPLDPGLRCPNDR

SEQ ID NO: 3658 - protein, 454 aa, Burkholderia pseudomallei MSHR4303
MLADELLRGKVARTIEQQSAAHRRLRCFQALLFAYFSFPVNGSDASEESKTGWRGLRGWLRVERDRLIELLDFKPPWFETLLRHAELLTNQPCDQFGADLLRGDATSLNEAREGLSIPETSWVIEEAVLAQMRAAAALEDAPFKTVLPDMLAIAMGRVGVSISGMLKTRCVAQLVSRYARCIDRPEQPALRDASTSTIGNPWLRKDRWDMHVRVGKQADDLAREMVSFWLKERLVADFFELLSADEINDKRRVAYWLRFVPFVEDMWFALGAAALESRDIKFSEFRARAKGRLLRLEGSAPENNAFVMRIGGHLAVEFGESNHAFYLFRWDALAPSLLQSLHSGRASAEVHVKELKRDDNEDKMSHRDSPVALKSWEQKFDDKLIKFIGKKPETRPACVPDLEVLFDKDRVKVSDLRAAGGALWVYEEERSSYLARRLQSKGFAYRAGRGWFKE

SEQ ID NO: 3659 - protein, 1257 aa, Burkholderia pseudomallei MSHR4303
MVWSPFKSKNSSAAGGTAERAPMVSVSWDRNGAHFRPDPMIGDWLSSPMEHEAASELVLLLRQLEEEGFVDLHNDDACLSWPNYYALLESPEHSGALRLLGLPEQQAWRPSLSSNGTLTDTGFAVGIQGWIAPDGRRPSGNITLEGAVLTTGGKTAIIPEAAWRMMQAIAEQRARKTDERTPDVNKRDWAAIRGHAVQAGADLTDFLRRTVVLTPERLRIDLRKGDVGGDQLVEVMPSFDGAPPRWLELFDRFASVPERYEIPDGNGLVHVLLSEEARTVLREIRRLPGRRIAGERAEAFVRNPIATLGPDAAKVIDPEQFERAREDAGISFARFTATVLRDVKGYPYDVSLTVEEVLRGEIRAEQMKFGEAAELEQFLKKLDGKMAAEAQCCHWKGFDLEILGDTPTQAATLRGALKDWLRPGRISAAEIFDLTKYSERVGGFGVEKPYYSPFIAKKSDDAGWFPENVDVGLCFETEGGETVALALDGKGLDAFRKEVEKAHDEKRETFQFPGCQEPVPVEWALDALKTLGQAREDVSKGTFDPRKPATKARTSERKGLVVKPNVDSLDYEERRGALAEPIEPAFLPTALLSHIQLKEHQLRGVAWLQHVWRHSPSLCRGALLADDMGLGKTVQLLTFVASAIERDAQIDPILVVAPVSLLENWNEEIAKFFAPGAMRVLTLYGKNLAAKRASKASLDEELVEAGSPKLLLPGWLGAANVVLTTYETLRDLEFSLAAQRWSVMICDEAQKIKNPNALVTRAAKKQNARLKIACTGTPVENTLTDLWCLFDFVQPGLLGALKDFGSKYRRPIESETEEEKARLEELKGLIEPQKLRRTKAEVAKDLPKKIEFEGCRALPLSHRQRGLYADAVAQFRARSGSGPGIGMQSPLGLLQYLRRLCSDPRSPGHLSTESEPLADVERDSPKMAWMLARLREIEKTGEKAIVFCEFRDLQRTLQRAVSERFGFIPDVINGDTSADSAHANNRQKRITAFQERPGFGVIVLSPLAVGFGVNIQAANHVIHYTRTWNPAKEDQATDRAYRIGQERDVYVYYPVVVAHDFLTFDAKLDRLLHEKRELATEMLNGAGDVGPADFGDLEGPDGGNAFSNEPLTAEDVGSLDGDAFEAFCALLWTKMGYTRTIKTKRVGDGGVDVVAIKRNEGALIQCKSSTIEGRELGWEGVKDVSAGWAGYSARYPGVAFSKLAVTNRRFNQAARQQADVLNVELIEGNELADMLARHPMKRGELQRFLLAGWSTVR

SEQ ID NO: 3660 - protein, 555 aa, Burkholderia pseudomallei MSHR3709
MPADTMFTRDALVDSRLFDDFTRHLPGVLTGLGIIGTFSGLLSGLSKFKPTPIETAVNGLGPLLQGVQHAFIASGFAIACAMGVVFISRLVLAYFYRLVEELTRGIDSLYTTGAGEEYLARLVKSSEQNSANTAQLKDALVEDLNKMMTNLVERQIAAQEASVAALGQHIGESISAAIAEPMRRVGEVMEMTSRGNGEQVNSMLETLLTGFMAKLEDTFGGQMRGVNDQMQRSIDAMASVQSSLQGLLADIKQTNEQATSSMSGTLEEAMKKAADNQQLLTDQMREFVQDFRRLVTEEQNKSKEAMHETVAQVLGEVTAAMNSLEGLRRAAAVDEAGRTDRLANQTTQLVGGLTNQVESLLGAVSDQVSQTQKNIDALGQVSLRAIEGMNQGALTMGSAAQRFETAGGAVTSVFERSSKVVETLGAASSALQAASTAVQQGFEQYDSTRRTVDAHVVALTALIESAKREAGVSQELVASIKASAEAMRKSEAESRAHLDQVNSALVKAFADFGNALVSQVKSTIAETDRHLAQGTGHLNGVVQELASAVQRMKRA

SEQ ID NO: 3661 - protein, 234 aa, Burkholderia pseudomallei MSHR3709
MFSRIVLKRGGKHEGESPFWISFSDLMSALMVLFLVVMAVTLVAVTQSIDAATRANIERSAAISKIMAMIADDPKSVGVGVDQQNYRIDLGKEVRFDSGSYSISVPAAQFLRSYIPVLLKAKDTPEGQRWMRDVVVEGFTDEDGTYLYNLELSLDRSRSVVCSLFQNSSGTDALSPEQLRKVQELFLVGGYSFNSIKKDKAESRRVEFKIDFWGLDENRPVSNDVLNGKEFGKC

SEQ ID NO: 3662 - protein, 478 aa, Burkholderia pseudomallei MSHR3709
MGSSRFPALLATYENEAQRGELWRLTWHGLLYSYFNFDPSIATDEATRSGWKALRSFLERTWPLIDRQTGNALVPDWVGVLRKESDVLTVKPVAKYAAAYLSGETAATDQLAADLGIPPSSWFWHALVFRAVKHATDNADDSEFRRHIPLLLRLIGSKPGFRDEALEAILIRYHACKGAPQNERLRDYVCGPSVWKNPKLRAAGIATAWTRVPDPVWHMMLSWVNERNLKDFFDILAARNKADEGRLAFWSKYLKQITWTRLVFGADTMALKRTNAGIRDLIAREEGAYAQLTGKKEVDAFLMQVGPYIIVEFSKKPNACYIYKADVLPFERYAKYYTGGSEDLGAGFHQRCAARIVHREGWEARAGEELVNLGIRPDHTGAQHTGVTGASHPTSASKRWTGAPASQRDGVQRTPNMAALGVLIERFHGASIDDRRNASGGGRLWVEDPMQRIQLASELKAMGFKWANSRQAWYFPEA

SEQ ID NO: 3663 - protein, 881 aa, Burkholderia pseudomallei MSHR3709
MQLEQGLQLSHLWRAQPAERIDFEDVYELGGYSGRIEGIGAAKPIYVPVFQKDKKQAEGDSGWLPSDLTPMVKVTLQGHEGQVLVPLTKEWAQEFDKQVREAETSGQAEVKNAELPTAIATPQARTLADSFLSMVGAQERIKGEKASHAKEAKRAKQTLLVKTNFHGVDYFEERRASLALPEDWRAQLPRCLSPGIELKKHQLYGVAWFQHLVSKAPTECRGALLADDMGLGKTLQLLSLLSWYYEANPNALPSIVFAPKSLLENWENETRKFFTPSFPEVLVMYGDNLQERKQPRTLIDNQLQEVGIVDLLKPGWAGSAKVIITTYEVLTSYEFSLAKQAFALVIYDEAQRIKTPGALVTLAAKKLKADFRIACTGTPVENSLADLWCLFDLVQPGLLGALEEFGKTYRRPIECDTEEQKEALARLQAAIAPQTLRRTKADIAAELPSKYFATKRADQHSLRFEPVLEEGERLEIAISEHQRILYKGGLKKLKDAAAESNGRRRAQLSFGALHLMKAVCAEPYCLPGTKFLVDKSGRDVHLSNSPKLRWLLERLAEVEKAQEKAIVFTELREVQASLYYFLKEGFGIRPFIINGESQGRQGYINRFSERPGFDVIILSTLAAGAGLNVTAANHVFHFTRAWNPSKESQATDRAFRIGQDRNVFVYCPTVVADDFCTFEVRLDQLLKQKANLAGSTLDDGALTAMLNGTGKDASFADLVGDGGAGEALPKRYLTMDDVDRIDGDGFEVFCCLLWSKQGFQASVTPKRGGDGGIDVVALKGREGAFLQCKSSKSGELGWDAIKEVTAGAAIYQARFPGTRFKKIAVTNQEFTSGAVTQAQANHVELVTRTHLEELLAKYPVSNHDFDNALQEWLLSKGVPAA

SEQ ID NO: 3664 - protein, 667 aa, Burkholderia pseudomallei MSHR2138
MNGIAEVLGNIYPPLGTLRGVPLFIFLTVIVLTAAFLLGYLVQGTKVWWQLKSVVRAIQSRASDKTPPPPAHVGQAFKWEPLKHLWEEYADTLHELRKAGSGEVVLTEVRATVPADTMFTRDALVDSRLFDDFTRHLPGVLTGLGIIGTFSGLLSGLSKFKPTPIETAVNGLGPLLQGVQHAFIASGFAIACAMGVVFISRLVLAYFYRLVEELTRGIDSLYTTGAGEEYLARLVKSSEQNSANTAQLKDALVEDLNKMMTNLVERQIAAQEASVAALGQHIGESISAAIAEPMRRVGEVMEMTSRGNGEQVNSMLETLLTGFMAKLEDTFGGQMRGVNDQMQRSIDAMASVQSSLQGLLADIKQTNEQATSSMSGTLEEAMKKAADNQQLLTDQMREFVQDFRRLVTEEQNKSKEAMHETVAQVLGEVTAAMNSLEGLRRAAAVDEAGRTDRLANQTTQLVGGLTNQVESLLGAVSDQVSQTQKNIDALGQVSLRAIEGMNQGALTMGSAAQRFETAGGAVTSVFERSSKVVETLGAASSALQAASTAVQQGFEQYDSTRRTVDAHVVALTALIESAKREAGVSQELVASIKASAEAMRKSEAESRAHLDQVNSALVKAFADFGNALVSQVKSTIAETDRHLAQGTGHLNGVVQELASAVQRMKRA

SEQ ID NO: 3665 - protein, 234 aa, Burkholderia pseudomallei MSHR2138; identical to SEQ ID NO: 3661

SEQ ID NO: 3666 - protein, 573 aa, Burkholderia pseudomallei MSHR2138
MLAARALDVLGRDLAAVIGSMGLHTSEFGKPQLIEKTVREAERIFQGYSKATPSKEDAYEAARAFLRGRELDSWQRDLVASALAVPVREQNGAMALGSSRFPALLATYENEAQRGELWRLTWHGLLYSYFNFDPSIATDEATRSGWKALRSFLERTWPLIDRQTGNALVPDWVGVLRKESDVLTVKPVAKYAAAYLSGETAATDQLAADLGIPPSSWFWHALVFRAVKHATDNADDSEFRRHIPLLLRLIGSKPGFRDEALEAILIRYHACKGAPQNERLRDYVCGPSVWKNPKLRAAGIATAWTRVPDPVWHMMLSWVNERNLKDFFDILAARNKADEGRLAFWSKYLKQITWTRLVFGADTMALKRTNAGIRDLIAREEGAYAQLTGKKEVDAFLMQVGPYIIVEFSKKPNACYIYKADVLPFERYAKYYTGGSEDLGAGFHQRCAARIVHREGWEARAGEELVNLGIRPDHTGAQHTGVTGASHPTSASKRWTGAPASQRDGVQRTPNMAALGVLIERFHGASIDDRRNASGGGRLWVEDPMQRIQLASELKAMGFKWANSRQAWYFPEA

SEQ ID NO: 3667 - protein, 1290 aa, Burkholderia pseudomallei MSHR2138
MGFFDFFKRVASAKANEPTLKTIWTAEGVRVEFARDLAEPTADGLLEAIHSTGPEDTVLGAYLAQLVTEERCELDNKGALIPWKNVYELQGAAEHVSALRLLALPPQGPLRPILDCSGSLSGPEFELVITGWTDGARQIQPDRLDGAIVTVDGESQLLSATAWATASEVAMFRMRGQDERSQHFHELAWGRIRRLADQAGALYANPYLETTFVLTPETLRLPVSKEETPFGRVHTVSPTFDGAPDGWLTAFDGFNSVQPHYDLTRGAGRVRVVISEPVRKVLDVIKREMPGRKVAGARAERFVHNPFAFLGESAYDVLREDEFEIDRAEAGPAATVFSIVGRFENGRVTKVDLLVTEHYGDGGAKTDIKAFTAPEQLDDFLESLKQALEQERELFPWDEFDLSLDAESTVQLEQGLQLSHLWRAQPAERIDFEDVYELGGYSGRIEGIGAAKPIYVPVFQKDKKQAEGDSGWLPSDLTPMVKVTLQGHEGQVLVPLTKEWAQEFDKQVREAETSGQAEVKNAELPTAIATPQARTLADSFLSMVGAQERIKGEKASHAKEAKRAKQTLLVKTNFHGVDYFEERRASLALPEDWRAQLPRCLSPGIELKKHQLYGVAWFQHLVSKAPTECRGALLADDMGLGKTLQLLSLLSWYYEANPNALPSIVFAPKSLLENWENETRKFFTPSFPEVLVMYGDNLQERKQPRTLIDNQLQEVGIVDLLKPGWAGSAKVIITTYEVLTSYEFSLAKQAFALVIYDEAQRIKTPGALVTLAAKKLKADFRIACTGTPVENSLADLWCLFDLVQPGLLGALEEFGKTYRRPIECDTEEQKEALARLQAAIAPQTLRRTKADIAAELPSKYFATKRADQHSLRFEPVLEEGERLEIAISEHQRILYKGGLKKLKDAAAESNGRRRAQLSFGALHLMKAVCAEPYCLPGTKFLVDKSGRDVHLSNSPKLRWLLERLAEVEKAQEKAIVFTELREVQASLYYFLKEGFGIRPFIINGESQGRQGYINRFSERPGFDVIILSTLAAGAGLNVTAANHVFHFTRAWNPSKESQATDRAFRIGQDRNVFVYCPTVVADDFCTFEVRLDQLLKQKANLAGSTLDDGALTAMLNGTGKDASFADLVGDGGAGEALPKRYLTMDDVDRIDGDGFEVFCCLLWSKQGFQASVTPKRGGDGGIDVVALKGREGAFLQCKSSKSGELGWDAIKEVTAGAAIYQARFPGTRFKKIAVTNQEFTSGAVTQAQANHVELVTRTHLEELLAKYPVSNHDFDNALQEWLLSKGVPAA

SEQ ID NO: 3668 - protein, 780 aa, Burkholderia pseudomallei
MIETILEAPLVAQVCALFILFFVGWFLVRFVPRATGRWRDLNSIIAGLTHLKGSGGDPTSLFARKPDLAHLWSEFRKSLFDPKSFDSATGEYVPETSRRTVPAEQIFNAQVVVDSRVGAEFFKHLPGILTGIGIIGTFAGLMHGLYAFIISDNTQVVRASLSALLHSVAEAFLVSASAIFFAMVITVIEKFFISRLYQKTEEVACLLDSLYKAGAGEEMLEELLHSSKEYVSNSKTLKDALVQDLKGILTSLTESQIQAQQKIIDEQIRAHNQTSEELGRQIGQHITEGLKAALEEPMKAVQQAVQSATGDRTGAVHTLLTEVVQGLNQSLKDLFGDQIAGINTMQQQTISALQTAVARMEQMSSSLETAGTRATDTMAAKLGEALTGMEARQEMMARQMAQIVEDMKATVASSQTETNSRLQETLAGVSATIESLISSLSQSVATSQDTTNEKLQGALNGVTQSVESLISSLSQQVASSQSEVSTKLQDTLANVSNAVENLVSGLSQSVAASQAQSNDRLQQTVSSVGETVNTLVSDLTQQAASADAEHRERQAQLVAQAEAAASGVKSAVEALTAEMRTLVAGTRSAVDTMRASVDSMRTVTTDAVTRMNSGAETLYVASSEFGKAGAAVSGVLQQATGTTDKLAVAAASVSTAAQTMQGVVTDYRATRDQLAQMLTELTRVVDNARTNASLTSDVLSRIEASTQALNVAQRSAEEFLEGVGDVMTESLTSFQQRLADSMTDVNRQLVDKTAAVTSLLRQTIANLAQAIELVVPNPEA

SEQ ID NO: 3669 - protein, 241 aa, Burkholderia pseudomallei
MLGTRIVIKRGARSEAEKPFWISYADLMTALMVLFLVTVSVALLAVTKQVSEAERLKAQRDRDISALMHQVEVAASRYPGVKVDHERNVIDFGEKAHFDKNRYDLKPDQQRLLRAFVPEVLAIARNSLGKQWLKQIVVEGFSSPEGDYLYNLNLSLERSQRVLCVLLTKPYPDEHAMSDDELEQVRDLFLVGGYSFNAAKASYEDSRRVELRLEFLGIGEQRPSVSNAPRGNFGTCALGAS

SEQ ID NO: 3670 - protein, 605 aa, Burkholderia pseudomallei
MDLLEEMRRKLARGPKPIVGESPLTELDHQERELGKEIREKRPVPPPIDLVIEAIELFRETRRLANSRQARLVALGCAEPVGRMRYRLIEDGECFGYVLKGVESFRNHRVTFRNCYQGLLDAYLDYHPDNKGSLPEGRPNWETLRRWLEGNISDIRERNGVDESWVTEVAAHPDVFSESPVARFGEEALRGHQESFLLFRKALGIKDSSWIIDQLVLEQVHAAGRSSSSEFRHYLPGLIRLLGTVGTDNRTLFNKALAQILTYYHGHPPLAAHKALQDFTVLHWGNPWLKRNNSGWVLVSEPVRTMVSSWLKLHYIQHFFSVLAQEGKSDPRRLKFWEKYHEAVGPLTFALGPQTRWSTDPDMVHARKLMDGLIVDLVGNGASNNNAFIMQFGDWVVVEFGQKGNACFFFKASDLPFELNRDVSVQAVKNHIQSDSDRRWDAVRREHRDRNRADWETTFERVLGARDIFPGKPTVPSQPVVRSSATDTVRQVETRPGTTRHDVNRIQHVDTSSTQPQQAANGTNGQADSTPPVSRMRAHRLTPQQEAGVKALCGRLGIKCEDLRDKNGNLWVFHDWPRDSRITPQLNEWGFSYRAGKGWWYKDPE

SEQ ID NO: 3671 - protein, 1258 aa, Burkholderia pseudomallei
MLKWLKRAGAARNEAPPAEVWRHLDSQGLLLGTFESVGAIPGATPLASPMMPAMITQLHDEGYAVAEEASARLSWESLYNLLDDPAYAKSLELLELPPACDYIPELKSHGSLTSPDFAIGVPRWRDGSGRVLDSATRAGALMHVAGQSHLLSRRVWDTVEQVARFQSRPESERNEESQRLRWGQIRRTAMAAKARMDEFLYKSVVLTPDTIDIHLRKTDVGGTKVVEIMPGFEGAPENWLEVFDSYRNSVPQRYDVNTDKGIVQVLITPEVRTVLDNIRRLPGRLVAGSRAEAFLLNPFATLGEDASAVIDEQQFERARVEANIFFDHFTALIERDALGFPEKVALAIETPGPNAVAAEERFFADDTELEDFIRGAERALASDKQLYGWQGYDFELLGDSAAQVELLKVALEERQQPRILVRYEDVYDLSAYTSRVNDIGIEQPYYSPYIAKKGEEWWPENLVNVIVYTPEDSTEPVAVPVTDAVRDELQAKVEQAQATGQTSVELPGFPKPLPVTEARDILDAFEQFGKSVRDGHDKPPKSRDDEGGRNARPKAKQLLIKPNVNAVDYEEIRHDILTTFSPVPALPAGFLPTTQLLPHQDAGVAWLQHLFRHAPNHCRGAVVADDMGLGKTLQLLTFMARAFEDDPELPPALIVAPVSLLENWAEEIGKFFKPGTFRPLIAYGDNLSSLRVPRAAIDEELRSENLIRFLHPDWVGDANIVLTTYETLRDLEFSFAAQKWSVMACDEAQKIKNPNAMVTRAAKKQNVMFKIACTGTPVENTLVDLWCLFDLVQAGYLGALNEFGKRYRKPIEAETDEEKARVEELRRLIEPQILRRMKTDVASLPPKHLVPAFVPISNLQRSYYTNAVNVFRASKDPDSKESIVSPFKNHLGLLQYLRSICTMPHAPGMGRFKPQALEQARNEAPKLAWLIDTLEQIRAKGEKAIVFAEFRETQQMLAHYIKEVFGFSPDIINGDVTAAAKHIASRQKRIKAFQAKPGFGVIILSPVAVGFGVNVQEANHVIHYTRNWNPAKEDQATDRAYRIGQKREVWVYLPILSASDFTTFEVRLNELLETKRKLASDMLNGTGTVLPSDWNLQDIIPGGANDPVFSRALTLDDVLRMEWDYFEALVAAIWQKKGFRTVYRTPRQDEGVDVVAFTGNTGDLIQCKSSGTDDAALDSQGVKDVVSGEAEYRLRHPGVNFSKWAATNQYFNETAVDRARKNKVTLVNQKDLDSLLRQHPVTHGDVQRFLHAYWDEAA

SEQ ID NO: 3672 - protein, 729 aa, Salmonella enterica
  subsp. enterica serovar Rubislaw str. SA20030553
MSWLNSILVTLTSVDPYKVPVTVIVTVTFAFVCFIFFYLLRSIRIIYGLKKYTRSINSIEKSAPEVQLEHLKSLFQQPELKHAWNEFEESLHSQYELENGEEKIVRIRATAPSASFFSEQQLVDIPLNTEFFKHLPGILTGMGIIGTFYGLMIGLNHFDPSTPEQVSSSVNNLLRDVLYAFLGSAFAIFASILVTWLEKLSIAKSYKYLEKFTAALDSLYDSGVGEEYLASLVKSSNESATQARQLKESLVTDLRDMLLHLAENQKVENERLANTLSATYRESGSQFADQVSGAIENSLKSPLDKIAGAVQTASGDQSGMVQNMLQDVLTAFMAKLDTTFGQQFTNLNEMMRQTVGAIQTMQTGFSALLQDMRQVSDDSRQGSAQLIEQLLSEMKSGQQALQAGMNDMLTSLQASVAKIGAEGEGAGERIARQLEKMFADSEAREKAQAEHMAAFVEAIQNSVQQGQSATMEKMAASVGALGEQLGSLFGQIDKGQQQISATQQANQQSLHEQTQRVMSEVDDQIKQLVETVASQHQGTTETLRLLAEQTNRQIQDMQAGADKMRLAAERFEHAGERVSEANHLTADVLNKAQSAGSSLSLATSELTSVVADYRNNREAVSKSIAMLELLAANTQSEQTTRNQFIADLKQHGERLQSYNREAQVFMENVSDVLGKGFEDFSEGVSRSLDKTLGKLDVEMAKASNLLAGSVEQLGESVSELDDVLSRVRT

SEQ ID NO: 3673 - protein, 246 aa, Salmonella enterica
  subsp. enterica serovar Rubislaw str. SA20030553
MFGNAFGVKKRRSDEAEKPFWISYADLMTAMMVLFLVVMVASLSSVTQRIQRAEQGEKARGQDISRLCERLELHARNVNKNIVVDCHDNRISFGEAGRFDHNQFFLNAEGQKALQDVVPLVLEASNSEEGKKWFKQIVIEGFTDTDGSYLYNLHLSLQRSEWVMCSLLDSRSPLQKNISAEQQLQIRKLFLAGGVSFNNAKESKEASRRVELRMQFFGLKDKRDKADEVDFPPVVNKEVCQLVMPL

SEQ ID NO: 3674 - protein, 560 aa, Salmonella enterica
  subsp. enterica serovar Rubislaw str. SA20030553
MTPALNSLSQRIAARLSSSQRDDHYLHNDFHALTAATLDMEKRFDRAEKIPSPPQEMRLEALRRFRLAQELTEREWRMVFYGLADNDPLYPDQPILLEDDTFFPRVNSAIKKRIETKTLKRRDWAALCSSYFAYQHQSPETNPHWCVLRGHIAQGYLVVKAAIRREKSWMKTIEFYHDIFTPQAGGVISRQLLAGENNSLSSLEKIAQIPDSSWLWKRIFTVLLAQLDTLDDPQFLSKISWLLGLAAQWVRFRDDIMTATLTRYYHSGYRDQSHPALKQAALEYWDNPQLKSQQNKWHQYVSESVAAMVRGWLAKQDLTHFFELLRGNGDVDQARLHYWLRFANQMGFTRIIMGSDAWQDRGSDFVKFREENKGRLSYLRGGRNFDNAMIMQINDYLFVEFSGTGNAMYAYQIGHAPFNPESRTLDINIHLKDQGRCALRLPHAPRAEGYNKVRITGWMLKYDDELRKLGIRWMAEEPVRFVDKKVPPPVAMSDIKIINPLRDTAIQHLVKCSSCIVSDNRHKGGILSVQLITPDDTVERELLRLGFAPVAKEPHRYWIK

SEQ ID NO: 3675 - protein, 1080 aa, Salmonella enterica
  subsp. enterica serovar Rubislaw str. SA20030553
MLKRLLSKLTGNRQQIEHHLKNQYQVEENGLSFPLSLVDDSQLWALASWLEQLAEEDYLISLTDRWLLSWEALYRLLEDEEHASSLPLIGVPDILPLRASLSSRGALSDSDFRVWIAEWATFPARKPIRFSRTGAILTHENQQYLLSRENWALLQATEQLSAQQIQTPGETTNQLGWAAIRKCAKLAAAKFDDYLEKTHVIKPTSLSLRLRKATVADTAVIEIEPHFEDQPANWLGSFDKNLQVHDSYRIPGENGELSHVIIPPEVKEVLNSIHSIPGRRVAGSEALSFVRNPYTFLGEDAASVIAPEEHEQALFDARIFFHHFRLIPQLNAENKIAEVTLILEPVSPVPQPEITFVFSAPWELDKFIQQLGISVAAQMPAGSWQGYELELSQFTEQQWHDCQALLTRWQQEIEGKEFSDVLDIAKYGDRVIGIGEYEKISSPWLTKAQSENWLPDDIDFSAFSIETLSGWQPENPLHFDELQEIITQAEAAGETYITTPWNDSQLPLDAAKTFSKNWEKQQITANEYQGNVADKTARAVLKIEQNIEETAYIKQRRNSLLNARHAEPEIPLSLKEHIRLKDHQREGVAWLQQLFLRSPEETAGCLLADDMGLGKTLQILSFLVWFIEKFPQEPPNLIVAPVSLLDNWERELNNFFYTAGIPVLKLYGETIKAVKYPKQAIPAHLQSKGIKNLLKPGWQGEAKIILTTYETLRDQEFSLARQPWSIMVCDEAQKIKNPAALITHAANAVQARFKVACTGTPVENTLVDLWSLFDFAQPGLLGALNEFGKQYVRPIENEDGRDTERLESLRALIEPQTLRRTKEEVARDLPQKIEVESCKQLTLSGVQKQLYLSSVANWQQQQALREGMQQAGTGMLGLLHRLKLICAHPAIVNPEPRFRDNSPKLNWLLKTLAEIKHTSKDKVIIFTELRDLQRELQHTIHQNFGFRPVIINGDTSTKSQSQNNRQRLIDDFQAQPGFGVIILSTVAVGFGVNVQTANHVIHFTRCWNPAKEDQATDRAYRIGQTKDVYVYYPTVRDTEITTFEETLDNLLQRRRALARDMLCATPDLNCADFETILKGA

SEQ ID NO: 3676 - protein, 540 aa, Thermoanaerobacterium xylanolyticum LX-11
MIFTKFVLFIIKSIPDFTDVFCFGIVVIAFITYFWTHRKPKRYVKLIDSYIEKIQNTSDKNMLLEELIELTDEIIEKEKNDKDITELLKKFKSMCYSGNIKNAIDVFDYTALVEIPGKRKIFNMMPGVFTGLGILGTFVGLVLGLSDLNFSGNTQVLEQGINNLISGMYLAFLTSIAGLISSLVWSWVDRKLLNYYRKKIDTLHSLYKNIFDEKGIDYYLKEIRDIQEEQKTYMQKFVSDLSLEISNVFSNILEQRIFPEFANIVNQYVTSKIVESFDNSIGEIKQSSEISKQMIEKFANLAYENQLEGVNKIIDKFIEGMDTSLKGKFTDLGESIDEMIKWQQMVKEGMNELMEKLSNNILNLQDVNKAIENAITNFSDYFDKVNAANEHLVENISKLESVSLNVNMLVEDMLKMMNEINQQKDLLLKDKTEHVQIVSNYISEINEKFELLQTSYANISKNIDILNNSLKQSMDEFANKTHEGLKRSLSLFDEELANIISYLNSTLSEIKESVDELPKVIMEFKRTLRSEDKEMNTIEG

SEQ ID NO: 3677 - protein, 230 aa, Thermoanaerobacterium xylanolyticum LX-11
MKDEDNVHDYWQSYSDLMAALLLMFALLIVIMIYKYASIAVELNAQKAKVDEIIGVRARIINQLLNEFKNSDLSLSIDPQTGAISFSEGIFFDKDKFELKDEGKRYLNEFFPRYISILMDPKFKKYISQIIVEGHTDDTGDYVYNLELSQKRAFEVVRYILQSDIKGIDSKVKSDLMPYITANGRSYSQLIIENGKVNREKSRRVEFKFRLKEEEMILEMQKVLGKGSTK

SEQ ID NO: 3678 - protein, 930 aa, Thermoanaerobacterium xylanolyticum LX-11
MINISNSLTDEGIKIVSNVQQRKNIFEIKIPLFLNPVEYFKNISTKELEKLNVLEDLWQQGILQDKDNSYIIPYEFLYNIDEEKRRILSLPIEDNAIKVHIKARGIFGSNDFKLIPEVYVKDEKMGPLDRRINNIILHKGCMYLIPLNLYSLLQEIDAYKPTDDPISQAKIVAKVKYKAKTANVTFDRFLESEEVYYSEKLDVDIIKYDDDHLQIVPVLGDEIDSLLKDSKDKVLKQYNTLYGEGIKRKRIFFEDEVLKNYNKIVNRGHLRGSEIPKFLIDPYSILPEDIDLSNFSKRVKELGLKVYRANPYINIKKDKDSGWFDFEVGGIIHEDVGSFDEDVDNVQEYGLTGDDKIDVLEYSQLVQKAIESGEDYVNYKGKWIKIDIEQANRFLNIANNESFSKVQKIDITRLPYVLKIYENLDDLEYNETALNLKKQFIGDFSTRDFTYPMYLKNCHLYEHQKEGFLWFKGLYENHLGGLLADDMGLGKTLQVISFLCYLKECNELKPTLIIAPYTLLNVWENEIRKFSEITSIYRHSGYQRYKTPEILKNYEIILTTYETLVRDQLLLGQIDWKAIVCDEAQRIKNSTTLTTSAVKALKAKIKIAMTGTPVENNLGELWCIMDYVQPGLLSSYHDFRRTYQKPIEDAIGNKNEEYLAIKNKLLNTIRPVYLRRTKDGILSLPAKNEIFPEVELTTFQEKLYCQLIENYKNNEKKESPLGVLQKLMELCAHPRLIQDDGDGDTYKFINESGKLQRLIEIMNEIKLKGEKAVIFTHYIKMQTILRKVIMDVFGINCLVINGNIKGDRMSVIDKFRKSPGFNIIILSTRAAGVGITITEANNVIHYTRDWNPAVEKQATDRVYRIGQTREVNIYYPICTSSRGKTVEERLNEVLQKKIQLLNEVIIPSRYVNIEEENYDYLLQDFSAWSM

SEQ ID NO: 3679 - protein, 146 aa, Acinetobacter haemolyticus NIPH 261
MVSDKPGTVHTTSTHLTSASSNLISLLKDYKDSQESVKQAISTLDGLIKQAQAEVGMSSEMLKDMNQMTTALNQVKKEMQDYLEQVSDVLVKSFESFGSSVETSLNHSLGAFDNTLDQAVKRLATGVEGLGSFVEDLEDLVQQKKN

SEQ ID NO: 3680 - protein, 243 aa, Acinetobacter haemolyticus NIPH 261
MLGNRYSKKPRSKDEGEKPFWISFADLMTALMTLFLVVMAVSLMVVTKKINEATQAENQRSSEIMDICTSIQNDAALKNKIIAVDCKDNRINFGEAGRFGHNDYRLNAAGVEALNTLVPIVLNAANSENGKKWFKQIVIEGFTDTDGSYLYNLNLSLRRSEWVMCSLLDPKFSHGLSLSDAQKNQVKQLFLAGGVSFNSAKDSKEASRRVELRMQFYGLKEKENAEPQPHFVSAPVETCQLTR

SEQ ID NO: 3681 - protein, 474 aa, Acinetobacter haemolyticus NIPH 261
MPIDTVIVMSIANLKRRLEEKISVFSEPTHIQTKFVRPQRLMKTLSIIEHKLDDLENEQPLEEKIIKAVLKLEQHGFDGLTKRDWKNLAWSLSKKLPNYEEKLLFTPVGVRLIDYFNQLGIDQLQFVYFPLLYSYFSFQAKELEKQPDSWVQLRNILNTNKSLVFKNSTRLKKWMTTLIDNSEVLTTEPTKKFVREFLQDNDENRVANQLESLRIASGSWFWDDLIRSAIKSIKTMKEDEYFQIIPRFLVLLEKNKIYTTDILAALLERYAGTSQREKVHEVLKHLALDQWGNPQYESSAGWNNVNADTKKMVIQWFVRADLEAFFRLFSRTADVDRFNYWIKFIDKISFSQIFLGPAASRSSLNEHRKFREANRGRLKRLVGSTQTNNAFMLKIDNIYVFDFSDTGNACYILNKIPYDQRLLDIHIQTLKPWGQSLTLIHRPGWQRRFDEKLAELGIFSSQANNSISGYRKRY

SEQ ID NO: 3682 - protein, 1067 aa, Acinetobacter haemolyticus NIPH 261
MKLAFWKKKKNTESVAEDNLVASIKPLQYDEVGLIYPYQQNAKNDADFYWESLEEEDIAYLLDEQYILPWEEMFQLQQDPEHSNVLNLLNLPSPTNLHPVIRSEGGLSDPDFKIILDGWCDQNRIKSKGLIKRIGAVLNVDGQEYLLNDTTWQLVEKVKEFARVSNKDNKLNQKYWAQIRSLANRSQANLDEFLRKTVVLAPEKLQLNLRKNLISQESVVEVQPDFDEAPSNWLQTFDHYNQVQDQYSISLPDGGVAHVVIDPQVKNVLSEIKKMPNRRVSGERAQTFLHNPFAQLGDDATEVISPEGFEKSKQDAEIFSYSLQIDKFYNELGHYVSAQLTLNENSGREQQPILLELSNLEQTKYFITAYEKPSPIFMWAGYTIDKTSYLDHQVQELKSDLTEIQKYEDELQAQQVLDLSNYSDRVIGIGEAQKLNSEFIQRDSGESEWLPQHLIELEQQFQDRFSDEAIELLEQRIKQAEQEGKDQVLIPNANTEVSVDDAKKLLNSLSDSNRKEPIETLEESTVNLQKKKKDTLLIANNIDKAEFTKQRADQLVFDEKNHPPARLPSSFRSQEFGLKPHQEYGVAWLQNLHQYAPEQVSGCLLADDMGLGKTLQLLCFIGEYLENAKDKKPVLVVAPVSLLENWEAEANRFFSAKFAKILSLYGENLKDRKIPKHLISAQLRDDHGITHLLEEDWRGDADIVLTTYETMRDLEFSLARVDWGIMVCDEAQKIKVPTAMVTKAAKAQKADFKIACTGTPVENSLTDLWCLFDFIQENLLGSLNEFGKTYRRPIENIENVDNEVLEQLRNLIAPQVLRRMKHDVADLPEKIEVDHCKNITISSLQRHLYADVINRYRRLSEEGNQGAMLASLHSMRMICAHPFQLQPNASIHESPKVDWLIKTLEAIKAKNEKVIIFTEFRDIQVFLKRILLERFGLNVTTVNGDSNTSSKKGLTRQNLIDRFQATSGFNVIILSTTAVGFGVNIQKANHVIHYTRSWNPAKEDQATDRAYRIGQDKEVFVYYPSIAANDFDTFEIKLDRLLSSKRALADDMLKPNTDLGKELIRLI

SEQ ID NO: 3683 - protein, 626 aa, Geobacillus thermodenitrificans NG80-2
MFLYFQLALFLAMAIWQFVRIQREIAVMNQLKPKLLELNRSANGTAYEIDQAINELFVQVKKSKYKELWERYYNRVSQKNEDERINVEPFFGFDVMHHHMGYRTLMDMGAGIHVSLGVLGTFVGLSVGLSELHINDTEALRSGIGSLLDGMKVAFYTSVWGVLLSLMWTMFDRWISSTLDRNIDWHSERLDFLLSTDDEELFLNRLEKLSRNQADHLKTLLTDALEKAMQPIALSLQQSHGNLQQAFSQLHDQFAQLHEGMETQAKLLESQIELTKNTSADVTSRLVDEITGGTQQSIGRFSEFVQQSQVWQTEMIKTIEVFVSRFAHTEERQAMTLERTEKMFAQFEKMAVELELMKESYQKTSGMMNRLGETFQRLQELTKDQLPVQQEVMRSNQLLAQKYDDLSERFTRFNAQIETQYSQLLEQLVHATSSLSASFQTMANRFDESLRIQKESLHDSQQLLGDVQSAVAALSPLVSELRETFDHVRELKEQLLEMQEAQKQLLPELVQLRTQTKESVEETLRTTKVYMQEMTEQIGMLQENWTTTKEQLTKITEALHLSMKDFAENIDSGLSKTYQHFDETLTKAVQEVSGLVYQFSEVQSDFIDNLEDLVDHFDKWKAGASS

SEQ ID NO: 3684 - protein, 223 aa, Geobacillus thermodenitrificans NG80-2
MKYRRRTEVNYWMSYADLMSAMLMVFALLLTFVILDYRELLEEKEKKIEQVVSVKSEIIRALTEAFKQSNMTIEIDQQTGAIRFPGSILFESDSAEISPEGKKFLQQFIPKYMGILLQDRFQNEISSIIIEGHTDRNGTYMYNMSLSQRRAYAVLEYIYSKEFPNFKERELSKKYITANGRSFSSPLTDENGKYDPDRSRRVEFLFRLKDDEAIKAIEKLVNE

SEQ ID NO: 3685 - protein, 426 aa, Geobacillus thermodenitrificans NG80-2
MKYEYEPVLLKRWLREPRPPLLEKTIENSNEKYRGVLERLSDQFAGLVHAPASAFQQWVKQLSRREKLLLPNLYKKELPEEIKKAMIDVIQQHVQHERRLFRVLVDVMYETCDLDEIWKLLRYAYASHIEKIEKRMEKEKREKWRRYLLSKDPIVYLATEVYESEKGILEELETFYLTKNFPLFKLVLMEIFQLADESFFLKEQDLYREMFVSSTNEQQQKMAHELIKKCKLNHVKPLGRLIFEKLQTYRRKPMLWKYVGEEEKRRFAQWIMKLELKEFFGGVNKNHERFQYWEKFIPKLEDVVVTDERTTLIMYFRDVVIMEVLGTGAVYIYPADVFQRHFQPKIDRMLAERERFVNKAWLKVREVKRTELMDRNLTIPGGWLRHNVGWQWKFDEWLRRELGWEVRRDVLLQKETEDDESSLDAE

SEQ ID NO: 3686 - protein, 874 aa, Geobacillus thermodenitrificans NG80-2
MFFFKKKQKMMKAVLTPNEDGVHLSFQLHDGKTVTELQLPMAKEEIENYYKLQGFPQYIAWEELYDSGVLVDSTLPYREYYELLKDESAKEVLQHLGLPNVEEQVSGKLSLRSLPHEADLVLQLFDANGRNLDRIGKQAGAIYVLPDRLMLLPERVYRLKQALLESYESGYEKIGICQQLANEAGIELENFLQNETYHVVDTYDVDVAVHRHDHIELVVKGRDEEETRHLQQLQRVSSVKKGHGRSRFVSTKQVHADMMHLQQKRHITGEEVPLFLENPAAVLPEHDYLFDLDQFSERVRGLIPIERVRPFFHERTGMQWFDEESGHAVPYDEAFLRELMEQYPDQQYVEYNGKWIYLDPLLRRKLLQLPKDADEALKRRYILDIKDNEEQLEYKIDSVRETSFRRYPVPSELQAALFPHQMEGFEWLCHLAEQERGGLLADDMGLGKTIQVIAFLLHQKANGSLKPTLIVLPIALIENWVAEIEKFAPSLLDSLYIHKGSERLASSQLISQFDIILTSYDTLKIDQLLLGKIEFQAIICDEAQNIKSHTSQRSRAIRAMQGRFRLAMTGTPVENSLDELWAIMDFVQPGALGSLKEFRFRYTETSDYDALLMAIQPYYLRRTKQQILDGRLPKKHLVPPIYVEASPIQKEIARSMLATKESGQVAILNMITRLRQLYGHPGAIIPKYEQLSYKEVPKLKETMHIIEAIRQKGEKALIFTEFRKLHFLLKRIFMETYGISVPVIDGDTKNRQLIVQHFNETQGFGIMILSPKAAGVGLTITSANHVIHYTRWWNPAVENQATDRAYRIGQQKDVYVYHIITRDSSHFPQGTVEELMHELLESKRHLAENVIIPFNISEIQQAVAEKVVEQRQLV

SEQ ID NO: 3687 - protein, 763 aa, Rhodospirillum centenum SW
MFKAIFAALAPVVSNDWVIGSVLVGLCAWAIWSGTRFVRATLRFRKALSGARATVRQSSDAAAFAERYGEIDTALAEDPVLGERWCEFRNSLLLPRQPGQPVRTTVRPKTWFDVGLLHSMPGGVNLRYHTAMPNLLVGAGLLFTFLGLAAALGSAGGIVAGTAEIRNEALRLLLGTASAKFVTSLVGMGLSITYAITTKVLLKRVEDDLAGLLSALEARIPLITPADLQRETNDLLERQTDRMQAVSADLAAGLGSAFDRAFDARLGEHVGPLTQAMQQLALGLGSHNEQAMAAMLDSFLQGLRGGTGEHMQQVVDSLSGLGSRLEGVQQGLGEAAVRMTQSADTVANRLGSGTEAALARITDQMGGLAETLGRIAEQSRTTGAEAGERMAARIEAAAAGFEESARNVATLLERTAAAVEGSMGRQTEETAARLAERVEAMTAELSALAASSRTAGIDAFDQLATRVAEASTALERSVGRIGTLLERSASEGGDALGRGAEKAVTRISDATEGMRAEIQAMLAELRASVGTAGEALRSSGAEGAAAFRDGLGDAGGSIAAAVRDAADRLGRAGTEAADALGRGGETAGTAMRSAGGLLGDKVGTLTHEIAALAAAANALATRSVEFERAAGAAAGPLLQASTNLSTAGQTVRGTTESLGTVVQAVGRAIEQVSEASGRLDAATSAAGRLADGLATAAKRFEGIDGDLARTLAALQDGLQGFAREINGFVSQTDQNLAKAATQIAALVKGLEETLEDFSADQNR

SEQ ID NO: 3688 - protein, 314 aa, Rhodospirillum centenum SW
MAMVTGPDEETEEGYFASISDLMIGILFIFLLMLTVFALNFRNAEEKVVDLSRYEEVVNEARRLTEEAAKQKQENEELRRLLTQAVAQLERDIESRRSMRNQMLQSLEASLDRQGVRVTLDPESGILRLSGDLLFETGKAVYREEADRTVKVMADILGSVLPCFAEGASVACPGERMPILEAVLVEGHTDRQPFRNVPPAQSQALNDRLSTERALAVFQSLRETSPVLETLRNPSGQPLLGVSGYGERRPLPEAQGTTEEDYRRNRRIDLRFVLSSRTSDELERLRGRIHDVLGPDQEGQGQDHQGQDHQGKTP

SEQ ID NO: 3689 - protein, 484 aa, Rhodospirillum centenum SW
MSLMREALISLQATAGRLPHYAMLPDMPESGRLVTALAGANAAPAPPGDDMLAAVRRRLLEAARGPGGVAAAAPRDLCDAPWLMWGGLDPLAGLNGLLEAVLDVCNRRNRARRTLIEAWIRNFSYDMPRIAEAGNGIRRLITAARRPRLEPWRDADAWCRLFDAADGPRTLARWIVLTDEPVDTLLGRACLDDPMRASSGYARTIQAEVLSLVPDHLAGPAGAQRVARVADFLAPGDSLRFDEPESRGQIVRSLMAPWLTGRSGLEEPTRAAVQKFLLARLGDPRTRPGQWVRAGEDAVALMETWLSRAALGAFFDLVGEQNHDPDWRYREAFWSACMEAGGIDDAWLALGRTVRRSAPALHHLKGAYGELVGPGFHGDQTVLLLRVRDTVFCEWSHAGKLRAWPAEGEDAPRLHRASYTRPDLTAPCLPFPPNKRHWARGSSDGNGLSHVGSESSRWQGSVARLLEERAGIALTAADWMPGRA

SEQ ID NO: 3690 - protein, 667 aa, Variovorax paradoxus S110
MNEIVMVLGRIHPSLATLQGMPLYVFLLVGFLTGTFLLGYAIKGTQVWWQLWSVARKVRSFRNDTSPPSPLDVGRAFKWEPLRHLWAEYADTLHEFRKAGSSAMTLTEVRATVPAEAMFTREVLVDGRLFDDFTRHLPGVLTGLGIIGTFAGLLDGLREFKPTPIEAAVNGLEPLLLGVQHAFVASGAAIACAMGVVFLSRFVLAYLYRLVEHLTHGIDSLYSTGAGEEYLSRLVKSSEQNAATTAQLKDALVEDLNKMMTNLVERQIAAQEASAVALGKHIGDSISHAIAEPMKRVGEAMEVTAKGNGDQVNSMLETLLTGFMAKLEDTFGGQMRGINEQMQRSMDSMAAVQASLQGLLADIMKTNEQAASQMSGTLEDAMRKAADNQQLLTDQMREFVQDFRRLVTEEQSKSKQAMDEAVMKVLSEVAMSMQSLEGLRRTAATEETGRNDRLAAQTNQLVGGLTTQVETLLGTVSEQVTKTQQNIDALGQVSLRAIDGMNQGALTMGTAAQRFETAGGAVTTVFDRSSKVADTLVSASTSLQAASTAVQRGFEQYDSTRRTVDAQVASLIGLIESAKKEAGVSQELVANIKASADAMRKSEAESREHLDSVNAALVKAFTDFGNSLVGQVKSTIAETDRHLAQGTGHLNGVVQELANAVQRMKRA

SEQ ID NO: 3691 - protein, 234 aa, Variovorax paradoxus S110
MLARIVLKRGGKHEGESPFWISFSDLMSALMVLFLVVMAVTLVAVTQSIDSATRATIERSAAINKVMAMIANDPKSTGVGVDQQNYRINLGKEVRFDSGRFTISVPAAQFLRSYIPVLLTAKDTPEGMRWMRSVVVEGFTDEDGTYLYNLQLSLDRSRSVVCSLFQSAAGNDSLSAEQLRKVQELFLVGGYSFNSIKKDKSESRRVEFKVDFWGLEEKRPEVTDVLQGKEFGKC

SEQ ID NO: 3692 - protein, 574 aa, Variovorax paradoxus S110
MLAARGLQTLAYDLAAAIGSMGLQAGGFGKPELVEMPTREAERIFQGYAKAKPSKEDAYAAARAFLRDQELDSWQYDLIAAAVAEPVREQAGAMVLGSTRFPALIAGYEEEAGRGDLWRLTWHGLLYSYFNFDPSATKDEASRRGWEALRAFLERTWPLIDRQAGNVLVPDWVSVLRKESEVLTINPANKYARAYLRGDSAATEQLAADLGIPPSSWFWHALVLGAVRQAISDSEAEFRRLVPQLLQLIHGRPAFRDEALEAILVRYYGCKGAPQDERLRDYVCEPTVWKNPKLKAAGIATAWNRVPDPVWHMVLSWVNERNLKDFFDILAARNKADEGRLAFWSKYLKQITWTRLVFGADTMALKRTNQGIRELIAREEGAYAQLTGKREVDAFLMQIGSYLIIEFSKKPNACYVYQADQLPFEPYARHYDGGSDDLAAGYRQDQECSARIVHREGWEGRAAEELKRLGIRPDQPEVQRVTPTRTAGTSTGSAHTVDASTRQRTTAQREPDMAILRALIGRFRNASINDKREGASGGRLWVDDPLQRASLATELRAMGFRWANSKQAWYFPET

SEQ ID NO: 3693 - protein, 1291 aa, Variovorax paradoxus S110
MGLFDLFKRAVGTKADEPTLKSTWTSQGVRVEFAQDLQEPTPEGLLEAIHNAGPDDSVLGVYLAQLSREGRCNLDLKGALIRWQDVYELQGSVEHIGALQLLGLPPQGPLRPVLDCSGTLSSQDFELEVVAWTDGIQQIRPDRLEGAIAIVGDRSQMLSPATWATMFEVAAFGLRSSSDRNQHFQELAWGRIRRLADKAGALYATPYLETTFVVTPDTLRLPLSRQETPFGRVLTVSPTFEGAPDGWLTAFDGFNSVQPHYDLTRGAGRVRVVISEPVRKVLNVIKRQMPGRRVAGSKAEKFVHNPFAFLGEAAYEVLREDEFEADRAGAGAVAAVFSVIGRFEHGRVNTVDLLVTEHYGDGAARTETEAFIAPEQLERFLEGLKAALEQERERFPWGEYDLSLDGESTTQLEQGLQLASLWRTQPAERINFDDIYELDGYSGRIEGIGVVKPVYVPVFQRDKKEGESEDGWVPSDLTPMVRVTLQGHEGQVLVPLTKQWVEEFDIEVKEAEDNGQAEVKNPSLPTAIATPQARTLVDSFKGMVGAQERLKGEKGSMPAKEKRPRQTLLVKTNFHDVDYFEARRATLALPQDWRAELPGCLRAGIELKKHQMYGVAWFQHLVSKGPAECRGALLADDMGLGKTLQLLSVLAWYYEANPNAAPSVIFAPKSLLENWANEAGKFFTPSFPEVLVLYGNELKARKQPINLIDSQLQDRGIVELLKPNWSGAAKVIVTTYEVLTSYEFSLAKQAFAFLICDEAQRIKTPGTLVTLAAKKLKADFRIACTGTPVENSLADLWCLFDLVQPGLLGALEAFGKTYRRPIECETEQQKEALTGLQIAIAPQTLRRTKADIADELPKKYFAWKKVGLGTLSFKHLLDEEERLEIAMTEHQQILYKGGLKKLQDAANESNGRKRAQLSFGALHLMKAVCAEPYCLPGTKFLVDRSGRDVHLRNSPKLQWLLERLVVVEAAQEKAIVFTELRETQAALYYFLKETFGIRPFIINGDSQGRQGYIDKFSAKSGFDVIILSTLAAGAGLNVTAANHVFHFTRAWNPSKESQATDRAFRIGQERDVFVYCPTVVADNFRTFELRLDQLLKRKAGLAGSTLDDGGLAAMLNGTGSDATLTELVGEGVNGESLPKRYLTMDDVDRMDGDGFEVFCCLLWSKLGFRSTVTTKRGGDGGIDVVALNGREGALLQCKSSKSAAVGWDAIKEVTAGAARYQARFSGTRFRRIAVSNQNFTSSAVEQAEANHVDLVARMQLEEFLGRHPMTNLEFDEALLEWSPGNATVLAY

SEQ ID NO: 3694 - protein, 605 aa, Methylomicrobium album BG8
MLDSLFAFLPRQFAQWLDIPISGNPRMVINVVAVLLLLFLVWYVGQAVFSLVRLQSAIGALAALRRQKAGGETVTKDELDRIFRHRFFAGVWDTFRDTLHEQYEDRNAQGRIVRIRSTVSAEAIFSPQLLVDARLNVEFFKHLPGLLTGIGIIGTFYGLIHGIQQFDPSLLAKARADAAQMEKLFLGLKSLFTEVQGAFIASFFAIGAAMTVTFFEKVLLNLCYRRLEALCRLLDTLYEGGVGEDYLASLVKSSSENAVQMSQLKDSLVDELSAVLQNQTVRQIEQSQRLGDLLSARIREHIESGREHGDRVNRILERGLDDIGNKMARVGREQGATVTTNLEQLVQSFADKIDSAFADRMLGLVGMMDDSAQSMRDMQAGFHELLHELRRSGKAEREELTTHMASLVDVLGASQGTLEAQLADTSRTFAAAIEKMNDSAARISEATQRFSLAGDKVAGVLERAEQVSLQLAQSGGLLENASHSVAAILEQSAGTRDALAQMVAEMASMLERAKQEAGMNWQIVQQMQATVEAFEQLNAEADKSVAAIAEKLAETLARFREEMARHDAEFHKHHADTLNQVASAYEPLAASIGGLADMMMRRGEI

SEQ ID NO: 3695 - protein, 231 aa, Methylomicrobium album BG8
MLSRGTPLPRPKEEGEKPFWISYADLMTAMMMLFLIVMTFSLVIITNPAPELEHLKKIGLLCEEIKQAAQGVSGVTVDCVNNRIDFGSQAQFGNNDSKLSESARRTLRKFVPIVLNVARKDRGKLLKRVVVEGYASPTGSYLLNLQLSMRRAETVLCSLFESPAPEETILLDDDKRMIRDLFLVGGYSFNNGVGKTEAEMRRVEFKLDFLGFDETPSTVNTVDTADFGKCL

SEQ ID NO: 3696 - protein, 527 aa, Methylomicrobium album BG8
MPVKYAEHFSCALLKFEDIYRIPPFAASVKHMEATKIRIGETLKNADMGKPNPEMVRQTLEKFFHWVKEPSKTPSFSWLEVALLCRGLHTEIAGHGSLMQSESAVRFLLTEFAAQYSGRMLSPYPWQGLLSAYLNCPPGNNAAEVRNREALRAFLANSLDAVARSSSFKPRWLEGILKHSRVLEKNATRTLAEDALEGRSEIVERIAREVDIPPTSWFWPELVMAQVDAIVGYPDDRFKRAIDPVLAQLRQRRECIDKGLARILDRYSLCLAAEPHEALLSLAVFRWKSPSLERQTAWLRVTPKAKAMVQRWLVPHDLEAVFRQLVEDSRRYEFWLQFVDRIEFTHIWTGNSVKESPSRLSQDREERRPVFRDPEKPDDNLILMKIGGLFILESAVKTGGKCWAYREEDINPQLLKHGLRYGVFRDTTKNIFTNSYGHSDGLIHSGYAWEKAFLSELAKFGIFPDRMTFEALAARYRLVVESLPDGAERICCKHGSGVLGEWLGKHGFIRRADGFYRQSRKEEAAEF

SEQ ID NO: 3697 - protein, 686 aa, Acinetobacter radioresistens SK82; identical to SEQ ID NO: 1808

SEQ ID NO: 3698 - protein, 243 aa, Acinetobacter radioresistens SK82; identical to SEQ ID NO: 1809

SEQ ID NO: 3699 - protein, 471 aa, Acinetobacter radioresistens SK82; identical to SEQ ID NO: 1810

SEQ ID NO: 3700 - protein, 1067 aa, Acinetobacter radioresistens SK82; identical to SEQ ID NO: 1811

SEQ ID NO: 3701 - protein, 300 aa, Acinetobacter sp. CIP-A165
MIEDIQQKQNEMSDQMNLMVDHLSQGAAKIGEQGQHAIEQLNGKVSELMGNLGGTMSELMSDVTKQRMEQDRVILENQQKLHEQSSTLIDNLGTEIKDLIAHSQNAVQVYKENIQKLSQVTTDSITGMNNGAEKMRLASEQFNTAGSSLITVTDKTSQLIAEVSTTSTHLTSASSNLIALLKDYKDSQESVKQAISTLDGLIKQAQSEAGMSTKMLEDMNHMTNALNQVKKEMQDYLEQVSDVLVKSFVSFDSSMETSLNHSLRDFDNTLDQAVKRLVDSIEGLGSFVEDLEDLVQQKKN

SEQ ID NO: 3702 - protein, 243 aa, Acinetobacter sp. CIP-A165; identical to SEQ ID NO: 1772

SEQ ID NO: 3703 - protein, 456 aa, Acinetobacter sp. CIP-A165; identical to SEQ ID NO: 1773

SEQ ID NO: 3704 - protein, 1067 aa, Acinetobacter sp. CIP-A165; identical to SEQ ID NO: 1780

SEQ ID NO: 3705 - protein, 656 aa, Nitrospira moscoviensis
MKVLLGHPQHVYAVGGLLVLSVCLFLTLFLLPGLRQALRLRRLIAGLHALENKHAAGLDSLFHDDKVLKHLWSEFKETLHAQKELNPCSGQFEVVAERSTIPAQAFFSTETLVDTVIRTEFFKHLPGILTGLGIIGTFFGLIHGLKAFEVSDNPAIAKQSLNALLQGVHEAFLVSAAAICLAMLVTFVEKWLITALHKRVETICQLLDGMFQAGAGEEYLSRLVQASEASAKEAKQLKQSLVGDLKQILEDLTEKQITANSLNSNQIADRIVSGVNDSLKEPLTNISQAVKHVTGSQGEAVNRLLTDTMAALTAQLRDLFGQQITGINQMQQQTIDAMASAVGKLEQLVADIATTGAQTTTSMTDKLNSAIAAIEGRQAAMDAQVQSLISQITTHVDLSQTETNHKLREAVSAMSQELASTVGNLREMVNSASQQDAERHRMLEQGTTTAVSAISAEVRTILEQSAVSAQTMHNAVAAMERITTDSINRMSLSADRLYGASEKFAQAGNATTNILDRAQALLKQMADASGALTGSATVLNAAINDYKATRDSLASMITALSESVESAKREASLTADIVSRIERSAAVLREAEGEAEKYLEEVTKVLVEAHAAFGSQITSTLDKVNGDFHAHVQRATGALAGAIEDLEGVFDRLPGN

SEQ ID NO: 3706 - protein, 240 aa, Nitrospira moscoviensis
MTGTRLVLKRNGKDEPEKPFWISFSDLMTALMVLFLVAMSVALLAVTKTVTETERARAEREAALDALLDEVEKAAHQFPGVSVDRNRNVIDFGERALFDTRSHQLKSNQAILLRQFVPKVLEIARSQLGRQWLKRIVVEGFTDQRGTYLFNLNLSLQRSQRVLCVLLNSSSAGEGELSPEDQEQIRELFLVGGYSFNSAKASLEESRRIEFRLEFFGIGETPLLKVDIPRGNFGTCSMGS

SEQ ID NO: 3707 - protein, 548 aa, Nitrospira moscoviensis
MDAIDILRAELNRVNLQVGQGSYGSTKAMAQLAVEVERRFGNGVAPAKDLVAAAIRRFHSTGRAESFRDIKLVCYGVSTEILPDHILLFRNRERIGRLLGIVEGLRSERRKYRRCFQALMTAYFECRPAVSQEEVHRSWHEIRNFLRTGISSIGHEPMPDWAKAIFEHQNLFEDDPCEPYAKEVLNGNLAPIRAAFSLIGVPKNSWVQTDVFMAAICASCGYDDYQFRRYLDVLLTILKDNPGIALQGLKRILDRYAVMQLHPEHPALRAIATELLGNPLLASNAPRWEGVSQEARCMVSNWIKLKLIEQFFELLSHDGSTDKRRVKYWAEYVTVIENVWFALGSNARRSLNPDFKKLRLLMGDQALNLEGATSDNNAFVMKIGDLLIVEFGRTGNAAYLFEAKNPPFRLDGSVHLRDDLKHRRNLGSMDHRDGNESWEDKFRRAISEHTPLLRGRPDRQHNSDIAAARPNSENTKDSPNGVGGVFAPNNFEHVFRAFCAERGLRFSDRRAFGGKLVVYASGDNPKISGTLGQWGFRFDRQSTTWIKE

SEQ ID NO: 3708 - protein, 1244 aa, Nitrospira moscoviensis
MSLFERLHAAARDRESATRLWVSYGREAAYYLFASNPRDEEAIEIKNPLAAYYLNQLIMDGRATRDREGYGVSWDVMYQLLADKEHAQAICALELPPFGDLKPALRSENTLDDEEFAVAIEGWFLNGAVLGSVELSGPVAREGPHRTLLRQEVFAVLRAVQDFYADRARTPHSNRKHWGRIRHLAMLAGARMDPFLHDTVVVTPEKLHIRLAKVNVVGTGVVEVEPWFAGAPANWLSKFDDKQDVPERYEIVSDDKLIEVILSAPVRSVLRAIKKMPGRRVAGAFAEKFLSNPFATLGEDADHVIDEGQFDEARSEAGIVFQQFRAHWQMRNNEVLEAGLAISTADSHATSSQLELFSDPDELRKFVVTVESKLLTGFELCEWRGYSLGLVGDTHEQLDILKAVYARWTRPKIAIRAADVLDLKRYSERVRGIGIQPGIVSPYIPRTDQDPWFPDSRAEGKDASQVVHVGLAEGKELELVVDKKVFRTLKESLQQARTKGEKYITIPGLGEGITVEVAERLVNELASRYERSESRSTSNTAKKNEREELLIQTNIGSTDYLEERSSELKFDNRSPVLPTTLKGDASLKDHQKIGVAWLQHLLSKAPQYCRGAVLADDMGLGKTLQLLTIIAAALENSPQSGPVLIVAPVSLLENWREESEKFFQPGTFPLLTLYGDSIGRFRAKSNEIEKDLLDRGFTRFLRDDWLGAAKVVLTTYETLRDLEFSLAAVRWSMMICDEAQKIKNPAAMVTRAAKKQNAAFKIVCTGTPVENSLTDIWCLFDFIQPGLLGALNDFGKVYRRPIECETDEHAAKLEQLRAIIAPQVLRRLKRDIAKDLPEKIIVEAPRKLVLSPYQRQLYGDAIERYRLRHIDGHNGVFKNQLGLLHYLRKVCSDPREHGRTFDNEAVETARQKNPKLDWLLDALKEIKGLEEKAIIFCEFRDMQLMLAHYISQTFSIRPDIINGDTSAAEGCHDSRQKRIKEFQARSGFGVIILSPVAVGFGLNIQAANHVIHFTRTWNPAREDQATDRAYRIGQARPVYVYYPVVCADEFMTFDVLLDRLLERKRDLSGDMLNGTGNVLPNEFEDVVGVGKDAFDKQLYIEDADCLEPLHFEAMIAALCKKRGFRSVKLTSATGDGGVDVVAKTNNEGELVQVKHCSSETGVLGWDAVKEIVAGERLYSFQFPGVRFKKVALTNREFNSNAVSQARILGVELIGRSELANLLDKHRITMTEVETFLVSPEYVMV

SEQ ID NO: 3709 - protein, 652 aa, Halobacteroides halobius DSM 5150
MKKLIWTILFSIIFIITTWFFVVYLEFPPDIIVQSMFVMIVGVTLITGGRLYFNLHKKQKQITEAIKFLKEFKADKDNNSITHNDFIKLDNYFQDKEELKNTWEQYKDTIRRIKDDAIGEQKNNYFATIEADYFFDEAFITNKINIKLFNYIPQLLIALGIFGTFLGLVQGLEGLKIGNASQTQNSIKNLISGVNLSFLTSLYGIAYSILVTFFQKLFIGDIVTELNSLASQFDLIFPKNTQEDGVKELYNELEKQTASMESMATDFAEVVDQKISATLEENLGPTLEKLGESAERLADISENTNQNAIEKLVENTGEIISDATQDEISKLTNSLSDVTAQNEALFNNFAASISKVEMMIDNQQQVIEQTNNSATNVKKTNENVMHIVGELEKSIEKMNNFSTTQESTIESFGQIMTDIKGYIEHQSKSNQLIAATLEDNYKMAEQQKELNRDLNQATSNLKVVSKTLNPILNSLEDNMTEFDELSKNINNRLVNSISDLENHYQHINTSVASTIDDLDGTVEQLEDNVLGYLDNINQNYDHISKQLNQFGQQSNQLIESLKNFSSTQQQAHDLWKSYKDSFDNLNQELEEGVVEYTSNVRSGVNNILGDYDSHIENVLENFNATINQFTDTLEELNDMLYELEKVSKERTR

SEQ ID NO: 3710 - protein, 228 aa, Halobacteroides halobius DSM 5150
MFNKPIKKKKTTKDEEIDYWLSYSDLMASILIIFILLFTYKILDYNQTLEKKENKIKELTKLRQMVITKLVEEFGNEIQIDPKTGVIKLKSNILFDYDQSNLKPKGKEFLQKFVPRYLKVLLGDKQIKKNISRIVIEGHTDNQGSYLYNLELSQARAFNVVKYIYSDNVQSKYKDDLEDFVAAIGRSEMDLIKDKAGNVIKDKSRRVEFKFELKNEKILKEILHEVKK

SEQ ID NO: 3711 - protein, 417 aa, Halobacteroides halobius DSM 5150
MAKSKYTLPKFKFYKPQKLERTAKRIEQETDKRLTATGVSKNRYERTLGHLRENRNLRQRHYKILAYYLSSLKEDYPKLYNLFISKAQDFFSGPGRYYYHLKALLSSYYQEFKDKELYNLINLVIKNNNKWKSEMEFVKNLLYKSNNANEFFFKIVSKVNDCRSLTDIEELKSKLLMNNNNNLLKQSLSYYWLQILDNGVRNINNDLCIQIIKDYIPLEKKKKLFEKVLLDNKDINNFDSIGNIFERWLKLIGNTLGGPYGSNSAKWANIDQEARDLFKRWKAHKNIIVTFGEISGDQRRLDFWKQYSDYFYRVEYFEKYDQAILMESSNHIFIEFAGGGALYMYNKDYLTIQNLIDKECGYSNTKMVSEVLKDTQEEECTERLEHRDNYRGYKKWEPRFFDRFSTHGYVKKSSRKK

SEQ ID NO: 3712 - protein, 1172 aa, Halobacteroides halobius DSM 5150
MALRDIIRDFLNFNSEEKQEFVVNYSDDKCIKIFLHENNQKIEIDPESDNIFTLLSMTNLELAQDNSYLKIDYDQIYDLYFADGDLIDDYKMLGLPDLYQGYIKVDNVGNFIQDEEVKYSFYFEDSKANYDICIYKNNIVQYNQEYRVLQPDIYELITSIRDYNKKQNNYGDMMKQFEVFGKIKDYADENNILLNSRLSNEEKPIIVDEITIDFDKKEDGLEIYPKIEDKDDSFNQDLVDKFDRGDQVRNFYNVDDDGIKRKVIFKNKDSAKKIKENRSLSGEDELKFYKGENELWEDENLDLSNFGPRVRGFGYLNYRANAISDRQERDDSWFDAEVETEIPKVYSQSGDSFKLKYKDREKMADKLRKLKEDSLEVIDVGFTDNEGKKYNMVLNEDQLKAEINKINQATINIDKIKNIETVKNIKELVKEQEDKEVIKFDGRFIRFFSLEYLEDHLTKLEKRKQRKEEKKIDQEDEDDNKEMTTIIEDNLEKKDISINPNIKDEEKNLEVPSILEADLYPHQKVGVRKLQFLYKNDKVNGLLLADDMGLGKTLQLLTFIAWIKEKDELNRSLVVAPTTLINDWDNNSTNNPGEIQKFFPNDFFNTYKIRGRIDDKEVNKIKQSDIVFTSYNSLRINNIKLGQIHWNVMVCDEAQKVKNATTQTSVAVKAQNADFKIACTATPIENNLLDLWNIMDYAVPGILNARTEFKRKYVNKLSKLGKDENEQRKRLNNELTDKIDQNFLRRNKKGELDDLPKKKIKVYGIPANQNELNKIRELNQLRQQGENHLPLIQKLVALCSHISLIDKDVTDNSISDLIEMSSKLKKIKAILDPIKKKNEKVLIFTVFKKMQKILIETINYWYGFAPSVLNGDIAQNKRQRVLDNFRKSEGFNVIILSPEVAGVGIDLVEANHVIHYTRLWNPAKEDQATDRAYRIGQKKDVSVYYPILTLDREYNYKFESEVEYINRCLTENVKGKSPEEKLNKLLVNKKNLLLNFFFAAGDSTIDWNSIADENEMEQVDYINIGNVSELVGPYEFEILVAKLYEHKGYKVYPTIRVGDNGVDVVAIKNKKITLIQCKQLKKNKLSGKAINEVYGGRNLYSNSLNKEVEELVVVTTADDITSQGENLAKQNNVNVILKQELANKLVKDQVYYSEIDIAREERYSIEKLKRIL

SEQ ID NO: 3713 - protein, 462 aa, Roseobacter litoralis Och 149
MACVIVLIMYLSTERQRRAVLKLTRIVTQTSGEQDFSKNYASMCARIEAWGGTGPQRRLADIWAEFRETVVEPSESHSGVIQNSARPDEFFNTYSLGFGLSRWRFWPGVLVSVGLFLTFLGLVAALVQTGDILKGASDGADSAVMTAALSQLLAVASAKFIMSLSGLFASILVGLSIRVLSGRIDGPLAALSHAIERRVQFLSLADIAQKQLGETQELRSHLSKLNAELISALSEPLKEASNRGGEAAADMMKSVATGVSESLNKTVSDAGNQMEKAAEGMRDTTIGLDAVSRRIEAVVQDLTKAAEALEKGATPLAEAISGTAETAKIIGTAGVDLVERAEISLGHQTTALTAAAEAIKVQIEAFESRAKAYDGDMESALKVYKTNLDAAMSEVQVFSNDVHGQYADALQRLRTVIEGARSFTPEPEPISEPAPELDVENTVEDASANASPPTTTKLLNSE

SEQ ID NO: 3714 - protein, 323 aa, Roseobacter litoralis Och 149
MTDMTVSILFIVLILLAFFASQLRPEQTVTVSEYERVVAQLDEREAQLRVAQSAIEDWTDGTLDVATLLRLREDVLRLTTEVTNLQARAGRSEDLEQDIVVLREELNRARTQLSLIEVNPLEMYNSSVAQERENLLTSLRDQIAEEFPELGVRVSDGKDALQFQGEGLFASGSPRLSAGSQIKIERIADLIHAVLPCYTMGPQSAYDAQCNPSFAIVEALQIEGHTDSDGSANANVSLSSQRAATTYGAMISHQPGLNIHQNFTDQPVLSVAGYGEDRPVTLNSSPEGKSANRRIDLRFIMLRPASIEDIDSIKDGFLRLDAP

SEQ ID NO: 3715 - protein, 437 aa, Roseobacter litoralis Och 149
MTVRALIPAFSRPQARDFEEPIALVEMCNEIAVAYQSKSTLAEQDILGLAATYDKRRVDGRWDGATEADVAMLLRAACAGHLTQFSDLQDFLLQQAARTSRLNLLSAMCEGYFEGWKEDDTLTVEVSRIMQDSAKKLPENFSHLVVSLPDVLNSSSGALQLATRMAGYDRPHEMLTSCGFSDPHALGFCAKVSRYFLASLPPIRSRADMDRLMDWCRPDRALGLQGPQMIEAINLFLRPWVQTSPNKADKQYLTDFLVNHFDDPRIAGEHVWMDVDPDCRGVLLRWLAGDSIIAFMDIISAVEHKNPETWRMRREFWTRLYDEGTVSEAWVALHPVAVDEAQRRFDRTQNLSLKAYAKQSGKRRDTSLLIMRAGNTVIVEGSQNYRVHIFKEGALQRPVLYLDEYDDENITLEQGNPNTRIHDIHGRWREWVRGRLK

SEQ ID NO: 3716 - protein, 1058 aa, Roseobacter litoralis Och 149
MISLILSEVRQDAIVLVPVQAAKGIFRKFQRSSSPDLTVIHQEDRALTYALARVRSLDPERTQSVVKSDSLTISHRLVAQIEDAFAAPLGLPHLINGLSFAAKMQGTIGSSDARLAWWWERNGRKESVPRTGAILFPDMAERRMRIPDAIYQAIRLSEEFEPDAPIETHWRALATYKTFLGNAAGTVLDPFLEGLKIVSVGRLSLEVTDPDDYRFAPTPVSTAEDDFLLSHSNKLSFQAAVTNRGEQPTYRLTDGTFAVIDRSAAPVLKVIAQAMNEDIVGRKAFIADASRLIAEAIEQHFRETGAINDETPPEMSVELIERTVDEGWTETTGWSDRVIGVGVAVPTPSEIDEGSGLPWLPPTMSPTVGECLGALADEEVADTILMLQRALLSGAKFLDLHTGTVPVTAEVIEALKRRGALLSEPALIDADAADAYLPIVHANLHDLDYFADVQPRSGSETKLPKTVSADLRGYQTNSFFWQVEAWKVGLPGVLNADEQGLGKTLQTLSFLAWLDHQIEMGEVEPAPVLIVAPTSLLHNWQAEINLHLTRNALGPIHQLYGTALSAWRNDKARGRDIGDGTVHLDLSPLHGKRGVIITTYQTLANYAVSFAGLKCATAVFDEMQFIKNPRTQRAQAAKAVQADFWIGLTGTPIENKTQDLWSILDIICPGALGSLAAFNRVFAKPSANRLAQLQRALFQKSGARPALCLRRTKIDADPTIPPKVRIMYPRQMPPAQAIRYDEARAKHGGILQVLQHIRRVSAHPGMIEGELINDFVGASARTSAVMDILRFVKSKGERALVFVENRDIQAWFIEILNLEFGLNVMLINGDTSIDDRQWITKQFQRERGDDNEFDVLVLGPRAAGTGLTLTAANHVIHLTRWWNPAVEEQCNDRTHRIGQTRPVTVHLPMAVHPELGPASFDCLLHRLISRKMGLASNVLQPLDVDEHDLKQLHDSSVSGRVVDEGPQAFSLADGLPGRTDIQITSLADDIIRVSSKNWPNRLVVAAHKDAGIICEFVDESTDHVVSVLPPDDSAKFGGYVPISIIKDSRLWPDFLVPY

SEQ ID NO: 3717 - protein, 654 aa, Halanaerobium saccharolyticum subsp. saccharolyticum DSM 6643
MVFINFNELSTSAHDLIFNLKPNEIIVILFVILIFYFTISQWVKNLSPAKNIENELMNIRNELNKNLNNNSLKNILKIESIIKEKKYIINDLLEDYIIMIKNNNNSNVIDPEYYINKESIFSNYLNKKISDNIPGILIAIGIFGTFVGLVVGLHSLDLNNIQESITPLITSMYISFGSSLAAIMSSIIYNYWNKKINGSIEKEINKLNNSLRKYLPVRIESNLIDNIVENQEKQLRATQEFYTDTLIPELVNGVKEAVDQSLKPSMNSINNNLNNFVETSKENQKDMINGVEKIVSENIAPQIEEMHNVMDNLANLSIDKQSESIDKMVDKFMKTFNESFDDQFTALRVTLEDMIRWQKESKKEMESLVYTLEQGAVKQNDMLDYTEKLLNNVHQYVKQFDDLNANLNNNIIQLNTLGEKLSGLEEKTNDKLEILIEQQEKFDQKKNSHIDEMEIQLDNIEQYWDNVQSSFTKLNNNFNGAVEQFADSTHDSLEKTFTSFDKNLSEISDRLAVTIREVNNSLEEIPNSFKQLKNLLDEFKIDRQEILEVLNNQDALLSDKFKDMSDIMQEENKRVEQVLERNNKKFKKDIRKEVKNTLERNITPINDELEKEREKQKEIIDQLYYIKNKIDEDESETKDKEDKSNFFSRLRGDN

SEQ ID NO: 3718 - protein, 262 aa, Halanaerobium saccharolyticum subsp. saccharolyticum DSM 6643
MLNFFRKNKTDSEDEKTNFWISYADVLAALLLMFILLLSVVMLDVKNTEIKALKDQQEAKNLKKQLDIKEEKIEKQKNEIEAKTQEIDKLLGVREEIIIALQQKFADTDLSLEIDSQTGAIRLPGGVFFDTDSTEITDEGIKFLESFIPQYVGILLGPDFKEYVAQIIIEGHTDDVGSYMYNLELSQNRAFEVVTQIYDGSFTDFEYKNRLRDYLTANGRSYSQPIKNQNGEINRERSRRVEFKFRLKDTEMINDIKNTLGE

SEQ ID NO: 3719 - protein, 398 aa, Halanaerobium saccharolyticum subsp. saccharolyticum DSM 6643
MKFNSFFFQPSKLIAVKNEIKKTFPTKSDIYKIKSQKAKEVDLEELLKKIREFSLDRIIYLADSLKAEEIIALAINYSEIPNELYKKINKIILHKKNKFLIKILWNNFAEDYKNEDLNRLLGNLLASFSKLNDQEKVLYNIFKDSSPLINMRKQIENNKITLFDFLEELDLIFENKISKRLAADLFSKSSKLFFIREEKDNLIKIFKELEINNLKEVVENYLFVFKDKEYQEELMYKIKDRLGDPREDYSTAWNNIAHKAKEKAAAWFNYKKLKEFFDSITTDQEEAQKRFSYWEKHVDIMEKVDYVKKYLQLFLTFDNFVVVEFGDLGNAVYFYKKDFFKENLAQYTSKYNAVNNKSLKYTYEARNNRNKYVYKVDHRNDWQHKVNRMLKELRLGRK

SEQ ID NO: 3720 - protein, 939 aa, Halanaerobium saccharolyticum subsp. saccharolyticum DSM 6643
MFNFFKNSFKTNTSEPEIEIKRTLIENGIEFEINKIDNGQVEQLSFPIIYGKYFDLRNLINKDFYLSLQILEGAWHSEELIEKDDGSYFLHIDTIYQYQNSAEDEESLGEGNRKLNELLGLKPDESLEITIDNSGVIGSSNFKLEYIIKDEQEGYISKFHQRVGPFFPLNNNQAYVLNKKLTEVLDLIDNSPKERKDQFEYFAKVKSKAKKLDIKFNPYLEGEEYYFPEDLDIDIELESIDHLKLNPRFDDLDDQLNQDTEKAINNDDNYTVNKTGGKNQRVFIGPESKESYKQTSANRELTGSQVPDFIENPMKYLPDNIDLEKFSERVKGLKERVYRAQPFVSSSKTDQIDWFDIDVGVNIKNESDEAEEEQIELSEFERLVNEARENGEDYVLYNDNWVKVPKESEDFIAGAKEVDKIKQNGRVNKENLNYIFDIYENIDLLEYNEQMIDFRSQLQEDGVIYQAPSLFKGELRPYQKRGYIWLHKLKDSKLGGLLADDMGLGKTIQVIALMASLKAENKLSPSLIVAPKSLLENWQHEIKKFSPEINKVYIHLGGSRNKNSRVIKQSDVVLTTYSTLVSDQVLLGEIDWTILVCDEVQAIRNQSTLKDHAVKAQKAKLRLGLSGTPVQNTVADLWSIYDFVQPGLLDSFKEFKNNFVKPIESSNTPEEYEKYEGMLKEKIQPVFLRRTKEGELKDELPEKKDITKTIEMSQRQKERYKEIIEKEKNSKGRTHLGTLQSLLQLSSHPALLDKDWNLKSAEELLNEGPKLKSVIKILREVEKNNEKALIFTTFKIMQLILQRVIREKFGLQEIPIINGDSKQRLASVDRFNESDGFGCMILSPRAAGTGLNITGANHVIHYTRWWNPAVEQQATDRVYRIGQEREVNVYYPIMTAARETVEEKLHRLLEEKKRLAKNIIVPNNPIQGELMKEMDEEMF

SEQ ID NO: 3721 - protein, 691 aa, Pseudoalteromonas citrea DSM 8771
MEKLDWLVPDFLSFSTLNFESQLSAIFVAFLLGITFFFLAKSGNSFRKAKKRIKVLNEALKGISTENISSKRRDLISFITEKDKEKSQPVRHIWKEFDETLIEVKAIGNVHLHNTFDASHFFNTHTLAKGVTDNRLIAAVPGFLTAVGVIGTFVGLQIGLSEMNISSDVSVEEMKAGVSAVIGGAKVAFMTSVWGVLLSVLFNFIEKSLEQSIRKRISILQDKIDDIFPRLSPESQLQIIAHNSIESRESLQGLAEQIGIKMQESMLTATRGISEALETTLNEIMAPAINKLVDETSEGNQKALEDLLTKFMDGFGAQGNQQRVAMENASEKVNESISGMNSTMEAFISKIEASQQASGEREKELISSISLQVSQLVEQSNEQGRKMTELMETQIGSLNDAFDSSQARAKEREQEFTNNIEQQIKSLTEGIASQSSVLTEFVQSQMSSLNESFTKRDEQSAAISEQRNAALEQQTQAISKSTQELVSQIESSIQNHKTSSEQIIEQGKSLQQSVESSVLASAKATDSMRESATELKSAAEKMSIFGSHVRDAGNKLSGAVTEAIESTKDLASQNQTTSERMENLREQLIADTGRFRDLADQINSMIVNAGNTFDSLKSSQKEYLSQLQKNVNELATQMTNLLSDYAEQANAQTKDHLTIWADSSTQYATTMNNAARALAGVVEDIQDKVGA

SEQ ID NO: 3722 - protein, 247 aa, Pseudoalteromonas citrea DSM 8771
MKFASRTHVKVDEENPYWISFSDLMSALLVIFILAAVALIIELTQRTQDIDAGIEELKKAEQARQDILNEVREELAKQNIKVEIADNETVIRIPEETLSFKSGDDQIPEDMVESVKSIGAVLHSAVMKNDRFTYLDTVFVEGHTDSVPIKFGKYWTKGNWGLSADRAITVWKLWSEELVLEPSLNELLNHSEENLFSVSGYAATRRVELDESTPELRAKNRRIDIRFTVKRPSIEDLEKIKPNYNKK

SEQ ID NO: 3723 - protein, 480 aa, Pseudoalteromonas citrea DSM 8771
MRINLKKLRFTIPENPFGKNTSLMLDLVNGLKQISKKAGTDNDSFKAAWRKVYNAVQANKNLENVIENKLDIRALGFALNSKVGQQIQLTTSILDKIDFLTEKPSSLFLESFYQYYLSRYSSLINVAYTSEWLINARKKRKQSKWFDENLLSQDGPKWLAQQAIDKNRDFDFIVKEFELDQFQSGQFMELAQRIYFVEQLKNIPVNKPHDLLTEVQKKEVYESSFDSSELLGHKILKILIERAPSHDIHESWLNTIMSIAGDPRVPVSHPRYRKWWSHVSKDMSAKVKGWLSGLDLRLFLEALEDFSYSSYDPDMERMFPTRKKFLEGLYDKKLIKNTKLYMCKSMARFLKTKYKEEHLPDFSIVDDGEKSIIYVDLGSAHMIEGSHQCKLWIYRSLHESAPVLQYDKQRKSYRSLTKGLHEAMSNYGHGAYDYFTHSPANFSWQRRAVESLRDLRVPVTIKDVLTADDYRVYIRRFGAD

SEQ ID NO: 3724 - protein, 1152 aa, Pseudoalteromonas citrea DSM 8771
MALSNLINKFFKNADRSVSFNFIPDELDGAYFSLDKKEFEKVRNGTANEWLIQQYVTLKMLEEQEEAESIPNGFIVPANVLCRLDDYVRESLSLPPLWDGVIYSDIRGNTSRSNFKVELAVSDPDGRTTHSYSIEGPIIKFGETSQYLLTQAQLIAFESKKKHENSAKTEFDNLTLLHNLQLSQKQNAKLQLQHFEKLKIHTPEKIAVEAELDSFGNLILTPFMGQESSHEDIQKVLGQIVAPNANTIKVGDEIILFTEEKIKAVKEVLDNRVVPKSKVKDFLQNPTAFIDASLVDLDLGFSLRVHGATTFKHAYFGETDDSGVDWFGKSASSEQVLPISKLLPLVSDSSSFEDVKKVIDDAVNTGANEIEFEGKFFDISDSDNVSKTLDEIEMKLRSGNDEEEVDTGLDSDSEEEATETEETIVVDIDLNDEELSENSPIVSEKINDVCRMGDLDWGNYLRTPYKHQDIGVRWILGLLDQSHENSDISGSLLADDMGLGKTFMALSAVEHHYREVSQINETQKPTLIVAPLSLLENWKDEVEKTFKTSPFRDIVILQTDGELNRFKNGGVEIRTNTSDGDEFEPRYSLNIGKDCVDRLDMPGRLVITTYQTFRDYQFSLCLIDWGLVIFDEAQNIKNPNALATRAAKGLKAQFKLVATGTPVENSLADFWCLMDTACPKYLGSYQDFRAKYISPILQAASDEVEDIRNRVGRELRVKVGAIMLRRVKEDNLDGLPEKFMYVGIENTDWKYLPELGKTMTGYQLKVYDGAIESIEESDSNHVLSTLQRLRNSSLHPRLADGGSLNCPQSNKELDEILFESEKLKSLLQLLDLIKTKNEKCIIFAVNKRLQTFLSIALGRKYGLGPLSIINGDAKAVSKKVSTPTRKTMIADFEAKEGFNIIVMSPVAAGVGLTVVGANNVVHFERHWNPAKEAQATDRVYRIGQTKDVNIYVPLLLHPEMESFDVNLHKLLTKKTQLKDAVVTPEEVIPMPGGIAGAKGFSDEQVINADDIKKLSWQQFEALTVEVMNKELSADSAWLASNGADKGSDGVLIVNNEMVLIQAKHTIRGRYDGYKAVQEIFAAKPIYEHQIGKTCAKLLFITNATMLSSRTREVAKQCGVEVINGSELAQLVKKHQITFKQILMRLDKKRMKV

SEQ ID NO: 3725 - protein, 688 aa, Psychrobacter urativorans
MDWFKIAQFVQELYIFPLVIVAFVAYVGVRFVLNYINPAKLLNNKLAQLASDLENMNGDFNFDKELLDIKFEGNTSLKQAWLNYKKTFHDIHEVRDGESVIDYSRATVPSEMFFTESIVVDIPLKVDFYKHLPGMITGVGIIVTFAGLLIGLLAFDPAGNPDNVQDSLTLLLKGVGEAFMASGLAILTAMLITFFEKSWLRKCYEQLQRLNTAIDNAFTFDESGEEYLAKLLKSSQANEANARQLKDSLVNDLKTMMTNLVEENKRNQAAFASQLSESYAQVGISTATQIGESIESTLKEPLDKIASSVQQVSGDQGSAVQDLMTDVLTAFMSKLETTFGGQMTGMSEMMTQSVTAMREMQSGFSQLITDMQTNSEVSTKTLETQMEKMMEDIHQKQNEMSTQMNEMVENLSAGSAKIGDQGLYAVEQLNSKVSELVSGLGTSMSDLLSNVAEQRIEQDRQISDNQQKLHEQSSVLIDDLGSEIKELITHSKEAVQTHKENIQKLSQVTTDSITGMNSGAERMRLAAEQFTTAGSSLSTVTGKTSELIAQVNTTSANMTSASNNLIELIRDYKNSQNSVNLAIETLESLIQQSKSEAGMSSQMLNDMQNMTTALSQVKMEMQEYLAEVSDVLVKSFDSFGTSVESSLNQSLVSFDNTLNQAVQRLATGVEGLGNVVEDLEDLTQRTRS

SEQ ID NO: 3726 - protein, 243 aa, Psychrobacter urativorans
MIGNRYAKKPRSKDEGEKPFWISFADLMTALMTLFLVVMAVSLMVVTKKINEATQAEKERSSEILDICTSIKDDPTLKNQLITVDCKENRINFGEAGRFGHNDYRLNSEGIKALSALVPVVLEAANSENGKKWFKQIVIEGFTDTDGSYLYNLNLSLRRSEWVMCSLLDPTFNQELTLTDAQKNQIKQLFLAGGVSFNSAKDSKEASRRVELRMQFYGLKEKDSAEAQPIFVSAPIETCQLAR

SEQ ID NO: 3727 - protein, 457 aa, Psychrobacter urativorans
MSIAILKQRLNQSIDNFSEPAQIHNRFVRPSKLIKTLELIERKFDEMESIQPIEEKIVNSILKLEKQGKDYLTKRDWKNLAWSLSKKLLDYEDKILFTFKGSELIEQFSKMDPELLKVVYFPLLYSYFAVEQAEINKRPNNWIQLRNILNTNRSTLFRATLRPKKWLTTLTDHPEVLSLDPSKRFIRDFLHNSDDSRVSSQLESLSIAPNSWFWDSLVNSSIKSVKTMNEDDYFKVIPRFLLLLEKNPIYTTDILTALLERYASTSKRTLVHEALKNACLTQWGNPQYDSAAGWRNVNPDTRKMVVQWFVRADLEAFFTVFGISADVRRFNYWMRFLKQVTLSEVFLNDQAMRYPTAQQAEFKKNNAGRFKKIVGKSNASNAFMIKIGGFYIVEFSEMNNATYFYRKLPYPPFQEKTGKVEITSLKSTSKAQFYLSHQGAWEKSFDRRLQELGIFPD

SEQ ID NO: 3728 - protein, 1075 aa, Psychrobacter urativorans
MKLAFWKRNKNKQTAISETIVNSVEPAPLQYDDIGLKHSYTSAAKTDADFYWESLADEEVAYQLDDSYILPWEELFHIKQDPDHSDVINLLNLPLSNDLYPIIRSENGLSDSDFQIILDGWCDKNKIKFKGSVKRTGAIISFTGKECLLNESTWKLLEKIKEFSRITDKDKSINQKYWAQIRGLANKSEANLDEFLRKTIVLAPDELQLNLRKNLVSTESVVEVQPDFKDSPSNWLQTFDKYNEVQDEYTISLPEGGLAHVIIEPQVKSVLNEIKKMPNRRITGERAQTFLHNPFAQLGEDALEVISPEGFEQSKEEAEIYSYRLLVDKAYDEASHFSSAQLTLHENSSRAQNPVLLELSNLEQAQHFIATYERSSPVFLWAGYSIDRTNYLDNQIEELKSDLEKIQQYDDELQASTVLDLENYSPRVIGIGEAEKLSSEAIQKDSGESEWLPQNFIDGSADLSQFTSDNTDATTELLEQRIQHAEAEGESFVLHPNSNVSIPLDDAKKLLNDLRDSKSDDLAENDIEQEQPKPDKTKKKSTLLIANNIDEADFTKKRAEILTFDESNRPQARLPSSFRSQEFSLKKHQEYGIAWLQNLYHYAPTQVSGCLLADDMGLGKTLQLLCFIGEYLETAEDKKPALVVAPVSLLENWEAEINRFFSAKFGKVLSLYGDNLKQRKIPKHLISPQLRNDYGITNLLEDNWLGGADIVLTTYETMRDLEFSLGRVDWSIMICDEAQKIKVPTAMVTKAAKAQKADFKIACTGTPVENSLVDLWCLFDFIQENLMGSLSEFNKEYRRPIEKKDDEDNAIIDYLRKLIEPQVLRRMKHDVAELPAKHEINDCKNIEISTLQRTLYKQVSNDYRSLSEQGHKGVMLKALHDMRMICAHPLNLQEQATIQDSPKAEWLIKTLDSIKQKDEKVIIFTEFRAIQVFLKRLLLERFGLNVTTVNGDSNTNSRVGLTRQGIIDKFQEVNGFNVIILSTVAVGFGVNIQKANHVIHYTRSWNPAKEDQATDRAYRIGQDKEVFVYYPSIAADDFETFEIKLDKLLSSKRSLADDMLKPNVELTQELIQSIY

SEQ ID NO: 3729 - protein, 540 aa, Thermoanaerobacter wiegelii Rt8.B1
MIFKEITLFIIRLIPDFNDIFCFGIILLAVFVFFLAHRKPKQYTRLVDLYIEKIHNIPDKDILLRELIELTDEIIEKEKNDKYITGLLEKFKNRCYSGNIKNAVDVLDYTALVEIPGKRKVFDMMPGVFTGLGILGTFAGLVLGLSDLNFSGSTQALEQGINNLISGMYLAFLTSIAGLVSSLGWSYFDRKRLHNYREKIHSFHSSYKKVFAQEEIDDYLKDIREIQEEQKTYMQKFVSDLSLELSNMLSNILEQRIFPEFANIINQQVTSKIVESFDNTIGEIRQSTESSKQMIERFANLAYDNQLEGVQRIVNKFIESMDLSLKGKFADLGESIGEMIKWQQMVKEGMNELIEKLSNNILNLQDVNKAIENTIINFSDYFDNVNAANNHLVENISKLESVSLNINGLIEDMSKMIKDINEQKDLLLKDKTEHIQIISRYILEINEKFSLLEKSYANISKDIDILNNSLKQSMEEFANKTHEGLKRSLSLFDEELASITSYLNSTLSEIEEAVDELPKVIIEFKNTLRSEEKEMQTIEG

SEQ ID NO: 3730 - protein, 230 aa, Thermoanaerobacter wiegelii Rt8.B1
MKDENKVHDYWQSYSDLMAALLLMFALLIVIMIYKYAAIAAELSLQKAKVDDLIGVRARIIDQLLKEFSNSDMTLNIDPQTGAISFSEGVFFDKDKFELKEEGKRYLNEFIPRYLSILMDPRFKKYISQIIVEGHTDDTGDYMYNLELSQKRAFEVVRYILQSNIKGIDSKTKADLMSYITANGRSYSQLIIENGKVNRQKSRRVEFKFRLKEEEMIMEMQKILRKGSVK

SEQ ID NO: 3731 - protein, 931 aa, Thermoanaerobacter wiegelii Rt8.B1
MIKISKDLSDRGIKIACHVLKKRKPVEIKIPLFLNPVEWLKDILPDEMEALNVLEGLWQEGILQEENNFYVIPYEFLYNIAEDQRCILCLPVEDNSIKVHIKAKGILGSSDFALIPDIYIKDEKMGPLDRRIKNVVSHNGSLYLIPLNLYSLLNEIDAYKPTADPLLQAKIIAKVKYKAKSANVTFDKFLESEEVYYSEKLDVDIVKHSDDHIQIVPVLGNEIDSLLKDSKDKVLKQHNTLYGEGIKRKRIFLEDRVVQNYNKILRQGHLKGTQIPRFLTDPYSILPENIDLSNFSKRVKELGLKVYRANPYINIKRDKNSGWFDFEIGGIIHEDTGFGLDEDGDYTRKNELKDNAKIDVEEYRHLVQKAVESGEDYVNYKGNWIKIDREQASRFLNIVDNEQFRKTQRIDITRLPYVLKIYENIENLEYNETALSLKKQLTGNFSISDFRYPMYLKNCQLYEHQKEGFLWFKGLYENHMGGLLADDMGLGKTLQIISFLCYLKECNEIKPTLIIAPYTLLDVWESEIRKFSEITSVYRHTGYKRYKTPELLKNYEITLTTYETLVRDQLLLGQIDWQAVVCDEAQKIKNSTTLTTSAVKALKARIKIAMTGTPVENNLGELWCIIDYVQPGLLSSYHEFRKTYQIPIEDAISNRSEAYVEVKNKLLNTIRPVYLRRVKDGILSLPAKNEFFLEVELTALQEKVYCQLIEDYKNKGKSESPLGVLQKLMELCAHPRLVRDEGEVNTFQLLSESGKLQRLIELLNEIKRRGEKAVIFTHYIKMQAILRKVIMDVFGINCPVINGNIKGDRMSIIDRFKESSGFGVIILSTRAAGVGVTITEANNVIHYTRDWNPAVEKQATDRVYRIGQTREVNIYYPICISSRGKTVEERLNEVLQKKLQLLNEVIVPSRCLSITEENYDYLLQDFSDWSA

SEQ ID NO: 3732 - protein, 690 aa, Lautropia mirabilis ATCC 51599
MNVPLERLMSFPTPLLVVGGVLLFLVATFLVFFLVRGGFVWWRLFQLQRAFARLKSGGGSSTGPDSCRAVSELDKAFARDRHLLHLWKEYRESLHEQRAVQDGQDVVTALRATMLAEMYFNGQSVVDGRLRTEFFKHLPGLLTGIGIIGTFTGLIGGLESFHVSEDADTVRGSLSGLMNEVGEAFLVSASAIGAAMLVTFLEKLLLSSLYRRIEKIAQDIDACFVAGAGEEYLSRLVRASEDSASQSKILKDALVNELGTLLRELTKQQIESSQQQQQRLLEDMKASARENNQALGDAINGVFREPLEKIAGAVQVASGEQSAMTTTMLQDVMSQFSARLNELFGGQISGLNELNQQTARSMQEAVSTLQALVQNIEATSGRASDDMAKRFAEAIAQMEKRQQAMNEQSEAFIGQIRALVSQSTAETNEKLRETLAAIGTTMREVMNSLSESQDQVAESVRKREETMVSRTESAVRSLSDSVDSVIQKMAEISTQIAQSINKLEGVTTTSIGKMESSAGLLAAASLDFAKAGSGVAGVLEKATTASSGLTEASSAFQDSAASVKSALQDYRLQRDAMAAMTTELKATVEAARREASLTTDIVSRIEQSAQGLGRAQLAANEYLNGLNEVLGGAQGAFAASIRKTLDTANVDFHKKLSDAVNLLSAAVSELEASLASVGASTPPGKSVGRS

SEQ ID NO: 3733 - protein, 236 aa, Lautropia mirabilis ATCC 51599
MLGARLVMNRSRRDEAEKPFWISFADMMTALMVLFLVVMSVALLAVTKKVSEQERAETEHRQDIAEIMRRFEQAADRYEGIRIDLSRAVIDFGDRARFAFGKWNLSPEQESVLRQFVPDILTLANDELGRRVMKRIVVEGYTDRTGSYLSNLNLSLLRSQRVLCAMFARSGAHLLTEDQKADVRNLFLVGGYSFNASRESAEESRRVEMRIEFLGIGERRADPVPLSNDFGECALR

SEQ ID NO: 3734 - protein, 565 aa, Lautropia mirabilis ATCC 51599
MNALQQLEHRLARSTQDAFAHSPQLPDRGAWEPILDAVIKRIRESNPGLKPGNLPEDRMQDALGRFWEGMEVRDFRDAYLLSHALSTPYRGTNTCAMDDAGRFDRILAGADSWVGRPNLYRRCYRGLVHNYFSYGSFPDRVSETGRKNWSALRQYLYDRNGVIQAERFNPPWVQVALDNRQLFTADPVGPYVAKVMQGDYATIDSLKEHLGIEQSSWFFRQLILSQIRQAVGYEDQRFRNSLDSMLQLIRGNLILRNEALAMLLERYKEIKGHPIHIGLRDHSVTWWENPWLPSNKTAWQRVSEDARQMVSNWLKGEFIEAFFTKLAQDGTSDRRRVNFWKRYVKAIDHVDFALGPTARNSRDPDFKVLKEKMKGLLWYLDASGNNNAFIMRMGKLVVVEFSDMGNALYAYRDDQGLPFDLTKPLALPVNARNSLKNSARRNKLTHKDGIYGYSEWEDHFENWLRSEGVSPEGRGDGAPARPGRQGEGRSTEHVPERPSPPPGQPVYYPPLYNVLDIARRHGLKTSDLRKQGGYFWVLTDDSDPQIGNALSMQGLRYRPGKGWYT

SEQ ID NO: 3735 - protein, 1109 aa, Lautropia mirabilis ATCC 51599
MFNLRKAFRAKQTACWYRRLDAVGIRISRDASSGGMPIESPLLGGYLEQLLDDGWLTETSDGGFLEWEGFYGSLSTAMAEMRSMDDLAGALQLPEETSAQIVLRSEGTLIDAGFSIIIAGWRYPDGIVRSARLEGAILQLDDVMERLTVEQWQLVQAIRAFSRRPDAERDDLSNRRAWGHIRSLALAAHANLDDFLTRSVVVTPEHMLLAFRRSAIVSDGPVVEIIPGFDGVPDVWLAAFDRNSTVLPRYDLSMPEGIIQVLITPQVRTVLESIKRMPGRRVAGARAEAILRNPMAALGEDAQEVLDPKQIEEVLAGAGVLFERFTPRVVWDAEGRLLHIGLLIEPEGAEGLQSSEIHWLSDEQVENFIERVERAIQAQRQLVAWNGHDLAIRGETPEHLHVLREALRAKHAQMEGIGYERVHDLGIYSERIAGIGQDTVLHVSAVGRDKEGDVWFPEQIPEFIVYTPEGRELPVRIPTDPENLAKLEKSAWEAKSRGETDVQVPGTSDKLPVDEVLRLVGRLKVPMGEAGNPKSPDSGLEKPKDKERDSTPRQSGSKTLILLDNIDQVDYEEKRRIALSGERTAARVPACIRSGLSLLPHQREGVAWLQHLYGLRSDFQVRGAILADDMGLGKTFQLLAFMASLIEENPSIEPMLVVAPVSLLENWAEEADKFFVPGVLTLLTAYGDALAPLRVPRHLIDERLRNEDGLVRFLKPGWIGNARVVLTTYETLRDFEFSFAAEKWSVMVCDEAQRIKNPAAMVTRAAKKQQAGFRVACTGTPVENNLADIWCLFDYIQPGLLGALSDFTRRYRKPIEACTDQERQRVGELRARIQPQVLRRLKQDVAKDLPQKIVDEGCRRLPLSPFQRSLYSQTLEGYRASREGLGKSPFKNQLGVLHYLRLLCTDPQEFNMKGSQRDRLDVYRAKAPKMDWLLTQLKRIQRWNEKVIVFCEFREVQRLLQSCIEVELGYSATIINGDTSASSRNVDSRQKRIRAFQEKPGFGVLILSPVAVGFGVNIQAANHVVHYMRTWNPAKEDQATDRAYRIGQTKDVHVYYPTVAADDFVTFDVRLDQLLTKKRELAGDMLNGSGDISGAEFDTMLNEQVGAAS

SEQ ID NO: 3736 - protein, 688 aa, Acinetobacter pittii; identical to SEQ ID NO: 1828

SEQ ID NO: 3737 - protein, 243 aa, Acinetobacter pittii; identical to SEQ ID NO: 1829

SEQ ID NO: 3738 - protein, 457 aa, Acinetobacter pittii; identical to SEQ ID NO: 1830

SEQ ID NO: 3739 - protein, 1068 aa, Acinetobacter pittii; identical to SEQ ID NO: 1831

SEQ ID NO: 3740 - protein, 647 aa, Sulfobacillus acidophilus TPY
MGNPGNWIYYAISWVGSINRFGALYLWLFLFLTSGVLVWRIRVEGGIRSEMRQLTAYLKEHGTSLPTVDQWFHDHPNAKLRPLWQQYVDAVQHHQDGDPVHPDIGRFFSEDAILLGIANRRITEAVPSLLTMAGILGTFLGLVAGLHGLNPNAPNGLGAGIGQLVGGLSLKFTSSVYGIFLALVWMVADRFWYRSLYEAVVALQEALIAGFSAPPEELSLQQIKNILEDQRQTLYTLTTDTLIPQLIEGFSQALQTQLFPPLDELIRQQHQTTASLDNFGQQMTLMAERTATAQVDGLERIAHEFINQMSAQTVEVAERLHESLQQTVTVQERIATLATDLLQHAEPLLARFQETQQLQKQLWEQGHQVHTVLLEGAQYWSTFHTEIRGTLETTEHRLEAFFSAVELRTGTLLKDLQALEETFIAESRSVVHHIQSLNNQWEEHLRLLTDRQAALGEWQKTYEEQISRALGDFPRLVQDLRESSLQVSRETERALTQWQDRVAGDLENLTALWTRQSREFTELAQTLQTQFQTELQQTVAQFQDVGQALGKAAHQLRKEAGEALEQLQTNLTAGLQYTFSQFDKELGQAVTHLSGGVHVLEQAIKSLSQPVNHLKTQGEALTHEVTGINRHLKVLNTALDKRNEVAE

SEQ ID NO: 3741 - protein, 210 aa, Sulfobacillus acidophilus TPY
MYSDLMAGLLLMFILFLAVSVMTYHRLLQEKEARINQLLGVQASIVHSLEHQFHASHLSMTLDPKTGNIQFASDVLFSFNSYQLSPAGEARLKAFIPQYISVLLSPRYRNDISTIVVKGYTDRQGTYLYNLNLSQERALSVVDAIFSPQFGNFPYRNLLKQYITAEGRSYNDPVYIDGRYSARASRRVVFSFVLKNTQIMQAIQSTVKTP

SEQ ID NO: 3742 - protein, 398 aa, Sulfobacillus acidophilus TPY
MSRPHGFRFEPVGLRAVRETLEQEYTTDRTKGQRLGMLFQSRLDTLLRMLGPLDTVVQIRQWAEGLEPVDVYVLLVHFPQLPEPVRPKILAVALVHPDPVAAWVAWDHFVKWPRDPELVKLVSVYVNQHRVTPWWDAVQDGNFRMDLMKAFSRSAPLGPLAKILDDHGIGSGTPLMGLHWGDPLSDELITQILTSSALPEWERHLADSEFPWSEWLWELDQRARERAQAVLSQYLTVFSWMNFDGTLLRRFIQRWGNPETTSGPWTGLSAEARRKLIHWVHQAKLQQFFHQDNARFQFWRGYLERCLHVTVLEKDTPRAAVVLDFGDVVAVEFAQTGNACYVYQKSDYERIRQRMVKSTDLKDSNQALLRLIHSGYWQGTFSYDLAQYIQIPKNRGAR

SEQ ID NO: 3743 - protein, 908 aa, Sulfobacillus acidophilus TPY
MKKPVTGSVITINFVPLLEGLSWQITYQGEALEFPWTEGSISPRALLTDPRWPQLEALYQRWADDELTRTGPGEYLLSWERFLASPESFLALFQLPSPKAPDIRLKARGAITEPRFHIEALVTLPPYAGNLLQWGRRIGPWLETARGPVTLTGASARLLDRLLTAPGPDIDGRTLFLAEVKQLAKDAGARLDPYLEREEYILVDQVTVDPVLDNGTIRLRARYDHPDLPSEALREGTLSRPSTGLGRKRWIARPEARRQFRRLDALPPITGQDVPKFVKNPEAFLPEDVTLDLTAFSERVKGLKIRVYRAQPFLHATETERGWFTLDAGVRLESPEDEPPAEPVLTPDELLSAIQHVGPDESLIPLGNDWIEVPPAARTALQQLSALRNRSTEPVSRERLPYVLDIFTNLEQVEFNPPFHPWIWTDPNEDVEPPAWFQASLHPHQRDGVRFLWHRAAHRRGVLLADEMGLGKTVQVIAWFAILHERSRLRPSLVVAPVALLSNWQEELTKFAPKISWAAHYGPHRARQIDHLPDADVILTSYETVSRDQLILGQVDWNAIVLDEAQLIKNVSTGRAEAVKALKNTYRVALTGTPVENSLSDLWSIVDFVQPGLLGSLREFRQTYETATKNPDPDIQGALTRAISPIYRRRTKKESGLALPPKTAYRFHVPFGPEQQHRYQEVLKAVKARQVAPLPALRQLQNILGHPLAVEGRSAPWNRIPVSSIPKLAKTLEILHTIHGQSEKALIFTPSRTLQAMLQFWIMREFNLTPYVINGDVTARQQLVHHFNQASGFQVMILTPQAGGVGLTLTGANHVIHYSRWWNPAVENQATDRVHRIGQTRPVSVYYPLVVDQDPRITAQGTVDEILDRLLEDKQGLANAVVIPSRHLDLQQELLERALGRGPSDPVI

SEQ ID NO: 3744 - protein, 647 aa, Sulfobacillus acidophilus DSM 10332; identical to SEQ ID NO: 3740

SEQ ID NO: 3745 - protein, 229 aa, Sulfobacillus acidophilus DSM 10332
MNRAPARSYGQRAPFDQWIMYSDLMAGLLLMFILFLAVSVMTYHRLLQEKEARINQLLGVQASIVHSLEHQFHASHLSMTLDPKTGNIQFASDVLFSFNSYQLSPAGEARLKAFIPQYISVLLSPRYRNDISTIVVKGYTDRQGTYLYNLNLSQERALSVVDAIFSPQFGNFPYRNLLKQYITAEGRSYNDPVYIDGRYSARASRRVVFSFVLKNTQIMQAIQSTVKTP

SEQ ID NO: 3746 - protein, 398 aa, Sulfobacillus acidophilus DSM 10332; identical to SEQ ID NO: 3742

SEQ ID NO: 3747 - protein, 908 aa, Sulfobacillus acidophilus DSM 10332; identical to SEQ ID NO: 3743

SEQ ID NO: 3748 - protein, 729 aa, Pectobacterium betavasculorum
MSWLNSLLVTLTSVEPHKVPVTVIGLVSFAVVCFIFFYLIRAIRIVNGLKKYTQSIISVENNAPEAQLEHLKNLFQRPGLRHAWNEFEESLHPQHELSNGEEKILRIRATAPSASFFSEQQLIDIPLNTEFFKHLPGILTGVGIIGTFYGLMIGLNHFDPSTPEQVTSSVNNLLHDVLYAFLGSAFAIFASILVTWLEKLSIAKCYKYLEKFTAALDSLYDSGVGEEYLASLVKSSNESATQARHLKESLVTDLRDMLLQLTENQKVENERLANTLSTTYRESGAQFAEQVSGAIENSLKSPLDKIAGAVQTASGDQSGMVQNMLQDVLTAFMAKLDTTFGQQFTNLNEMMGQTVGAIQTMQNGFATLLQDMRQVSDDSRQGSAQLIEQLLSEMKSGQQAMQAGMNDMLTSLQASVAKIGAEGEGAGERMAHQLEKMFADSEAREKAQAEHMAAFIEAIQNSVQQGQSATMEKMAASVEALGEQLGSLFGQIDKGQQQISANQQANQQSLHEQTQRVMSEVDDQIKQLIETVASQHQGTTETLRLLAEQTNRQIQDMQNGADKMRFAAERFEHAGDRVSEANHLTADVLNKAQSAGSSLSLATSELTSVVADYRNNREAVSKSIAMLELLAANTQSEQTTRNQFIADLKQHGERLQGYNREAQAFMENVSDVLGKGFEDFSEGVSRSLDKTLGKLDVEMAKASNLLAGSVEQIGESVSELDDVLSRVRA

SEQ ID NO: 3749 - protein, 245 aa, Pectobacterium betavasculorum
MFGNAFGVKKRRSDEAEKPFWISYADLMTAMMVLFLVVMVASLSSVTQRIQRVEQGEKTRGQDISKLCERLELHARNVNKTIVVDCHDNRISFGEAGRFDHNRFFLNAEGQKALQDVVPLVLEAADSEEGKKWFKQIVIEGFTDTDGSYLYNLHLSLQRSEWVMCSLLDSRSPLQKGLSAEQQIQIRKLFLAGGVSFNNAKESKEASRRVELRMQFFGLKDKRNGADEVDFPLVVNKEVCQLVMP

SEQ ID NO: 3750 - protein, 560 aa, Pectobacterium betavasculorum
MTPALNSLSQRIAARLSSSQRDDHYLRNDFHTLASVAHDMEKRFDKAESIPLPPQEMRLAALRRLRLAEELTEREWRMVFYGLADNDPSYPDQPILLEDDVFFPEVDNAIKKRLESKALKRKDWAALCSSYFAYQHESPETNLHWCVLRGHIAQGYFVVKAAIRREKSWMKTIEFYHDIFTPQAGGVISRQLLAGESNSLSALEKIAQIPDSSWLWKRIFTVLLAQLDTLDDPQFLEKISWLLGLAAQWVRFRDDIMAATLTRYYHSIYRDQAHSALKQAALACWDNPQLKSQQNKWHQYVAEPVAAMVRGWLAKQDLTHFFELLRGNDDVDQARLHYWLRFANQMGFTRIVMGTDARQDRGSDFVKFRDENKGRLSYLRGGRSFDNAMIMQINDYLFVEFSGTGNAMYAYRIGHAPFNPESRTLDINIHLKDQGRCVLRMPHAPRAEGYNKVRITGWMLKYDDELRKLGIRWMAEDPVKFVDKKTDSPASLSAIKIINPLRDTAIQRLVEGTSCVVSDNRQKGGVLSVQLNTPDDTLERELLRLGFAPVAKEPHRYWIK

SEQ ID NO: 3751 - protein, 1080 aa, Pectobacterium betavasculorum
MLKRLLSKLTGNRQQIERHLKNKYQIEENGLNFPLSLVDDSQLWALASWLEQLAEEDYLISLTDRWLLSWDALYRLLEDEEHASSLPLIGIPEILPLRASLSSRGALSDRDFRVWIAEWVTLPARKPIRFSRTGAILTHENQQHLVSRENWALLQATEQLSAQQDQTPGETTNQLGWAAIRKCAKQAAAKFDDYLEKTHVVKPTSLSLRLRKSTVADTAVIEIEPHFEDQPANWLGSFDKNSQVHDSYRIPGENGELSHVIIPPEVKEVLNSIHSIPGRRVAGSEALSFVRNPYTFLGEDAANVIAPEEHEQALFDARIFFHHFRLIPQQNAENKIEEVTLVLEPVSPVPQPEVTFVFSAPWELEKFIQQLGISVAAQMPAGSWQGYELELSQFTEQQWHDCQTLLTRWQQEIEGKEFSDVLDIGKYGDRVIGIGEFEKISSPWLTKAQSENWLPDDIDFSAFSVEILAGWQPENLHHFGELQESIVQAEAAGETHITTPWNDSELPLDAAKTFSKNWEKQQSAENESQDKVVDKAARAVLKIEQNIEEAAYIKQRRDSLLNARHAEPEIPLSLKEHIRLKDHQREGVAWLQQLFLSSPEKTAGCLLADDMGLGKTLQILSFLVWFIEKFPQEPPSLIVAPVSLLDNWERELDNFFYTAGIPVLKLYGETIKAVKYPKQAIPAHLQFQGIKNLLKPGWQGEAKIILTTYETLRDQEFSLARQPWSIMVCDEAQKIKNPAALITHAANAVQARFKVACTGTPVENTLVDLWSLFDFAQPGLLGALNEFGKHYVRPIENDAGRDTERLERLRALIEPQTLRRTKEEVARDLPQKIEVENCRQLTLSGVQKQLYLSSVANWQQQQALSEGMQQVGAGMLGLLHRLKLICAHPAVVNPEPRFRDNSPKLNWLLKILEEIKHTTEDKVIIFTELRDLQRELQHAIYQKFGFRPVIINGDTSTKSSSQNSRQRLIDDFQSQSGFGVIILSTVAVGFGVNVQKANHVIHFTRCWNPAKEDQATDRAYRIGQTKDVYVYYPTVRDTEITTFEETLDDLLQRRRALARDMLCATPDLSGADFEVLLKGA

SEQ ID NO: 3752 - protein, 641 aa, Sphingobium chungbukense
MGITEWLGHGLIFFFTQVPLIGDAMAAFLAVVLIGTAFAIAHRYKREHHQPLASAIEARVRLIDEVTGGSMADADAARLAFARRFNDIDEQMMDAAHPEVLPLRRTWEEYRETIVDPGADVLKNAGRPEHFFVNIGEHHRGLNWFANIFIAIGLLITFLGIIAALSTLDFSGGVDAMQERLNELMKVAGAKFWASVGGIVASIVLRSYDYRFGKRINDGLSALCDGLEHGMAYLPPQRIAADQLEQLKEQTPALRTFSEQLAAALDGALEKQMAPMISHLGSIQQGIDKITGGGGDAVRDAIVSGAGAEMAGLAEAIGVMTASMATMADRFEKQTGEADKQIEEAVRRFGQASEEMRAAFGDLNKNFGVIADRMREENEQTSAMARQRMDELLSNLGATLDEMKAGLAAAAGKMGEASADAANNAARIGQEALETSFSNFVEKFNATGAPLVASMKGAGDAIASSADRLASAQGAIGDHARAIEQVATRSNDLATAFGTVANDVEAASAPVRQSALAIAEAVKSVETVVSKNAQSSESAREEMRQLATSLNQTASAASSAWSEYRARFEEVDRALGDAIQKISDAAGNHASNLNERVGQIDKALGEGVAQLAGALEPLTTLRDTVEELAGILANQSREATE

SEQ ID NO: 3753 - protein, 242 aa, Sphingobium chungbukense
MDGVVRRRHADEGESYFMSMTDMMVGLLLIFIILLAYFALQLQSKTAELTGANQTRAEILNDLQQSLKDKGLQVEIDTKTGVLRLPDDVLFDKGQWELTDRGQAAISKVASAMVEVLPCFTTSNLCKGARSSHLIDAVFVEGHTDSDAMVGAMNNYGLSVRRAETTFSMLQRNQPDLQEFRNKPEGEARSAPILGLSGYGPDRPIASGHSEVAKKRNRRIDLRFLMTTPSTGLDQDILRQKK

SEQ ID NO: 3754 - protein, 426 aa, Sphingobium chungbukense
MGETEPIIQLKPFLREAAHTGANQLPRYQLNRVLRGAWCDPEFDELGSAAIDRVVGEPRRSSDQAVIDGYLTYFPYDRPIMGKLASVASSAARRHDWAWRDRARRWDMFAPQQGPSNVAVDFVSCDTDGMAQIMRETGLGVNLAASRFGQATFAKTCIATAALSPSQALGAQRNLLALFDRDALAGQLELVVRALLEPWVSAKPDPQHRKAISAFLLDQVGDPRIQRTRWDRIVRSLSEAIGEARAREIAQVFKRWLTEVAMREFFRAIAKTTDRPDQWAQREKFWMAYLDEGLVTDAWPALGIRARNQIEHLIRQSGERPEFGIIQGGPASSSSIIMQIGDLRISEWSDNGSCRFWRDDDPDAPALYAKVYDGGKLRTTSGRADFEFESHVPASPGWENKFAGLIHRRAAIAHPRFGRGRTRNGN

SEQ ID NO: 3755 - protein, 1274 aa, Sphingobium chungbukense
MVTTKFIATQAADGSETITLLRDLPGGLFRRASSENVPLSDWLKAAPQAGQAALALARSFDSEGQIREEADGIVLPANIVARLDEADAFALGLPPATALTLQLNSSGSLAAGSIQVNVKWVRRGGLPVRPDITGARVREGGRVGRIPEPIFSVFEAALAVNATADPDERRAAFAQLRAQLGDEFGSGIEADGFLERVRIAYAANFSLNAKTDHGRFDFDPVLFSRNAAETLDGDLVDEEAASLLTPEDSQRFQRKFKGQEGGRRSYLLSDGTLLFLDPMLGKALDVVRSKQASSSQEKREFLRSPQRILREELKLDAGDDDEAADRLFVETQQFSERVSGIEVWQKPVLPWIKPKPNSWLPEGFGLRIGDPPNARHIELAAGEAESLAETVEKAIDAGSETVAWRGEDIPATPATLQSARALADLEKQVAANVGHSSADETDREALETYFLQVGENFEQLDYARLPRSQAASEPFTVPGLPQGLKSQPKPHQREAFAWLTEAWERKLPGVLLADDMGLGKTFQALMFLLWLQRKSEHPKPVLIVAPTGLLRNWQAEIAQHIEPGLLGQVVEAFGANLRNIRLEPGSDIRGGTSRLDVSEWERAGIVLTTYETMRDYHMSFARLPFAAIVYDEIQKLKNPASQMTRAAKALNGRLQIAMTGTPVENRLQDLWSIADTVYPGFLGSSREFENSYPASDLERLGDLQQRLIERDDELPPFMLRRMKDEILTGLPEKSARKYAVEMPPAQAQAYDLVLARARALRESGEQGAMLKVLHMLRGTSLHPLPPRGITDIDAYIAQSARLQKTFEILEGVKQRGEKALLFCEDLEMQAFLAMAVQERFDLRRRPMCISGSVAGHKRQEMVSAFQTSSAAFDVLILSPKAGGVGLTITAANNVIHLSRWWNPAVEDQATDRAYRIGQTRPVTIHIPMAIHPDEAIGPSSFDQRLDALMDRKRSLSRGLLMPPESERDVEDLLSDVLDGRHAQPEAREINAAASSTDAASREDRRSVSVRDISSGDETPDEDDLSFSADVASSEAPIAEKRDNPEPEILANEPQRSMPPEALPEEQTVSLAESANVEKPEAVSREPARPMRRPILSARTPIEAAEARTPFVQRVVFEQYGPRDWTIFEQYARNAAIARLEVQDPYCCADEQARSRLINFISRFEQLSSQIDAVHIVTFDADSVQTRDPESTHEQRKDLEERWQRIMASVPLHLVQKSRRSGGDLHDRFVKARLENGDSVIWDLGRGIDGVMNARWSCVVNAFHERPAAASSRVH

SEQ ID NO: 3756 - protein, 723 aa, Shewanella frigidimarina
MLDFLPSHWLIPQSLLGVSFWLALLIVFFIALMTIISRTLKSKSRVEQVRQIIKGETVTTLYDNSLSITERASASKDKIVHSLWHEFSESLVQDDRTQRVYNTLDAEHFFNHKTLSAGLTSNRLLAATPSFLTAIGVLGTFMGLTMGLRDIHIESNDIEVLKAGIASMMSGAAFAFVTSVWGVGLSLLLNFIEKIAERSILSNIVKVQQNIDFLYPRLPAEKSLVDISKNTGESSQALQELHERIGDRLQETISGVSDSMQEAFTNALNNVMAPAMQSLVSNASQQTSGVLEQLIGNFTESMQAAGRGQGELMQKSTERMHEAVSSLSEQMNAVLEQSSKQANLMAEQQTGASAQFNQQLESMLSKSEQRQQAMEQKLFTALESQQQSQAEREASHVDSLQSVLGGWLTEQSQTLTKLSDSMSQVQSAMSESNSSYVDQLTNQNEKSTAQQEAFTSGLETSLQSFMQNSSQRQQKLEENFSALLQNQQVEASKRDDLYRDQLQTQLSQWLTQQDKMLTSMTDAVKRTQTHMDSVIAQHKEVVSELKTVAESSATSSQNLSNSSNQIAMLSTNLMKATELFDTRLANMTDTIIGISTQNDALANHVIEQAKLLTGLETSLVATTEQFSETAKLAQHGFSDMKTHQTEFIQGVESSFESLSNTLAKQVSDIEKQTNEWLRSYSSEVNTQVKERMETWNTTTLEFSDQMRRTVSSISDLVDELERN

SEQ ID NO: 3757 - protein, 252 aa, Shewanella frigidimarina
MRIFRTDEASVDEENPYWMSFSDILSGLLILFILASVVLMVELIEAKQELENKKDAFTQELAMLHMAEGVRKTILHEAADLLRQRGIQVSVSENETVLSIPNDILGFDSAAFNINPQFEETALEIGEVLSMVINKDRREQFLDTIFIEGHTDGRNFNGVLGKGNWGLSTFRAISLWELWSQSLPSDLNLAGINNKDGNPLFSVSGYAATRRMVVDELTDEDFGANRRIDIRFTIRRPSSEEYESVRSRLEMP

SEQ ID NO: 3758 - protein, 565 aa, Shewanella frigidimarina
MLFLPPIPELSQFNWERITKQWNSLTLQTKTIADGAGQGEEFKALEQHVSRFVMSGDVAQLNNTLLKRKGVRVLTQLWIDKQEIRNGSLNEETIDYIQAKHPKLGMSSLMNLISLVYRYFDALVDGNIFHKLTAWIKQQIAQRVDERKNSSDTILSVLNSAKWLFDLTAPMALVNLAKQNHLDLNEQLKKLRLNELPQGRFLDICHAQYYLDTLREIPVGEQNDILHELLKHDVATMPFEDGKRIGHIALEIIIDRSAGAPSEVWQNFVLNMAGDPRIANTAKNYREWWKPIGEHRVKAVTSWLAKEDLRLFLGAIEEYANSTGDESLNRMFPARKRFLEGLYEHGFVRNARLMLGYQAASAVKKVLGTSLTTSYIQLKSMPQTSIIYLDCGDFHIVEGSHNFKLWIYMGLPSERVTNYSLTELTHNDLTVRFPNEFRKNLPNGKKLAIQHSPTSWQKNAIDFLTENGVELDLEKLFDKANYRRYVSRYGLPVVRINTQEKNLFEVNLLNALQVYQPIKAKELVGILEKEFNMVIDSQAVNAKLYSMLLGKQVIVDDSYYWHLAD

SEQ ID NO: 3759 - protein, 1007 aa, Shewanella frigidimarina
MSLVSLIKGLLPNNKNSHLAGDKYSLVYDSYGVNFVTDEASYHCLNKGEGGGSQLIAHVVLKMLQERDIAQTIPNGFRVDSEQACLLDPEDADVLGLPPFFSHHFDIDIQGRTTKSSFTLQLFAMLGHQKYPVKRKGPILTFSEQTQFLMTPEQLNAVLAVEEHSSLTPDDHNELNNVLAIARLQQAVKDGLKLDLKQFDKFDLVQPEHITVTANQKADGSLELSPSFGDGSSSEDLQNRFAQLQGEGQVMRVKDRIVLLSDDKKQAIKEVLQNRTIPAHKVAEFIKTPSAFLDASILNLDLGFSIRVYGIGKMVHIPFGQDNDGSNGWFSTNAASEPPERLVRLLECEEDITSFEERFEQAKGQNADSVIVADEIIDIRDEQRVNEALAEVRDNLSNLANRPDELETDELAERKQQMSLLLKDADDHNQDIVNKVAQLDRTINFDRTNLARTPFPHQESGISWMLSLLQSAQLDDHDDMYRVQGALLADDMGLGKTYMTLVMLAEYLSIQKQNNKSQKPILIVAPLSLLENWEQEVAVTFNQSPFRDIKVLQSARDLREFKVQGADRESMQLTSVMNETQADHKSIRYALHVGADAATKRLDMDRRVVITTYQTLRDYQFSLCVIDWGIVVFDEAQNIKNPNTQATRAAKALKADFKLLATGTPVENSLSEFWCLMDTAQPGLLGDWGYFRERWIKPINNANDEEKAEVRLDVGHDLRSSVGQFMLRRTKEDELTGMPKKTIKTGIHKDLADNMLFAPELARNMSGGQLLGYNQIVEDYRKLKAKEVGGVHALAVLQQLRSVSLHPRLNEVFKEPPNTAKEALQKMQESEKLMMLLDTLADIKTRQEKVIIFATTKKLQAVLKICLDKIYGLHIHVINGDSKAMATKKDQLSRKGMITDFESKEGFNIIIMSPVAAGVGLTVVGANHVVHLERHWNPAKEAQATDRVYRIGQKKPVFIHLPCLLHPEYDSFDVNLDKLLAKKTMLSDAVVTPEAVSEHELMSSMGL

SEQ ID NO: 3760 - protein, 851 aa, Enterobacter asburiae
MFSLTSFLDTLTSVNPENVPKYVALVVAVLLVCFIARYAIPSFVISARFKQKARAIQLIAKDKPAQQLEKLDALFSGKFFAHPWSEFKESLHRQFELDEDSGQKRIHSIRSTAPASAWFSEPLLVEIPLYTEAFKHLPGILTGIGIIGTFSGLMIGLHHFDPSTPEQVSASVANLLRDVLYAFLGSAFAIAFSILVTMFEKWRLARCYKNLESLTASIDQLFEGGVGEDYLSQLLSSTKENTTHAKQLKDGLVSDLREMLQNLVDSQVRENQKLAETLSSTYRESGQQIAEQVSGAIETSLKSPLDKIAGVVQTASGDQSHRVQSMLENVLTAFMNKMDNTFGQQFTTMQEMMGRSVEAIQSMQSGFSTLLQDMRQAGDDSRQGSAQLISQLLSEMKSGQQEMQAGMNDMLRSLQESVARIGAEGEGAGERMAQQLEKIFADSEAREKAMAEQMRAFIEAIQSSVQQGQNETMEKMAASVDTLGSHMATLFAQLENGQQQLNQQQNQAQNLLMSNMSKGVEDLTQNLAGVFSQLESGQKQMSQTQEQGQRALYEETQQLLARSEAREQAAAEQQQDFMAALQHTMHSGQDALREKMTSGIDQLGSQLGTLFGQLEEGQKSLSQQQQSAQNALQQEAQRIIGQLESQVQALMQMLREQQSASGDLLQRMAQNTTRHLEEIQTGADKMRVAADRFETAGNRVAEANHLTAEVLNGTQQAGRTLSSASSELGALIADYRNTREVVANAISALETLINSSHDEQTSRSRFVEDLKSYSERLQQYNREAQEFLHNVAEVMGTSFESFTTGVESGLNRSLQEMDTQLTKAAGALSSSVEIIGESVDTLETVLRSRRA

SEQ ID NO: 3761 - protein, 245 aa, Enterobacter asburiae
MFNRAFNSRQRRSDEAEKPFWISYADLMTAMMVLFLVVMVASLSSVTQRIQQAEAGEKSRGHDIARLCERLELQAKNLNKTIHVDCHDNRISFGEAGRFEHNRFSLTSEGQQALQDVVPLVLDAANSDEGKKWFKQIVIEGFTDTDGSYLYNLHLSLQRSEWVMCSLLDSRSALQQRITADQQIQIRKLFLAGGVSFNNAKESKEASRRVELRMQFFGLKDKKQDESMDVVPGISQETCQLGAVQ

SEQ ID NO: 3762 - protein, 597 aa, Enterobacter asburiae
MTSAIEKLKSRLLPYREKSVDPVVGHSFIYLQRTIDQLERKVDARAVQMVPPTEKRRQAISRLRSGDTPQPSEWKMIFFGLNDVAEGDLFDTALIDDAVNFAKISAEIQSKIAQQRLTRREWLALCTSYFGHVSDTPEENPQWLQLRKQIAAGFKLLKESSPRPLSWMTVIDTYGDIFTDNAGFLLGQQLGRGEITDISVLEKVAQIPQTSWLWRKIVNHLVSEIFRQTDDEFEQKINELIALSRQLSRFKDNILAAALTRYYQSIFKHRTHLELKLLALEYWGNPQLTSRNKGWQVHVDNAVLLMVQGWFAKDDLKLFFELLKGNRDVDQARLFYWLRYANQMSYTRIVLGEDAQRSKDTDYVEFRAKNAGRLSRLQGPGSRDNNAMIMRIGNYLFVEFSKVGAMYSYHIDNAPFNPETGILDIDYDLKDKRNNRRKVRLRLPHLSPVTHYSLNRIEGWMSRYDEELRRLGISYVAEDSNLPSATIDISRFNAAQSGGRSLSSPAKSEANESRSNREEQIKIIAASLKAKKVDQNFTTREQQIREVIRSVDCKVMDKRGMGGAIHIQFNEPDHEAAKKLLSLGFKPVLGKFTYWSK

SEQ ID NO: 3763 - protein, 1079 aa, Enterobacter asburiae
MFKKLLGKFINDNKAVTASLVPLYAIKAEGFVFPFSLADTQDNWLITSCLEQLHEEDYVSHWSDCWFISWDDFYRILNNEDYASSLAIFSFPQQRNLTAHLAATGSISDDTFRVFIDKWTLPDDYRPVEITSQGASFSSPEGTFVLSEENWQLLDSLQQLRLQQRQTPGETVNQTGWAKIRRQAKKAGAKLDDYLAKTIVIRPESLQLKLRKSLVADTRVLEIEPVFDEQPAKWLQSFDRTQQVQDRYRVLGDDGELSHVILSPEVKDVLTSVHAITGRRVAGDDALSFVRNPYTWIGEDASQVLDPDVYEQNLQDAGIYFYDFRLEPRVEENMQVESVSLILIPRTEQPVPDETYVFNRPIELAALITELEQKLAAHLPAGVWQGYDLELSRFTQDELQEYQALLEGWQQQAAGLNFSHVLDLNKYSDRVIGIGEFEKISSPYLVKSESENWLPDNLVKEMYEAMFSGWDLDNHQHFHELDTRLEEAKASDAPEVAMPWNDNLLPREVAEVFHEKWKKKIDAETSITANTEPVSRAVLLIEQNIEQALYVKQRRTSLLEAHLAEAELPMILKDSIQLREHQCKGVAWLQQLYLKSPTETTGCLLADDMGLGKTLQILTFLIWHRERFPDAPPSLIVAPVSLLDNWEREVGNFFLREQVSILKLYGNELREKKCAKESIPFELKSKGIKNLLQNDWVGEAQIVLTTYETLRDQEFSLARQPWSIMVCDEAQKIKNPAALITQSAKAIQAQFKVACTGTPVENTLVDLWCLFDFVQPGLLGALNNFGKDFLRPIEQQSDDKVLESLRKLIEPQTLRRTKEEVAKDLPEKIEDKSCKHLSMLPLQRDLYTHSVVSWQNQQEISEGLAQRGAGMLGLLHRLKLICAWPYSVSADLRLRNDAPKVKWLLDTLNNIRQSSDDKVIIFTELRDIQRELQHLVSQHFGFKPFIINGDTSTKSGSDQNRQSLIDNFQSSPGFNVIILSTIAVGFGVNVQKANHVIHFTRCWNPAKEDQATDRAYRIGQQKDVYVYYPTVRDSQLMTFEETLDELLNRRRALARDMLKASTDLTAADFEAVLTRANTN

SEQ ID NO: 3764 - protein, 729 aa, Enterobacter asburiae
MSWLNSFLVTLTSVEPHNVPFSVISIVSLAVACFIFFYLFRAIKIVNSLKKYTQSINSIESSSPEEQLAHLQNLFKRPELKHAWNEFEESLHPQSELEGGEEKIVRIRATAPSSSYFSEQQLVDIPLNTEFFKHLPGILTGVGIIGTFYGLMIGLNHFDPSTPEQVTSSVNNLLHDVLYAFLGSAVAIAASIFVTWLEKLSIAKCYKYLEKFTAAIDKLYVSGVGEEYLASLVKSSNESATQARHLKESLVTDLRDMLLHLAESQKVENERLANTLSNTYRESGAQFADQVSGAIENSLKSPLDKIAGAVQTASGDQSGMVQNMLQDVLTAFMAKLDTTFGQQFTNLNEMMGQTVGAIQTMQSGFSALLQDMRQVSDDSRQGSAQLIEQLLSEMKSGQQAMQAGMNDMLTNLQASVAKIGAEGEGAGERMARQLEKMFADSEAREKAQAEHMSAFIEAIQNSVQQGQSATMEKMAASVEALGEQLGSLFGQIDKGQQQISANQQANQQSLHEQTQRVMSEVDDQIKQLIETVASQHQGTTETLNKLAEQTNRQIQDMQNGADKMRVAAERFEHAGDKVSEANHLTADVLNKAQSAGSSLSLATSELTSVVSDYRNNREAVSKSIAMLELLAANTQSEQTTRSQFITDLKQHAERLQSYNREAQTFMENVSDVLGKGFEDFSEGVSRSLDKTLGKLDVEMAKASNLLAGSVEQIGESVSELDDVLSRVRA

SEQ ID NO: 3765 - protein, 246 aa, Enterobacter asburiae
MFGNAFGVKKRRSDEAEKPFWISYADLMTAMMVLFLVVMVASLSSVTQRIQRAEQGEKVRGQDIARLCERLELHARSVNKTIVVDCHDNRISFGEAGRFDHNRFFLNAEGQKALQDVVPLVLEASDSDEGKKWFKQIVIEGFTDTDGSYLYNLHLSLQRSEWVMCSLLDSRSPLQKSISAEQQIQIRKLFLAGGVSFNNAKESKEASRRVELRMQFFGLKDKHDAEDEVDFPPVVNKEVCQLVMPQ

SEQ ID NO: 3766 - protein, 560 aa, Enterobacter asburiae
MTPALNSLSQRIAAKLSSSQQEEHYLRNDFHALASAGREMEKRFDKAEKIPTPPHEMRLAALRRFRLAEELSEREWRMVFYGLADSDPQHPGQPVLLEDDAFFPEINSAIEKRIETKTLKRRDWAALCSSYFAYRHESPETNPHWCVLRGHIAKGYFVVKAAIRREKSWMKTIEFYHDIFTPQAGGVISQQLLSGESNSLSSLEKIAQIPDSSWLWKRIFTVLLAQLDTLDDPHFLEKISWLLGLAAQWVRFRDDIITATLTRYYHSTYRDQAHSALKQAALEYWDNPQLKSQQNKWHQYVSEPVAAMVRGWLAKQDLMHFFELLRGNGDVDQARLHYWLRFANQMGFTRIVMGPDAWQDRGSDFVKFREENKGRLSQLRGGRNLDNAMIMQINDYLFVEFSGTGNAMYAYRIGHAPFNPESRTLDINIHLKDQGRCALRMPHMPRAEGYNKIRITGWMLKYDDELRKLGIRWMAEEPVKYVDKKALSPASVSDIKIINPLRDTAIQRLVENTSCIVSDNRQKGGVLSVQLKAPDDITERELLRLGFTPVTKEPHRYWIK

SEQ ID NO: 3767 - protein, 1080 aa, Enterobacter asburiae
MLKRLLSKLTGNRQQIERHLKNQYQAEENGLSFPQSLVDDPELWALASWLEQLAEEDYLISLTDRWLLSWESLYRLLEDEEHASSLPLIGVPEVLPLRASLSSQGALSDNDFRVWIAEWATFPMRQSLRLSRTGAIFTHENQQYLLSQENWALLQATEQLSMQQTQAPGETTNQLGWAAIRKCAKQAAAKFDDYLEKTHVIKPTSLSLRLRKATVADTAVIEIEPHFEDQPANWLGSFDKNSQVHDSYRIPGENGELSHVIIPPEVKEVLNSIHSIPGRRVAGSEALSFVRNPYTFLGEDAASVIAPEEHEQALVDAHIFFHHFRLQPQINYENKIESITLVLEPVSPLPQPEVSFLFSAPWELEKFVQAVGISVAAQMPAGSWQGYELELSQFTEQQLHDCQLLLSRWQQEVEGKEFKDVLDLGKYGDRVIGIGEFEKISSPWLTKAQSENWLPDGIDFSEFSVETLDGWQPDNLQHFDELQERITQAEATGETHIISPWNETELPLDAAKTFSKNWEKQQNSAHESEGNVVEKTARAVLKIEQNIEEAVYIKKRRDSLLNARHAEPEIPLSLKEHIRLKDHQREGVAWLQQLFLRSPQETAGCLLADDMGLGKTLQILSFLVWFIEKFRDEPPSLIVAPVSLLDNWERELENFFYTAGVPVLKLYGDTIKAVKYPKQAIPAHLQSQGIKNLLKPGWQGEAKIILTTYETLRDQEFSLARQPWSIMVCDEAQKIKNPAALITHAANAIQARFKVACTGTPVENTLVDIWSLFDFAQPGLLGALNEFGKHYVRPIENDAGRDTGRLESLRALIEPQTLRRTKEEVARDLPQKIEVTSCKQLPLSGPQKQLYLSSIANWQQQQALSEGMQQAGSGMLGLLHRLKLICAHPAVVNPEPRYQEGSPKINWLLITLDEIKHSSKDKVIIFTELRDLQREIQRAVQQRFGFRPVIINGDTSTKSQSQNSRQRLIDDFQSQPGFGVIILSTVAVGFGVNVQKANHVIHFTRCWNPAKEDQATDRAYRIGQTKDVYVYYPTVMDSEITTFEETLDELLQRRRTLARDMLCSTPDLSSADFENILKGT

SEQ ID NO: 3768 - protein, 729 aa, Enterobacter asburiae
MSWLNSFLVTLTSVEPHNVPFSVICIVSLAVACFIFFYLFRAINIVNSLKKYTQSINSIESNSPEEQLAHLQNLFKRPELKHAWNEFEESLHPQSELEGGEEKIVRIRATAPSSSYFSEQQLVDIPLNTEFFKHLPGILTGVGIIGTFYGLMIGLNHFDPSTPEQVTSSVNNLLHDVLYAFLGSAFAIGFSIIITWIEKFYLAKCYKCLEQFTAALDSLYDSGVGEEYLASLVKSSNESATQARHLKESLVTDLRDMLLHLAESQKVENERLANTLSNTYRESGAQFADQVSGAIENSLKSPLDKIAGAVQTASGDQSGMVQNMLQDVLTAFMAKLDTTFGQQFTNLNEMMGQTVGAIQTMQSGFSALLQDMRQVSDDSRQGSAQLIEQLLSEMKSGQQAMQAGMNDMLTSLQASVAKIGAEGEGAGERMARQLEKMFADSEAREKAQAEHMSAFIEAIQNSVQQGQSATMEKMAASVEALGEQLGSLFGQIDKGQQQISANQQANQQSLHEQTQRVMSEVDDQIKQLIETVASQHQGTTETLNKLAEQTNRQIQDMQSGADKMRIAAERFEHAGDKVSEANHLTADVLNKAQSAGSSLSLATSELTSVVSDYRNNREAVSKSIAMLELLAANTQSEQTTRSQFITDLKQHAERLQSYNREAQTFMENVSDVLGKGFEDFSEGVSRSLDKTLGKLDVEMAKASNLLAGSVEQIGESVSELDDVLSRVRA

SEQ ID NO: 3769 - protein, 246 aa, Enterobacter asburiae
MFGNAFGVKKRRSDEAEKPFWISYADLMTAMMVLFLVVMVASLSSVTQRIQRAEQGEKVRGQDIARLCERLELHARSVNKTIVVDCHDNRISFGEAGRFDHNRFFLNAEGQKALQDVVPLVLEASDSDEGKKWFKQIVIEGFTDTDGSYLYNLHLSLQRSEWVMCSLLDSRSPLQKSISAEQQIQIRKLFLAGGVSFNNAKESKEASRRVELRMQFFGLKDKHDAADEVDFPPVVNKEVCQLVMPQ

SEQ ID NO: 3770 - protein, 560 aa, Enterobacter asburiae
MTPALNSLSQRIAAKLSSSQQEEHYLRNDFHALASAGREMEKRFDKAEKIPTPPHEMRLAALRRFRLAEELSEREWRMVFYGLADSDPQHPGQPVLLEDDAFFPEINSAIEKRIETKTLKRRDWAALCSSYFAYRHESPETNPHWCVLRGHIAKGYFVVKAAIRREKSWMKTIEFYHDIFTPQAGGVISQQLLSGESNSLSSLEKIAQIPDSSWLWKRIFTVLLAQLDTLDDPHFLEKISWLLGLAAQWVRFRDDIMTATLTRYYHSTYRDQAHSALKQAALEYWDNPQLKSQQNKWHQYVSEPVAAMVRGWLAKQDLMHFFELLRGNGDVDQARLHYWLRFANQMGFTRIVMGPDAWQDRGSDFVKFREENKGRLSQLRGGRNLDNAMIMQINDYLFVEFSGTGNAMYAYRIGHAPFNPESRTLDINIHLKDQGRCALRMPHMPRAEGYNKVRITGWMLKYDDELRKLGIRWMAEEPVKFIDKKAPSPASVSDIKIINPLRDTAIQRLVENTSCIVSDNRQKGGVLSVQLKAPDDITERELLRLGFTPVTKEPHRYWIK

SEQ ID NO: 3771 - protein, 1079 aa, Enterobacter asburiae
MLKRLLSKLTGNRQQIERHLKNQYQTEENGLSFPQSLVDDPELWALASWLEQLAEEDYLISLTDRWLLSWESLYRLLEDEEHASSLPLIGVPEVLPLRASLSSRGALSDNDFRVWIAEWATFPMRQSLRLSRTGAIFTHENQQYLLSRENWALLQATEQLSMQQTQAPGETTNQLGWAAIRKCAKQAAAKFDNYLEKTHVIKPTSLSLRLRKATVADTAVIEIEPHFEDQPANWLGSFDKNSQVHDSYRIPGENGELSHVIIPPEVKEVLNSIHSIPGRRVAGSEALSFVRNPYTFLGEDAASVIAPEEHEQALVDAHIFFHHFRLQPQINDENKIESITLVLEPVSPLPQPEVSFLFSAPWELEKFVQAVGISVAAQMPAGSWQGYELELSQFTEQQWHDCQSLLSRWQQEVEGKEFNDVLDLGKYGDRVIGIGEFEKISSPWLTKAQSENWLPDGDFSEFSVETLDGWQPDNLQHFDELQERITQAEATGETHIISPWNETELPLDAAKTFSKNWEKQQNAAHESEGNVVEKTARAVLKIEQNIEEAVYIKKRRDSLLNARHAEPEIPLSLKEHIRLKDHQREGVAWLQQLFLRSPQETAGCLLADDMGLGKTLQILSFLVWFIEKFPDEPPSLIVAPVSLLDNWERELDNFFYTAGIPVMKLYGDTIKAVKYPKQAIPAHLQSQGIKNLLKPGWQGEAKIILTTYETLRDQEFSLARQPWSIMVCDEAQKIKNPAALITHAANAIQARFKVACTGTPVENTLVDLWSLFDFAQPGLLGALNEFGKHYVRPIENEAGRDTGRLESLRALIEPQTLRRTKEEVARDLPQKIEVVSCKQLPLSGPQKQLYLSSIANWQQQQALSEGLKQAGSGMLGLLHRLKLICAHPAVVNPEPRYQEGSPKLNWMLKTLDEIKHSSKDKVIIFTELRDLQREIQRAVQQRFGFRPVIINGDTSTKSQSQNNRQRLIDDFQSQPGFGVIILSTVAVGFGVNVQKANHVIHFTRCWNPAKEDQATDRAYRIGQTKDVYVYYPTVMDSEITTFEETLDELLQRRRTLARDMLCSTPDLSSADFENILKGT

SEQ ID NO: 3772 - protein, 729 aa, Enterobacter asburiae; identical to SEQ ID NO: 3764

SEQ ID NO: 3773 - protein, 246 aa, Enterobacter asburiae; identical to SEQ ID NO: 3765

SEQ ID NO: 3774 - protein, 560 aa, Enterobacter asburiae; identical to SEQ ID NO: 3766

SEQ ID NO: 3775 - protein, 1080 aa, Enterobacter asburiae; identical to SEQ ID NO: 3767

SEQ ID NO: 3776 - protein, 851 aa, Enterobacter asburiae
MFSLTSFLDTLTSVNPENVPKYVALVVAVLLVCFIARYAIPSFVISARFKQKARAIQLIAKDKPAQQLEKLDALFSGKFFAHPWSEFKESLHRQFELDEDSGQKRIHSIRSTAPASAWFSEPLLVEIPLYTEAFKHLPGILTGIGIIGTFSGLMIGLHHFDPSTPEQVSASVANLLRDVLYAFLGSAFAIAFSILVTMFEKWRLARCYKNLESLTASIDQLFEGGVGEDYLSQLLSSTKENTTHAKQLKDGLVSDLREMLQNLVDSQVRENQKLAETLSSTYRESGQQIAEQVSGAIETSLKSPLDKIAGVVQTASGDQSHRVQSMLENVLTAFMNKMDNTFGQQFTTMQEMMGRSVEAIQSMQSGFSTLLQDMRQAGDDSRQGSAQLISQLLSEMKSGQQEMQAGMNDMLRSLQESVARIGAEGEGAGERMAQQLEKIFADSEAREKAMAEQMRAFIEAIQSSVQQGQNETMEKMAASVDTLGSHMATLFAQLENGQQQLNQQQNQAQNLLMSNMSKGVEDLTQNLAGVFSQLESGQKQMSQTQEQGQRALYEETQQLLARSEAREQAAAEQQQDFIAALQHTMHSGQDALREKMTSGIDQLGSQLGTLFGQLEEGQKSLSQQQQSAQNALQKEAQRIIGQLESQVQALMQMLREQQSASGDLLQRMAQNTTRHLEEIQTGADKMRVAADRFETAGNRVAEANHLTAEVLNGTQQAGRTLSSASSELGALIADYRNTREVVANAISALETLINSSHDEQTSRSRFVEDLKSYSERLQQYNREAQEFLHNVAEVMGTSFESFTTGVESGLNRSLQEMDTQLTKAAGALSSSVEIIGESVDTLETVLRSRRA

SEQ ID NO: 3777 - protein, 245 aa, Enterobacter asburiae
MFNRSFNSRQRRSDEAEKPFWISYADLMTAMMVLFLVVMVASLSSVTQRIQQAEAGEKSRGHDIARLCERLELQAKNLNKTIHVDCHDNRISFGEAGRFEHNRFSLTSEGQQALQDVVPLVLDAANSDEGKKWFKQIVIEGFTDTDGSYLYNLHLSLQRSEWVMCSLLDSRSALQQRITADQQIQIRKLFLAGGVSFNNAKESKEASRRVELRMQFFGLKDKKQDESMDVVPGISQETCQLGAVQ

SEQ ID NO: 3778 - protein, 597 aa, Enterobacter asburiae
MTSAIEKLKSRLLPYREKSVDPVVGHSFIYLQRTIDQLERKVDARAVQMVPPTEKRRQAISRLRSGDTPQPSEWKMIFFGLNDVAEGDLFDTALIDDAVNFAKISAEIQSKIAQQRLTRREWLALCTSYFGHVSDTPEENPQWLQLRKQIAAGFKLLKESSPRPLSWMTVIDTYGDIFTDNAGFLLGQQLGRGEITDISVLEKVAQIPQTSWLWRKIVNHLVSEIFRQTDDEFEQKINELIALSRQLSRFKDNILAAALTRYYQSIFKHRTHLELKLLALEYWGNPQLTSRNKGWQVHVDNAVLLMVQGWFAKDDLKLFFELLKGNRDVDQARLFYWLRYANQMSYTRIVLGEDAQRSKDTDYVEFRAKNAGRLSRLQGPGSRDNNAMIMRIGNYLFVEFSKVGAMYSYHIDNAPFNPETGILDIDYDLKDKRNNRRKVRLRLPHLSPVTHYSLNRIEGWMSRYDEELRRLGISYVAEDSNQPSATIDISRFNADQSGGRSLSSPAKSEANESRSNREEQIKIIAASLKAKKVDQNFTTREQQIREVIRSVDCKVMDKRGMGGAIHIQFNEPDHEAAKKLLSLGFKPVLGKFTYWSK

SEQ ID NO: 3779 - protein, 1079 aa, Enterobacter asburiae
MFKKLLGKFINDNKAVTASLVPLYAIKAEGFVFPFSLADTQDNWLITSCLEQLHEEDYVSHWSDCWFISWDDFYRILNNEDYASSLAIFSFPQQRNLTAHLAATGSISDDTFRVFIDKWTLPDDYRPVEITSQGASFSSPEGTFVLSEENWQLLDSLQQLRLQQRQTPGETVNQTGWAKIRRQAKKAGAKLDDYLAKTIVIRPESLQLKLRKSLVADTRVLEIEPVFDEQPAKWLQSFDRTQQVQDRYRVLGDDGELSHVILSPEVKDVLTSVHAITGRRVAGDDALSFVRNPYTWIGEDASQVLDPEVYEQNLQDAGIYFYDFRLEPRVEENMQVESVSLILIPRTEQPVPDETYVFNRPIELAALITELEQKLAAHLPAGVWQGYDLELSRFTQDELQEYQALLEGWQQQAAGLNFSHVLDLNKYSDRVIGIGEFEKISSPYLVKSESENWLPDNLVKEMYEAMFSGWDLDNHQHFHELDTRLEEAKASDAPEVAMPWNDNLLPREVAEVFHEKWKKKIDAETSITANTEPVSRAVLLIEQNIEQALYVKQRRTSLLEAHLAEAELPMILKDSIQLREHQCKGVAWLQQLYLKSPTETTGCLLADDMGLGKTLQILTFLIWHRERFPDAPPSLIVAPVSLLDNWEREVGNFFLREQVSILKLYGNELREKKCAKESIPFELKSKGIKNLLQNEWVGEAQIVLTTYETLRDQEFSLARQPWSIMVCDEAQKIKNPAALITQSAKAIQAQFKVACTGTPVENTLVDLWCLFDFVQPGLLGALNNFGKDFLRPIEQQSDDKVLESLRKLIEPQTLRRTKEEVAKDLPEKIEDKSCKHLSMLPLQRDLYTHSVVSWQNQQEISEGLAQRGAGMLGLLHRLKLICAWPYSVSADLRLRNDAPKVKWLLDTLNNIRQSSDDKVIIFTELRDIQRELQHLVSQHFGFKPFIINGDTSTKSGSDQNRQSLIDNFQSSPGFNVIILSTIAVGFGVNVQKANHVIHFTRCWNPAKEDQATDRAYRIGQQKDVYVYYPTVRDSQLMTFEETLDELLNRRRALARDMLKASTDLTAADFEAVLTRANTN

SEQ ID NO: 3780 - protein, 729 aa, Enterobacter asburiae
MSWLNSFLVTLTSVEPHNVPFSVICIVSLAVACFIFFYLFRAINIVNSLKKYTQSINSIESNSPEEQLAHLQNLFKRPELKHAWNEFEESLHPQSELEGGEEKIVRIRATAPSSSYFSEQQLVDIPLNTEFFKHLPGILTGVGIIGTFYGLMIGLNHFDPSTPEQVTSSVNNLLHDVLYAFLGSAVAIAASIFVTWLEKLSIAKCYKYLEKFTAAIDKLYVSGVGEEYLASLVKSSNESATQARHLKESLVTDLRDMLLHLAESQKVENERLANTLSNTYRESGAQFADQVSGAIENSLKSPLDKIAGAVQTASGDQSGMVQNMMQDVLTAFMAKLDTTFGQQFTNLNEMMGQTVGAIQTMQSGFSALLQDMRQVSDDSRQGSAQLIEQLLSEMKSGQQAMQAGMNDMLTNLQASVAKIGAEGEGAGERMARQLEKMFADSEAREKAQAEHMSAFIEAIQNSVQQGQSATMEKMAASVEALGEQLGNLFGQIDKGQQQISANQQANQQSLHEQTQRVMSEVDDQIKQLIETVASQHQGTTETLNKLAEQTNRQIQDMQNGADKMRVAAERFEHAGDKVSEANHLTADVLNKAQSAGSSLSLATSELTSVVSDYRNNREAVSKSIAMLELLAANTQSEQTTRSQFITDLKQHAERLQSYNREAQTFMENVSDVLGKGFEDFSEGVSRSLDKTLGKLDVEMAKASNLLAGSVEQIGESVSELDDVLSRVRA

SEQ ID NO: 3781 - protein, 246 aa, Enterobacter asburiae; identical to SEQ ID NO: 3769

SEQ ID NO: 3782 - protein, 560 aa, Enterobacter asburiae
MTPALNSLSQRIAAKLSSSQQEEHYLRNDFHALASAGREMEKRFDKAEKIPTPPHEMRLAALRRFRLAEELSEREWRMVFYGLADSDPQHPGQPVLLEDDAFFPEINSAIEKRIETKTLKRRDWAALCSSYFAYRHESPETNPHWCVLRGHIAKGYFVVKAAIRREKSWMKTIEFYHDIFTPQAGGVISQQLLSGESNSLSSLEKIAQIPDSSWLWKRIFTVLLAQLDTLDDPHFLEKISWILGLAAQWVRFRDDIMTATLTRYYHSTYRDQAHSALKQAALEYWDNPQLKSQQNKWHQYVSEPVAAMVRGWLAKQDLMHFFELLRGNGDVDQARLHYWLRFANQMGFTRIVMGPDAWHDRGSDFVKFREENKGRLSQLRGGRNLDNAMIMQINDYLFVEFSGTGNAMYAYRIGHAPFNPESRTLDINIHLKDQGRCALRMPHMPRAEGYNKVRITGWMLKYDDELRKLGIRWMAEEPVKFIDKKAPSPASVSDIKIINPLRDTAIQRLVENTPCIVSDNRQKGGVLSVQLKAPDDITERELLRLGFTPVTKEPHRYWIK

SEQ ID NO: 3783 - protein, 1079 aa, Enterobacter asburiae
MLKRLLSKLTGNRQQIERHLKHQYQTEENGLSFPQSLVDDPELWALASWLEQLAEEDYLISLTDRWLLSWESLYRLLEDEEHASSLPLIGVPEVLPLRASLSSRGALSDNNFRVWIAEWATFPMRQSLRLSRTGAIFIHENQQYLLSRENWALLQATEQLSMQQTQAPGETTNQLGWAAIRKCAKQAAAKFDDYLEKTHVIKPTSLSLRLRKATVADTAVIEIEPHFEDQPANWLGSFDKNSQVHDSYRIPGENGELSHVIIPPEVKEVLNSIHSIPGRRVAGSEALSFVRNPYTFLGEDAASVIAPEEHEQALVDAHIFFHHFQLQPQINDENKIENITLVLEPVSPLPQPEVSFLFSAPWELEKFVQAVGISVAAQMPAGSWQGYELELSQFTEQQWHDCQSLLSRWQQEVEGKEFNDVLDLGKYGDRVIGIGEFEKISSPWLTKAQSENWIPDGDFSEFSVEMLDGWQPDNLQHFDELQERITQAEATGETHIISPWNETELPLDAAKTFSKNWEKQQNAAHESEGNVVEKTARAVLKIEQNIEEAVYIKKRRDSLLNARHAEPEIPLSLKEHIRLKDHQREGVAWLQQLFLRSPQETAGCLLADDMGLGKTLQILSFLVWFIEKFPDEPPSLIVAPVSLLDNWERELDNFFYTAGIPVMKLYGDTIKAVKYPKQAIPAHLQSQGIKNLLKPGWQGEAKIILTTYETLRDQEFSLARQPWSIMVCDEAQKIKNPAALITHAANAIQARFKVACTGTPVENTLVDLWSLFDFAQPGLLGALNEFGKHYVRPIENEAGRDTGQLESLRALIEPQTLRRTKEEVARDLPQKIEVVSCKQLPLSGPQKQLYLSSIANWQQQQALSEGMQQAGSGMLGLLHRLKLICAHPAVVNPEPRYQEGSPKLNWMLKTLDEIKHSSKDKVIIFTELRDLQREIQRAVQQRFGFRPVIINGDTSTKSQSQKSRQRLIDDFQSQPGFGVIILSTVAVGFGVNVQKANHVIHFTRCWNPAKEDQATDRAYRIGQTKDVYVYYPTVMDSEITTFEETLDELLQRRRTLARDMLCSTPDLTSADFENILKGT

SEQ ID NO: 3784 - protein, 851 aa, Enterobacter asburiae; identical to SEQ ID NO: 3760

SEQ ID NO: 3785 - protein, 245 aa, Enterobacter asburiae; identical to SEQ ID NO: 3761

SEQ ID NO: 3786 - protein, 597 aa, Enterobacter asburiae
MTSAIEKLKSRLLPYREKSVDPVVGHSFIYLQRTIDQLERKVDARAVQMVPPTEKRRQAISRLRSGDTPQPSEWKMIFFGLNDVAEGDLFDTALIDDAVNFAKISAEIQSKIAQQRLTRREWLALCTSYFGHVSDTPEENPQWLQLRKQIAAGFKLLKESSPRPLSWMTVIDTYGDIFTDNAGFLLGQQLGRGEITDISVLEKVAQIPQTSWLWRKIVNHLVSEIFRQTDDEFEQKINELIALSRQLSRFKDNILAAALTRYYQSIFKHRTHLELKLLALEYWGNPQLTSRNKGWQVHVDNAVLLMVQGWFAKDDLKLFFELLKGNRDVDQARLFYWLRYANQMSYTRIVLGEDAQRSKDTDYVEFRAKNAGRLSRLQGPGSRDNNAMIMRIGNYLFVEFSKVGAMYSYHIDNAPFNPETGILDIDYDLKDKRNNRRKVRLRLPHLSPVTHYSLNRIEGWMSRYDEELRRLGISYVAEDSNQPSATIDISRFNAAQSGGRSLSSPAKSEANESRSNREEQIKIIAASLKAKKVDQNFTTREQQIREVIRSVDCKVMDKRGMGGAIHIQFNEPDHEAAKKLLSLGFKPVLGKFTYWSK

SEQ ID NO: 3787 - protein, 1079 aa, Enterobacter asburiae; identical to SEQ ID NO: 3763

SEQ ID NO: 3788 - protein, 729 aa, Kluyvera intermedia
MSWLNSFLVTLTSVEPHNVPFTVISIVSLAVACFIFFYLFRAIKIVNSLKKYTQSINSIESNSPEEQLAHLQNMFKRPELKHAWNEFEESLHPQSELEGGEEKIVRIRATAPSSSYFSEQQLVDIPLNTEFFKHLPGILTGVGIIGTFYGLMIGLNHFDPSTPEQVTSSVNNLLHDVLYAFLGSAVAIAASIFVTWLEKLSIAKCYKYLEKFTAAIDKLYVSGVGEEYLASLVKSSNESATQARHLKESLVTDLRDMLLHLAESQKVENERLANTLSNTYRESGAQFADQVSGAIENSLKSPLDKIAGAVQTASGDQSGMVQNMLQDVLTAFMAKLDTTFGQRFTNLNDMMGQTVGAIQTMQSGFSALLQDMRQVSDDSRQGSVQLIEQLLSEMKSGQQAMQAGMNDMLNSLQASVAKIGAEGEGAGERMARQLEKMFADSEAREKAQAEHMSAFIEAIQNSVQQGQNATMEKMATSVEALGEQLGSLFGQIDKGQQQISANQQANQQSLHEQTQRVMSEVDDQIKQLIETVASQHQGTTETLNKLAEQTNRQIQDMQNGADKMRVAAERFEHAGDRVSEANHLTADVLNKAQSAGSSLSLATSELSSVVADYRNNREAVSKSIAMLELLAANTQSEQITRSQFITDLKQHGERLQSYNREAQTFMENVSDVLGKGFEDFSEGVSRSLDKTLGKLDVEMAKASNLLAGSVEQIGESVSELDDVLSRVRA

SEQ ID NO: 3789 - protein, 246 aa, Kluyvera intermedia
MFGNAFGVKKRRSDEAEKPFWISYADLMTAMMVLFLVVMVASLSSVTQRIQRAEQGEKVRGQDIARLCERLELHARSVNKTIVVDCHDNRISFGEAGRFDHNRFFLNAEGQKALQDVVPLVLEASDSEEGKKWFKQIVIEGFTDTDGSYLYNLHLSLQRSEWVMCSLLDSRSPLQNSISAEQQIQIRKLFLAGGVSFNNAKESKEASRRVELRMQFFGLKDKRDGAEEVDFPTVVNKEVCQLVMPQ

SEQ ID NO: 3790 - protein, 560 aa, Kluyvera intermedia
MTPALSSLSQRIAAKLSSSQQEDHYLRNDFHALASAGREMEKRFDKAEKIPTPPHEMRLAALRRFRLAEELSEREWRMVFYGLADTDPLYPDRPVLLEDDTYFPHVDSAIKKQIESKSLKRKDWAALCSSYFAYKHESPEINPHWCVLRGHIARGYPVVKAAIRREKSWMKTIEFYHDIFTPQAGGVISQQLLSGESNSLSSLEKIAQIPDSSWLWKRIFTVLLAQLDTLDDPQYLDKISWLLGLAAQWVRFRDDIMTATLTRYYHSTYRDQAHSALKQAALEYWDNPQLKSQQNKWHQYVSEPVAAMVRGWLAKQDLMHFFELLRGNGDVDQARLHYWLRFANQMGFTRIVMGPDAWQDRGSDFVKFREENRGRLSHLRGGRSFDNAMIMQINDYIFVEFSGTGNAMYAYRVGQAPFNPESHSLDINIQLKDKYRNVLRLPHTPRAEGYNKTRITGWMLKYDDELRQLGIRWMAEEPVKFVDKKVTSSAVQVDIKIINPLRDTAIQRLVENTSCIVSDNRQKGGVLSVQLKAPDDSTERELLRLGFTPVTKEPHRYWIK

SEQ ID NO: 3791 - protein, 1080 aa, Kluyvera intermedia
MLKRLLSKLTGSRQQIERHLKNQYLVEEKGLSFQQSLVDDSDLWALASWLEQLAEEDYLISLTDRWLLSWDALYRLLEDEEHSSSLPLIGVPEVLPLRAHLSSRGALSDSDFRVWVAQWTSFPAHQPLRFNRTGAIFTYENQQHLLSQENWALLQAIEQLGTQQTQTPGETTNQLGWAAIRKCAKQAAVKFDDYLEKTHVIKPTSLSLRLRKATVADTAVIEIEPHFEDQPANWLGSFDKNSQVHDSYRIPGENGELSHVIIPPEVKEVLNSIHSIPGRRVAGSEALSFVRNPYTFLGEDAASVIAPEEHEQALFDAHIFFHHFRLQPQINDENKIESITLVLEPVSPLPQPEVSFLFSAPWELEKFVQAVGISVAAQMPAGSWQGYELELSQFTEQQWHDCQSLLLRWQQEVEGKEFSDVLDLGKYSDRVIGIGEFKKISSPWLTKSQSENWLPDDIDFSAFSVETLTGWEPENLQHFDELQERITQAEATGETHIISPWNDNELPLDTAKTFSKNWEKQQNAAQESEDSAVDKTTRAVLKIEQNIEEAVYIKQRRDSLLTARHAEPEIPLSLKEHIRLKDHQREGVAWLQQLFLRSPQETAGCLLADDMGLGKTLQILSFLVWFIEKFPDEPPSLIVAPVSLLDNWERELDNFFYTSGISVMKLYGDTIKAVKYPKQAIPAHLQSQGIKNLLKPGWQGEAKIILTTYETLRDQEFSLARQPWSIMVCDEAQKIKNPAALITHAANAIQARFKVACTGTPVENTLVDLWSLFDFVQPGLLGALNEFGKHYVRPIENEAGRDTGRLESLRALIEPQTLRRTKEEVARDLPQKIEVTSCKQLPLSGPQKQLYLSSIANWQQQQALSEGMQQAGAGMLGLLYRLKLICAHPAIVNPEPRYREGSPKLNWMLKTLDEIKHTSKDKVIIFTELRDLQREIQHAVQQRFGFRPVIINGDTSTKSQSQNSRQRLIDDFQSQPGFGVIILSTVAVGFGVNVQKANHVIHFTRCWNPAKEDQATDRAYRIGQTKDVYVYYPTVMDSEITTFEETLDELLQRRRALARDMLCSAPDLSSADFENILKGT

SEQ ID NO: 3792 - protein, 746 aa, Halothece sp. PCC 7418
MLSAIETNNLFFINTVRIIFIIGFFIEISLLLSYYRQTGKKANQISKNRDLSIFNKGNIRSPLHFVPTLLTAIGILGTFWGISQGLQGIALENINNTDALLNNSTELLAGMKTAFTTSLWGLGGASLFIFILAASETLKRIRRNSLMPKIREQNNRNQPPDPIEQLGKIAKKVEGLVTLNAQNIGEEVANALKPSFQEVRTDLKTQNETLQELSHLKPEIIGEEVATALKPTFEEIRTIRTDLNLQRQTIENQRQELLKTLIAELKTEVIEPVMTRLDESAAMTQEASSAVKELKEELGGISESLATSIQTIQQFQQQTIGQLEAFAQNLQQILEQFKTDTQGVMQQVATNINHAVDQSISGMEAQRTAFAESAEQASTTFRGIREDLEQALTTQAQQQRTMLEEVQTSTQGILQEANNAFVEQSNTLTRVGNEASDMMSNASENLQTSITQAINESISGLETQRHAFAESAEETANTFQQIREELQTTLRTQAQQQRTMLEEVQTSTQDILQEANNAFVEQSNTLTRVGHEASQMMSNASNNLNGTLTNIDSMLQNTRQTVQQELENFRITYQNSLNQFFEQQNNLLEETLGRQREGLEEVVKELQRVFQEDAKNMAEQVIESMEKIQITTKAVSDLANTTGLTSADRLAQIQDIARTLGSESRKINQAYENLIHNFNRGLETWNDNLTEYFEQANETYQQGRQESEQAAAEVCNQLNQTSQGLMGVANYLVSAANDLNDANSKH

SEQ ID NO: 3793 - protein, 236 aa, Halothece sp. PCC 7418
MTNFDPLNSNLELDLEDDDEQNQESGVWLSISDLMSGLLLFFALLFIATQIQLQKYQELIDKLPIAVVEAIEKEIGNEALQVDPKTGDVSLDDQILFTEGSSQLKFEGKQFLNEFIPIYSGVILSNEDFDQLVVRIIIEGHTSSKGSEIANRALSLERALAVTNYIFSDELQFPNKKRFEKKILISGRGEIEANQNIDDPIDRKVTFRFQLRRPDFTGGTDQEEAKIKESIDQESK

SEQ ID NO: 3794 - protein, 507 aa, Halothece sp. PCC 7418
MKFKTIQPLPQFQLQPTALTKLAAEIGTNHKFSSPELPPEVNQYQTRPPRSLDDIFMNLEQGNADNVSLLEWVYCIYYKKDWDQKHSKDQQLSTSRLIWEGAINNDAIKQRLCWRLAYYYDGHRNSLAPSLVETFSTLSDIHDDDLAVQVLCTLQKRDPVLPIAKLSLRKELTPQDLFKTAQLPTNLSIIYDALEYVVTAFSNQSNPTQKEASWLLNCFEIMTVEQEISAVETLLKKVSAEVGGQFNNLVQWLQNHYSPLVTASQWSRLSTEAKSALRQWFGAANYRDFQRLVDIISARFNESNDQEKANKNQLLSRKYFWEQYSDQFERIRILLPQSSVNVVGNQIQQDIDIIKDDGSEETEVCIFDFGNWFVVEFFRGSGSETRIFKRDQYPNIEQELFASSQLSVKRLRAFGGEVHDHKYLWQIDCEKWLRERGILPNAGTTHFKRRNKNNPNQPYRDHYNPNIGLPLHDPNGDKRRTRERDLMRWRRDIEQLEREAKRRFPSY

SEQ ID NO: 3795 - protein, 456 aa, Cyanothece sp. PCC 7424
MNNLLTTSKGIIPIFPSDPLSVVCVWVIIVAAVVLGVIECLAIFNYKKECKSTKEAIDYLLKSKKNEKILKPEGEILLWLFKHLDGQVQNNSFIPKIEQNHFVLLSYPSVLSKPVPRSPVYYAPTLLTALGVLGTFLGIFIGLQGVDLNNMRDAGSLLRASTELLSGMKLAFVTSLWGMSTSILFMFCLAMGGNIRQNHRNNLRKDLSNVAFLNTSERLLSRMNPRTNDEATKDKSASEKSQLTPEAIAEAFKPYLTPVTEDIKAIRELQKVQGSTVELLVQQLRTELIDPVVTQLDQSAQLTAQASDAVRELKDELGEIAQSLAGAVQTIQTFQQDTLIQLQQFATNLQSILAQFRTDTQGVMEQVAVEIKQAVDTSIEGMEAQRTAFKESATQAASTFRGIREDLQQALDTQAQQQEKMLDKVHASTEGILTKAQEAFHNQSETLLTVGKELLV

SEQ ID NO: 3796 - protein, 222 aa, Cyanothece sp. PCC 7424
MANFPDYEIDAEELEEQDSGVWLSIGDLMSSLLMFFALLFITAQVQLLHKQDELQKYKEAIDQLPVKIIKALNETIPNSGIIVHPETGDVSLDNRILFDEGSASLKPEGKQFLQQFIPIYSQHIFSNTLLDQQIIRVIIEGHTSSKGSDSDNMELSLRRALSVSDYIFSDEINFPTKEKFQKKLLASGRGEIDAEQQTDNPSDRKVMFRFEFRRENLTELLK

SEQ ID NO: 3797 - protein, 501 aa, Cyanothece sp. PCC 7424
MKGFYPSFNLPEVFQIQATELLKVHNISSCKANLNAELPKDILSNSELSFRTIHEIVLDIENGQAEQISALEWIYCIYIKESWDKQYPHKSQTTSEMIWRIAQQNSWLKHRLFWRLALFYSDQTQNCLASSLVNSFSSFQTQDEEDKIALKILSFIRQNSPKDIAHLSWQHLLSPDQLLARYQLFPQLPLVGQALSYVTVQFISNIQSVQKEQVDWLLTCFDKMTKSQQKEEVEKLLSKVSSKVGGKYPNLIAWLSKNYGSTTTNSRWSELSSEAKAALRKWIGAVNYQDFKKLINLLISRLPLETWEQNQLKKRKGFWANYSDRFQRLRILLSPSSAEVLKNEFHHEDVSILVQDNSEPTEICIFDFGDRYIVEFFRGSGSETRLFEANDKIEKELFQSSQLSVKRLRSLQGGETHDHVFCWQRYCEEWLRKNGIYPNEGITYFQGLSRSHNQYNSNRGLPFPSEKDQKKRQYQMIGWWQKIAKLEQEARQYCNAQNSEF

SEQ ID NO: 3798 - protein, 667 aa, Cupriavidus basilensis
MNGITKTLGALHPALGSLHGVPLYVFLFVALLTVAFLAGYAYKGTQVWWQIWSTLRAIRALRRDQGAPDPAEVGRAFRWEPLKHLWTEYADTLHELRVAGSGGAALTEVRATVPAEAMFTREVLVDGRLFDDFTRHLPGVLTGLGIIGTFAGLLDGLQQFKPTPIEDAVNGLGPLLLGVQHAFVASGTAIACAMLVVFISRLVLAYFYRLVEHLTHAIDSLYSTGAGEEYLARLVKSSEQNATSTAQLKDALVEDLHKMMTNLVDRQIAAQEASTLALGKHIGESISSAIAEPMRRVGEAMEVTARGNGEQVNSMLETLLTGFMAKLEDTFGGQMRGINEQMQRSMDSMSAVQSSLQGLLADIKQTNEQAANQMSGTLEDAMRKAADNQQLLTDQMREFVQDFRRLVTEEQNKSKQAMDEAVMKVLGEVAVAMDRLEGTRKAAAAEEAGRNDRLANQTNQLVGGLTTQVETLMSVVSEQVAKTQQNVDALGVVSLRAIDGMNQGALTMGSAAQRFETAGGAVSAVFERSTKVADTLSSAAASLQAASTAVQRGFEQYDSTRKTVDTQVAALMGLIETVKREAGVSQELISSIKASAEAMRKSEQEARLHLDQVNAALVKAFSDFGNSLVSQVKSTIAETDRHLAQGTGHLNGVVQELANAVQRMKRV

SEQ ID NO: 3799 - protein, 53 aa, Cupriavidus basilensis
MQELFLVGGYSFNSIKKDKAESRRVEFKVDFWGLDEKQPEASDVLKGKEFGKC

SEQ ID NO: 3800 - protein, 556 aa, Cupriavidus basilensis
MGLHSGEFGKPELVEKPTREAERIFQGFAAAKPRKEDAYAAALSFLRGKELDSWQRDLVASAIGEPIREQDGAMVLGARRFPALLGLYESEAKRGDLWRLTWHGLLYSYFNFDPNLANDDATRSGWEALRSFLERTWPLIDKQAGKNQVPDWVNVLRKESEVLSENPVDKYSHSYLRGETGPTDRLAEDLGIPPSSWFWHALVLGVVRRATAESDAEFRRLIPQLVKLIQGKPGFRDEALEVLLIRYHACKGAPHDERLRDYVCQPTVWKNPKLKAAGIATAWNRVPDPVWQMVLSWVNERNLKDFFDILAARNNADEGRLAFWSKYLKQIAWTRLVFGVDTMALKRSNPGIRELIAREEGAYAQLTSKPEVDAFMMQIGSYLIIEFSKKPNACYVYQADQLPFEPYDRHYEGGTADLAAGYRQDVGCALRIVHREGWGDRAEVELRQLGIRPDRPEAQRVATAGAATTSTAGNRTASSGTASGRATAKFAGPDMAALRALVTRFRGASIDDRRSNASGGRLWVEDPLQRTTLGTELKALGFKWANNRQAWYFPEN

SEQ ID NO: 3801 - protein, 1288 aa, Cupriavidus basilensis
MGLFDFFKRAAAPKADKSTLVTSWTQEGVRIEFARELTESTADGLLEAIHDAGPDDVVLGAYLAQLAAEDRCRLDRKAALIPWGDLYDLQGSAEHVGALKLLGLPPQGPLRPVLDSSGTLSGRDFDLTVTGWTDGAKKVHLERLDGAVATVSGESQMLSAAAWATAAEVSAFRRRDDSDRTQHAQELAWGRIRRIADRAGALYASPYLETTLVLTPDTLRLPLSKHDTPFGRVLTVSPIFEGAPDGWLTAFDGFNSVQPHYDLTRGSGRIRVVISEPVRKVLNVIKREMPNRHVAGAKAEKFVHNPFAFLGDAAHEVLKTDEFEADRAEAGAVAAVFNIVARTEHGRLNAVELVVTEHFGDGSARTDCKACKTVDELDAFLLALKEALERDRERFPWDEYDLTLDAESTVQLEQGLQLAHLWRTQPAERISFDDVYELDGYSGRVEGIGAAKPIYVPVFQKEKKEEGDSGWLPLDLTPMVKVTLQGHEGQVLVPLTKEWVRDFDKQVQEAEEKGLPDVKNSSLPTPIATAQARTLADSFKSMVEAQESVEEEHSSQAKKEKKTRQTLLVKTNFHDVDYFEERRTSLALPDDRQAQLPKCLRPGIELKHHQHYGVAWFQHLVSKAPAGCRGALLADDMGLGKTLQLLSLLAWYYEGNPNAAPSVIFAPKSLLENWANESKKFFNDSFPEVLVLYGDELKERKQPPSLIDNQLRDKGIEDLLKPSWVGPAKVIITTYEVLTSYEFSLAKQPFAFLICDEAQRIKTPGTLVTLAAKKLKADFRIACTGTPVENSLADLWCLFDLVQPGLLGALEEFGKTYRRPIECETEEQKEALQRLQTAIAPQTLRRTKADIAADLPMKYFALKTVAQTKLEFKPALGTEERLEIPLTEHQRILYKGGLKKLQDAAKESNGRKRAQLSFGALHLMKAVCAEPYCLPGTKFLVDRSGREAHLANSPKLDWLLEQLDEVKAAGEKAIVFTELREAQAALYYFLKETFGIRPYIINGDSQGRQGYIDKFSSKPGFDVIILSTLAAGAGLNVTAANHVFHFTRAWNPSKEAQATDRAFRIGQERDVFVYCPTVVADDFNTFEVRLDQLLKRKAGLAGTTLDDGGLTAMLNGAGKDASFRDLVDEGGTGEAIPKRYLTIDDIDRMDGEAFEVFCCLLWNKQGFQATVTPKRGGDGGIDVIALKGREGELLQCKSSKSAEVGWDAVKEVTAGAARYQARFRGTKFRRLAVTNQSFTRGAVTQAEANQVELVTRSRLEELIGAHPVSNHEFDEVLQDLTQFSADVI

SEQ ID NO: 3802 - protein, 656 aa, Nodularia spumigena CCY9414
MAIAVVFVVATIIEVRRVSQYLDKTKAAINFLSHKKGEYVKVSPWLHEHLDPEDINIVRQKGDKNCKFIFIKYPSDLARPVPRTSLRFVTTLCTAIGVLGTFYGIQQGLQGINLSTEDSKQLMTASTELLAGMKTAFSTSLMGLGSGSLFTLVLFGSDLVRQKRRDSLRHKLKAIATLKTTENDNLEVAQALTLVAQNLTGFKQLKAEDIGQAVGKSIAEQFAGLNQLSPQSIGESVKQQISPLLRNIFNEQRRLRELQENQGQRVLEELINDLRIQVLEPIAERLDKSAELTQQASTAVLNLHQDLGGISESLANSILTIQNFQQETLVQLQGFAHNLGDTLNDFKTDTRDVLQQTSQEIHHAVDQSIEGMTAQRSAFEASAVQAADTFRGIREELQTALQERATVEQEMLQATQTGIIQILTQANRTFHEQTNTLKTVGEEASGLMNDAKDNLLATLGNIDERLTATRQTVEDDLTRFRKEYQRNLQMFFEEQNTLLEDTLGKQQEGLSGVVNHLDQVFRDECQRRSELTQEVDASMTKIQESVAQIHKLVIAAGLNDGQRLMQLENLARSIGEQLQIVDNSYSNLNQKFDHSLDAWQSHLERSMQRTVDLQVNFFQQADTSMARVCGDLLRTAEVLVAANDHHQSGKGASNHG

SEQ ID NO: 3803 - protein, 216 aa, Nodularia spumigena CCY9414
MDNFIRDEIDAEMIEDDDSSIYLSIGDLMSGLLMFFALLFITALLQLAQKDVPKRLIIGNVVGEMKSNNINVKVNPETGDISIQESILFAQGSNELKPEGKAFLSRFIPVYSGVIFSKEEFENEISRVVIEGHTSSEGDEKINLELSLMRSLSVYKYIFSDINFPTKTALSQKILAAGRGEVEADHSRDNPGDRKVVFRFQFRNDELKKDIAETSL

SEQ ID NO: 3804 - protein, 464 aa, Nodularia spumigena CCY9414
MNFEFSLPSLPEPPKCIPNQLIQLTSNLPEPKISTPSVDKVLAAIEQGKADQVSQLDWIYCIHAKAQWDKQNTDRSHKTSAAIWKVAISNSWLQHQLLWRLALYSHHQQEQVLAKSLADSFDIFANSNLVSHLLPVQIVRALCSQQPGRELAKIADEQRVNQTELVNIILRDLPVWIPSFSQFIEEITPYFVKMISPNQQQVTWLLSCLNEMSNTQQINAVDYLLTRVYNDVVKNYSFLVDWLRNNYRNGENWYKLSEPARRRLRQWIGGINYGDFQRLVDVILSRIALESFESNRLRSRREFWANYSNRFERLRILLPSTSQIAIGYQIQGDVDLLKDDGSDPTEVCIFDFGDLFVVEFFRGRGSETRLFPNNSQTQQILFGESRLSVKQIRCLGGDKHDHVFLWQVFSPIWLANNGILPNRNTPPSRNPTTGELREREYRLEQWSREIKYLEREAKLYCNVQ

SEQ ID NO: 3805 - protein, 635 aa, Nodularia spumigena CCY9414
MDKTKAAINFLSHKKGEYVKVSPWLHEHLDPEDINIVRQKGDKNCKFIFIKYPSDLARPVPRTSLRFVTTLCTAIGVLGTFYGIQQGLQGINLSTEDSKQLMTASTELLAGMKTAFSTSLMGLGSGSLFTLVLFGSDLVRQKRRDSLRHKLKAIATLKTTENDNLEVAQALTLVAQNLTGFKQLKAEDIGQAVGKSIAEQFAGLNQLSPQSIGESVKQQISPLLRNIFNEQRRLRELQENQGQRVLEELINDLRIQVLEPIAERLDKSAELTQQASTAVLNLHQDLGGISESLANSILTIQNFQQETLVQLQGFAHNLGDTLNDFKTDTRDVLQQTSQEIHHAVDQSIEGMTAQRSAFEASAVQAADTFRGIREELQTALQERATVEQEMLQATQTGIIQILTQANRTFHEQTNTLKTVGEEASGLMNDAKDNLLATLGNIDERLTATRQTVEDDLTRFRKEYQRNLQMFFEEQNTLLEDTLGKQQEGLSGVVNHLDQVFRDECQRRSELTQEVDASMTKIQESVAQIHKLVIAAGLNDGQRLMQLENLARSIGEQLQIVDNSYSNLNQKFDHSLDAWQSHLERSMQRTVDLQVNFFQQADTSMARVCGDLLRTAEVLVAANDHHQSGKGASNHG

SEQ ID NO: 3806 - protein, 216 aa, Nodularia spumigena CCY9414; identical to SEQ ID NO: 3803

SEQ ID NO: 3807 - protein, 464 aa, Nodularia spumigena CCY9414; identical to SEQ ID NO: 3804

SEQ ID NO: 3808 - protein, 731 aa, Pseudomonas balearica DSM 6083
MDYSKWLDLWDKATPEQLIAPVFVFSLVTVLCLWYLLRYFLRSFALSRRLKKLARQVRELKKLQPAKRRSELEQLFHEHTLGHAWQEYAETLHDQFEVHEGERRLLCSRATAGAGHFFTAQTVVETPLGTEFYKHLPGILTGIGIVGTFFGLMLGLQHFDPSTPEQVSSSVDQLLKDVLFAFLGSFFSIFASIGVTLTEKWRLGRCYKHLESLTESIDGLFDSGVGEEYLAELVKSSNESSIQTRQLKDSLVTDLREMLQNLVDTQVRENLKLADSLSASYRDSGQVLAEQIGGAIESSLKSPLEAIAGAVNTASGDQSNQVQSLLTDVLTAFMSKLESTFGQQFNGLHEMLGQSVAAMQSMQQGFNELVGDMRSASEASSQNSAKMIAQLLADMQAGQNSMQAGMNEMLASLQTSIARIGSEGEGAGERMAKQLEKLFADSEARQQAMAENLQIFVESLQQSIGQGQQETMAKIAGSVDVLGEQLGGLFKQLEQNRTQMEQASKTAQVELHRGTREVVGGLEEQVKTLLDAVADQQGAMQDSLKLLGAQTEQHLQSMQQGAEKMRLAAERFDSAGQSVSKAGEATASVLGALQGTSGDLVGASRELTSVVADYRNNREALNQTLAVIQGVVATTQVESAGRSQYLQDLKLQGERLQTLNREVNDYLEQISAVLGKGFNEFSEGVDRSLRLTLGSLDAELHKAMTSLAGGVEGVKESLEDFSDIMERVQRR

SEQ ID NO: 3809 - protein, 245 aa, Pseudomonas balearica DSM 6083; identical to SEQ ID NO: 1290

SEQ ID NO: 3810 - protein, 558 aa, Pseudomonas balearica DSM 6083
MSRALSSLLAAITSGLQRQNERSGDAGFSSMVALKRVNTELSRRFDQVEKALAPPREKRLLALGKFKREQALTSSEWRLVFAGLADDDEVSVPVLEDDHLFDRVHREVAGRIEQRTLSRRDWLALCFSYFAYDEHKPDDNANWRVLRDDIDRGFDAVRQRIGREKEWMRIVAEHRELFGAQAGTRLAEEIFEGRARDLSSLQAIAQVPDGSWLWQRIFAVLLSRIFLLDDETFLKRLPELVALGQLNTRYLNQVLSACLTRYHRSRYREQSSSLLKQAALEHWGSPQMRSKQNAWLQYVEQPVCAMVVAWFAKEDLEHFFTLLKGEAEVDQSRLFYWLRFANQMSYTRIVMGGDAWHDRGSDFVAFREKNKGRLSQLAGGPSHNNAVVMQIGNYFFVEFSGTGNACYVYRADAAPFNPDKPVLGLATELKQQGRALKRMSHSPAPRRPNVVEGWLEKFDDELRTLGIVAQRPASFTQPRLSGDKPAVHTAASAPGTGDSLDVQVRSMLGSVPYKTFDHRSKSGVYQVLLARDDAAAKTALLRLGFKAVKNNALMFWRL

SEQ ID NO: 3811 - protein, 1083 aa, Pseudomonas balearica DSM 6083
MLGRFFSGKDRSQSAKGAAPGAYQIEEQGICYALSLADDDTSWPVAAYLDQLFEEDYASQLSDRWLLPWESIYQLLDDPAHASSLPLLGLPAIAKLQPQLASTGGLSGPDFKVFVQSWRNSETGSPVTFERVGAMARHAATTELLPPAVWELLKAIRDLHAAQQQAPGEVTNQIGWANIRKLAKRAGAVLDGFLDKTVVVRPEHLKLRPRKAVVSGTPIIELDVAFDGQPDNWLASFDGYKQVQDKYRVPGADGSVTHVLIEPDVKAVLESVRALPGRRVAGDEALSLVRNPYSVIGDAAEKVVDADEYEEQLADAGIYFHRFRLEPCLGEDGKHVRSIGLFLEPISAKPLPEVELRFDFAHEFAPFVNELQVKLAAGMPAGFWQGYELELSDFDLAQLAGVNELLRHWQRQEAGQTFEEVLDLASYGDRVVGIGEAERITSPFLVKEATENWLPVDVKELGMDGDLLSQWDPASREDFEEFEHRIDQARVAGDEQVCLPGTETPLPFQVAEQLYEAWSKKLNPVEPKSPVVTEPVAGRAVLHIEHNIEEATYAQRREAALLAGRHANADIPELLRPEVQLRDHQMKGVAWMQHLFGLSPDHVAGCLLADDMGLGKTIQLLTFVVWYLEQNPQGKPVLIVAPVSLLDNWERELQRFFYADVLPVLKLYGGALSAVKFKRDEIPEDLQAKGIKNLLRPGWMGDARIVLTTYETLRDQELSLARQQWAIVICDEAQKIKNPAALITQAAKAIPSRFRIACTGTPVENTLIDLWCLFDFIQPGFLGGLNQFGREYQRPIEAGLERDTAALERLRGLIEPQTLRRTKQDVAKDLPAKIEDQGCRKLLMHTLQRNLYLSEVAQYTQKQQMQEQLEQRESGMLGLLHKLKLVCAHPFSVQPDPRLREHSPKLQWLLSTLDNIARSGSGDKVILFTELRDVQRELQHAIQERFGFKPTVINGDTSTSSQSAQSRQRLIDHFQEQPGFSVIILSTVAVGFGVNVQAANHVIHFTRCWNPAKEDQATDRAYRIGQEKDVYVYYPTVRDARIPTFEATLDELLQKRRALARDMLQGASELQASEFGELLRAQG

SEQ ID NO: 3812 - protein, 627 aa, Chrysosporum ovalisporum
MKENKPSDETSKVLSLTLRNSDDKVSRWLEKHLVRIRENNDGNFHAQVEGGRFVLLQYPTVFTRSIPSSFWRFVPTILIAIGVLGTFYGIQEGLSKIDISNIEQNSSNLLEASVQLLRGMKTAFSTSLMGLGSSSIFTIVLAIAEERKRQRIKEVRHELDKIAFVQSPARVLSRLKFDAIDGAAKSLEETAGTITTSFTKLIEAQGKLSPDAIGRAIGQEMYPIFEGIKEELSLLKDIKHDQGGEILKNLIREQREQLIEPLIAELNRSAKLTQEASQAVHELKKELGGISQSLSQSVNTIQRFQEDTLVKLQDFAGNLQFILNEFRSDTQGVMERVSTEIQSAVNASVQAIDAQKIAFESSASQAANTFRGIREDLQAALHTQAEIERQMLQEFQDRTVAIITTQTESITTVGNEASRLMDAARENLISTLSNIDTMLQNTRITVQEELQQFRLNYQEALQNFFTSQHELLEETLGEQRQGLAQVVNDLQTAFNDEYERRLRLSAGIEETMTRIQETVRIMNNFANAVGLHSGERLEQIIEISRLLGSEATRIEKVYAGMIEQLNQALAMSNQHLVTYLEQASASERVFFTQADEATARISHQLLQAANYLVAAEANRRDQNNHNS

SEQ ID NO: 3813 - protein, 214 aa, Chrysosporum ovalisporum
MNDFTDWEQESQTEEDNSSVLLSIGDMMSGLLMIFALLFITVSLQLSQREKPKQDVIAEVISALNSNDVNVEVNAKNGEVTLAESILFAENSAELTPRGQNFLQKFIPVYSNVIFSKPVYEDVITRVVIEGHTSSKGNYNANLQLSLLRSFSVAEYIFSPKMQFKSKSKLSEKIISSGRGEIEARQEIDYPKDRKVTFQLQFKGEDLSDIFQRK

SEQ ID NO: 3814 - protein, 459 aa, Chrysosporum ovalisporum
MQNLREAEIDSWRSLDDIIQTLQEGNSDQIKRIEWVYCLYNKAEWDQEHPESSQETSELIWTVAMNNLWLKQSLLWLLVLHYSQSSSIISDSLVKTFVSFVKQGGKNDIQIVIIETIRQNNYQQLALVAKENNLTPKELLKNANFPSSIPAVSQALNYVVTIFVNDNQPQWLLRCFQQMSREQQHQQVNKLLTTVNAETGSCFLSIVEWLRQNYGPRTINSQWRELSSQAQSALRQWIGAATWGDFDKLLTALIRHLESRLQLLSPGSREYQEVKYQKNQLDRRKGFWSNYSDRFERLRILVPKSTSWISDELTRDIDILVDDGSNETEVCIFDFGDWFIVEFFRGNGSEILLFNRDRSTRFEEKLFQSQNLSISDIRRLRRLGGEIHDHVYLWQYYAEQWLRGQHGIYPNDGIISFQGLDHPFNIYSRITGLPVPSVDKQSDRERALVHWRRDIERIY

SEQ ID NO: 3815 - protein, 509 aa, Myroides odoratimimus CCUG 10230
MTSEIIAGIIIISAFAIWAGLYISKRTRENNNEHLFDFIPNLFPTLGILFTFVGIAMGLWNFDSNNIEKSIPELMNGLKTAFLVSIFGVFLLVVFSFITNIKKKKLEEGILSDETQAINNLIEVIKELRNDFASTDENGNSIKPGNVFRDIYKESQKQSNALQTFSSDLALTVSAGFEQILNNPTEGVVAELKLVKTEIENLGNKLKDPATDMTQNIVKELQESMGKMMEEFKTSMSGDTKNEMERLARLLGQAGGSLTEFPTKLQNMTDNLNENFRGLQEVVQQISKQTLSQSEESTSQMKQQVEDMSEILRSKVGDLQSGQQTLITEQSKNLQVSENLLSAFNTSIEKMNGLSIEVNSSISKLHQAQTELEKVTFVFRNVSQEINTSSSRFGESQNEFSKYSNQFLENNSNTIIEIQKSLESAKDVSADYAQKFEIIEKGLQDIFGKITIGLKDYQATVSGSLETYLGKYTDALTKTAESLAGASSKQEDILEELTEQLSKLNERRN

SEQ ID NO: 3816 - protein, 238 aa, Myroides odoratimimus CCUG 10230
MSGTKKDSHWIPLADLMTVLMVIFLFMSISYMALIEKRQKEQNQIFKDYEESKVSLYNELNETFKKDFAKWDLKLDNDLSIKFTNPQVLFPTGKSDITQHFQVILSDFLPKYLSVVLQEKYKDKIAEIRIEGHTDTKPIGLTNDPYIDNMKLSQDRGRNVLAFLRSQSFFMNLLPTEKERLQFWLTANGLSYGRTVDKNYKLVFESNQSIDDDKSRRVEFRIVTTSEAIINEALKNIE

SEQ ID NO: 3817 - protein, 475 aa, Myroides odoratimimus CCUG 10230
MATTQDILQFHFSPTTFQQLAQNIIPISLVSLNDHRIDKLHKITEDVGASSFSFSGDNLIPQVFREFKKSINNNDVGFERRELRTLTYSLNYSEQNLTSVFINEDELKYALTLLESNWRDSFLVGLIDCFLKNWETKYSKSLEQLGTFIHQKLDNYSGNRSTLISFKKNKRYFNTKNGDLILGDTISKLNKPIQEATKILGVPESWFDYAYFSKVIVTYYERNKSKISDEIDNLNEALLKHNNSVTNKRLISKIIIQVNKSEFFTVQDSVKKIAFTQIGDPSNASNWTAFDNATEVERREIIEARNILDEWIAKQFIDIFFRVCINDERRKRFWLKVASKNRVSFKVYGPIHTKNILKRDDRIIEYLDGRFQTVPSNRDISAFILYIGNYMLIEFSDAGYAFYAYKISETNKPNLNYRLESVDELRDGSMPMLVYRSGYSINTTNTEGRLTHNDGDLSWEQVFEYWFKNIAGINV

SEQ ID NO: 3818 - protein, 1089 aa, Myroides odoratimimus CCUG 10230
MFRYTQKNNKFSFYFLNNSGNKTSVSDWEKLQSEFLSQIAILTELHDNGLADYTENSCEVECIDILKLNDIDKLILELPNGYPYEILVESDGTLTHNSFKFKYGFFDFAPNGTRLKTNRNSAIIKIEETEYLLSENQYLLCEAIEEFNNLPETEKGNVTNLKKLSELKTLSKESGLTLEQFLSNQELFIPEKIKLDIDFNNGLFEIIPTIEIDNTIGFTNTFDRLPIVRDVYPVSSNNGETTRVVISKNQKAELQKIKTHRKISDRERIQEIIEHPELVFDDEVIDFTVFYSDRVKEIGVYSPKFYPFASPYKSQWIPGIVIKDKVDGEKKIYFKTLEKLNDFIEQKEKAIKENKQNVEWENAEIPIEHAEKFIKTAKKQFESPNKPIKQEKKTDHEVLIIKENAELTEFSKGDELPKNLKHSFYEIPNLNIGISLKEHQKEGVSWLQSLFKGNFAGGLLADDMGLGKTLQLLYFIEWHSQTYDDNKPYLIVAPVSLLENWENEYEKFFSPQNLQLCKLYGGVSLTKENNPIQNQQDAKRLQFKQIILTNYETLRSYQISLGLVNFAIIALDEAQKIKTPGTLITNASKALKADFKIAMTGTPVENTLVDIWCLMDYAVPGLLGNAKDFAKEYQKPLSDENTDIKVLTEQLRNNIGVFIKRRLKSDVAKDLPKKHDNQNSRIKKVMPSVQLDRYKNEIAIANDSELEGVERRNQKLKSLWAVRDISDHPYLLENQILNFTSDDLIKSSSKLQTTVGILTDIQYKKEKVIVFADRRETQKMLQKIVYDIFGIFASIINGDTPTTKKLEGKSKLSRQQTIDRFQSEDGFNVIIMSPIAAGVGLNVTKANHIIHYTRHWNPAKEEQATDRAYRIGQQKDVFVYYPMAIFPEEMKGEDGSRLKSFDEILDTLLNNKKALASNTLFPTEQAEITPDELFGNIFGTKTECKPKPLSMTEIDKLYPNLFEASIASLYKCQGFEVYLTPYSNDKGVDVVALRNGENYLIQAKQTKSLVGNDAIQEICTAKKYYEDRFKEQFKLLTITNNNYSSSATLLAKSNDISLLNRDHLENLVIQNNITIQDINKIESQRMARI

SEQ ID NO: 3819 - protein, 729 aa, Erwinia pyrifoliae DSM 12163
MSWFDSFLAALTSVQPYKVPLTVIGLVILAGILFIVFYLARAVIVVKDLKRHTQAVKSLRGQTIEEHSVQLDSLFQKPQLKHAWSEFKDSLHPQFEVVDGEQKTARIRATAPSASYFSEQQLVDIPLNTELFKHLPGILTGVGIIGTFYGLMIGLHHFDPSTPEQVSSSVNRLLHDVLYAFLGSAFAIFASILITSLEKFYLAKCYKHLEKFTAAIDQRYVSGVGEEYLADLVKSGKESSTQARQLKESLVGDLRNMLLELTASQKKESENLAQTLTTTYRETGQHFAEQVSGAIENSLKSPLDKIAGAVQTASGDQSGMVQNMLKDVLTAFMSKLDSTFGQQFTRLNEMMGQTVGAIEGMQTGFSTLLQDMRQASDESRQGSAQLIGQLLAEMKSGQQAMQSAMNEMLTSLQASVAKIGAEGEGAGERMARQLEKMFAESAAREKAMAEQMTAFIDAIKRSVQQGQSETMEKMADSVSALGGQLSSLFTQLEQGQQQISPGQQASQLELHQQTQSVMSEFDGQVKQLIDTVAQQQEATHATLRQLADSANHQIDNMQQGAEKMRLAAERFEHAGERVSEANHVTAEVLNKTQTAGSSLAMAASELTTVVADYRHNREAVAKSIAMLEAVAANTQAEQTTRSQFIADLKSHAERLQGYNREAQGFMDKVGEVLGQSFDDFSGGVTRSLDQTLGKLDVEMAKASTLLAGAVENMSESINDLDDLLSRTRR

SEQ ID NO: 3820 - protein, 245 aa, Erwinia pyrifoliae DSM 12163
MFGNAFGAKKRRSDEAEKPFWISYADLMTAMMVLFLVVMVASLSSVTQRIQRAEAGEKRRGQDITRLCQRLELRARELNKTIVVDCHDNRISFGEAGRFDHNRFFLNPGGQKALQDVVPLVLEAADSEEGKKWFKQIVIEGFTDTDGSYLYNLHLSLQRSEWVMCSLLDSRSPLQQHINPHQQVQIRKLFLAGGVSFNNARESKEASRRVELRMQFYGLKDKRADDIHDFPAVIDKEVCQLVMPL

SEQ ID NO: 3821 - protein, 566 aa, Erwinia pyrifoliae DSM 12163
MSQALNKLSRRIADSLSRRFSGEQWLHHDFAQLSLAGHAIEQQFEKAEKLPLPPQEKRLEALRRFRLAKELTALEWRMVFYGLADNDPQAPHRPILLEDDESFPRVERKICELIEDKTLKRREWAALCSSYFAYQNDAPDLNRHWCVLRSHISRGYQVVKASVRREKSWMRVVEHYHDIFTAQAGTLIAQQMVNREKTASDTLEKIAQIPESSWLWKRIFTVLLAQIYQDSDDVFLDKISWLLEQAVGWARFRDDIMSACLTRYYQSRYREQPHSQLKQAALDYWQSPQLKSQQNKWHQYVDENVAAMVRSWLAKQDLTHFFELLRGKGDVDQARLFYWLRFANQMGFTRIVMGQDARQDRSGDFVQFRADNKGRLSQLRGGRALDNAMIMQINDYLFVEFSGVGNAMYAYRIGQAPFNPEADQLDITTQLKDRPHELSYILRLPHRPRAEDYNNGRITGWMKKYDDELRRLGITCIAEQTLAAAVKPSPITRNPLQRHHIALLNPVRDRAIQNLINTMSCEVVDNRQRGGVLSVIVEKNQPAIVMQLLKLGFTATNKNPRRYWIK

SEQ ID NO: 3822 - protein, 1081 aa, Erwinia pyrifoliae DSM 12163
MLKRLLSQFTGHRQQVESRLRHQYQMEDSGLSFSFERVTDEQLWALKAWLEQLADEDYLIELADRWLLTWDELYRLLEDEEHASSLALLGVPAILPLRASLSSGGALSDEDFQLYLGEWQASDSGRTVTVSLVRPIFNHDGHPRLLTKADWQLIQGLKQFHARQRSAPGELTNQIGWANVRKLAKQAGAQFDDYLAKTVVVKPASLKLKLRKATIADTAVIEIEPSFEDQPENWLASFDRNAQVNDTYRVPGPDGELSHVIFTPEVKEVLSSVHAIPGRRVAGGEALSFVRNPYTFLGEQAAAVIAPEDHEQALYDAHIFFHHFRLLPRVSEKNAIEDVTLLLEPISTVPQPETSFVFSSPWELERFINELGISVASQMPAGQWQGYELELSQFGEAQWLNCKALLTRWQEESAGKEFSDVLDINKYGDRVIGIGEFEKMASPWLTNAQGENWLPDDIDFPTVSAEVFNGWQQDNPQHLSSLKQRIADAEASGASTVIAPWNDREIPLGSAQALLKAWQKQSQSKNGDKDFAKENVARAVLKIEQNIDEPMYIRQRRISLLEAHQTGPEIPLHLKEDIQLKAHQKKGIAWLQQLFLKSPYETTGCLLADDMGLGKTLQILALLVWNIEQNPDGEPGLIVAPVSLLDNWQRELDNFFYTTGIPVLKLYGDTIGAMKYRQQDIPVHLKAQGIKSLLQPGWRGEAKIVLTTYETLRDQEFSLARQPWSIMVCDEAQKIKNPAALITQAANAVQARFKVACTGTPVENTLVDLWSLFDFVQPGLLGALNEFGKRYVRTIENEDGRHHRALEQLRRLIEPQTLRRTKEEVAGDLPQKIEVAECKALMMSGIQRQLYLSSIGAWQQQQDVAEGMQEAGTGMLGLLHKLKLICAHPFSVNPEPGYREHSPKLNWMLHTLDGIKRSGEDKVIVFTELRDLQRELQHAIYQRFGFRPVIINGDTSTKSNSQNSRQKLIDDFQSQPGFDVIILSTVAVGFGVNVQKANHVIHFTRCWNPAKEDQATDRAYRIGQTKDVYVYYPTVRDSEVTTFEETLDELLNRRRSLARDMLSTSSDLSGADFDVVLQDII

SEQ ID NO: 3823 - protein, 729 aa, Erwinia pyrifoliae Ep1/96; identical to SEQ ID NO: 3819

SEQ ID NO: 3824 - protein, 245 aa, Erwinia pyrifoliae Ep1/96; identical to SEQ ID NO: 3820

SEQ ID NO: 3825 - protein, 566 aa, Erwinia pyrifoliae Ep1/96; identical to SEQ ID NO: 3821

SEQ ID NO: 3826 - protein, 1081 aa, Erwinia pyrifoliae Ep1/96; identical to SEQ ID NO: 3822

SEQ ID NO: 3827 - protein, 586 aa, Thioflavicoccus mobilis 8321
MEWLAVFDGSWLEAIAQFITSPAGIWLACLVIVTAALGWYWLGFKRRIKPLLRDLRSAGRAIEQASGPEEFAAVFHGIDEEILKIALLRDSWREFKATLLYPEPEDEASVVSAVQPPDYYFHRDALLGRKLNLRLYNAIPNLLTGAGILGTFVGLVAGIYLASGGLASEDIAEAKQAMQTLLNGASLAFITSIVGLVSSIAFSIREKHWVHQFDGLLGNWISALESRLRRVTPEGMVREQLLQTRQQTQVLEGFTDQLAFQIAEAFDQRLQAHVTDSIAPALGKLVDGIDALREDRQKTDEAVLEKLLSTFTGELKGAAGTEMDSLAETLQSLNDNLKSQTEDAEKRHRENQDANRQSAERLSELFNQGTTTFQDAVRASVDKMSRSVEAIVEKLAEQQKQATADNTVRLKALSDTFTKAVQGFDETLTKMKEVAAQNDEAAAKVAELVEVLEAAAQDMRGLSDPIQAAAKAFKSTGDNVATQVQTLQTAAATVVNATQQLEASNARTQQSWEAYEKRFKRIDEDLGKAFSVLSDGVQAYTTQVNDMLKQLDKHTGEISAQLAGANEDLRARVEELADAIGRVKRS

SEQ ID NO: 3828 - protein, 283 aa, Thioflavicoccus mobilis 8321
MTRRQASATVSDDDGSGYLISVSDLMAGLLFVFLITLVAFVINFRIATDEQRAAREDALTQKERAEAERDAARTEKARLEAVRDDLTNARQMRDQMLEDIRQRLEERGIRVEIDHDHGVLRLSENAISFESSRATLRKAEQRKLRQIGAVLMEVLPCYAAAGDGICGERTRGKLEAVFIEGHTDNVPLQGGRFDDNWDLSAQRAMYTYRLLAEWEPGLATLRNLLGQPLFSVSGYGDGRPVIDHEQPTADSLNRRIDLRFIMAPPQAGREPAPVRDLRERGVR

SEQ ID NO: 3829 - protein, 425 aa, Thioflavicoccus mobilis 8321
MPRPPDRDLLRAVYTRLERIAAAGGRGMEELSSADLRKAPWVLFQPFGDQPGAAPLAARRGFLASYLTELQSRGQASALATLIYCFVLFYPHALAGFNQLREFIVSHLKLGATSLRIQRWQVCGDKCGLFAADAPLRLAGQLAYSDQSPEAVLDDCCLRGLLATGGLVLAAYRELVVAVRQQLGQNSVPSATVERLLSLSRANDDPQSLRFKTERVALIDGLLLPFAEGQPNPALAERIKDSLLDLFGDPRLTGRQRWNGVDPRARQVMLGWLVTETLEDFFRLLEYAAQSDPIARRHWQARKIFWTRHLNAGAIADAWVALGPLARFEARGMLAGSDASYATLSGVQNNHSAIIMRIGELLITEWSHSGSFRAWTPNAKKSPKLYKADYSRPELVDGAEYVIEHRGNWQARVKHLIYDQTGISA

SEQ ID NO: 3830 - protein, 966 aa, Thioflavicoccus mobilis 8321
MNAKLTWHAEEQGLRFRVSDGAGRAIPESAWGATQVRHAAGPASIAPLLTLLDDAGLTVDPDGSLLVPHALVAAWDKHQIAQLGLPPVAPFHLNIRGQGVLSSPAFRFRHQLQSRGGVPVMGANRQGVILRVGAALYSLPDPLFSLIEGMERYNATPESDMDARFAAWGELQALLPEDAVVDQQLRSMNIARADALTLDVGGGDDFDPVLLEQPELDQAARERGETSVPRDLLPPAAQRNFGQRFRAFPDARRRYALSGNWFVMVPEPLRAVLNVVRQMQDAPPERRRAFIANPYAGIKEQLADQIDPERIEGLFQETPAFLSERVEKLGEWHPKLQAFVPQGMMDWFPADERTEPSGGDDGSRGGGAGGDGEEPTVGVPTSAGVVNVKPWEVPDLVKGIRKARQGGEAIFDWNGQLVPADEETEQAFERIQQAKPEPARPVVPIIKDNLDEVGFKSARRLRPGTPGGLPRVLKSNLFQHQHTGLDWLQQHWVAGTSGALLADDMGLGKTIQTLAFLSWVDEQTADNDTHKPHLIVAPTGLLKNWEAEAEQHLAEPGLGDLFRAYGADLRQLREMSGHERRRYLRDRAHWVLTTYETLRDKISLFVDVPWRVVVFDEAQRIKNPGARVTDMAKSLDAELTLAVTGTPVENSLTDLWCIVDAVQPGLLGAHSDFKSTYAVQADADPNVLQPLQSKLERDTRPPALLRRMKQDHLEGLPEKYVHRAEREMPADQVTAYDAIVAAARTSAGQAGAVLGALQGLRRVSLLPDDTEDDGLTDATVQRSARLQALIDVLDEVAEKSEKALVFLEFLKVQEMLVPYLRQRYRLPRDPLRIHGGTLGAVRKKHVDEFQNGKKGEFDVMILSPKAAGVGLTLTAANHVVHLSRWWNPAVEDQCTDRVYRIGQQSEVHVHLPLAIHPRFREQSFDLNLDRLLERKRSLCTSLFAPPAASEEDLSRLAEESLGSRSA

SEQ ID NO: 3831 - protein, 681 aa, Ruegeria atlantica
MEEITAVGRTIKDLILTIAEYLTEDWTPGFVAGVLLASMVVFLAAWSFRVVRRTRAVSQFQRIFLGQKNADDGAVNFEELSAQIERNSKGRASRSLATAWGEYGETIIQYKGLARNSVRPSYFFNVDDLAFGPGFFRILPNLFVTIGLFFTFLGLIAALNTMTGKAIDDAAISGLLSVASAKFIMSLTGLLCSIVFTVALRVGNGKIEGAVHALSGLIEDNLSFVSQEELAVRQLNIAEEQRDNLRTVGMELVSELTAQLKDGISGPIVESINDKMDEIVTRLQDGLPKALAEEIAGKLEGISKDIGRAGSDGLTDVVEGLSKTLTSNVTGALQDSGRHLSEAALKIGELADRLDDSSGKMGSGMESAIGQMTSAVQDLRNSAVSSADTTKEALNQGADALLSRMNDSLDRISDNTKEGAAAMLSAANEMKSAAEQFGAELKTATETGAATAEATINEASADAASKIQAAGASVTELVEEGRDEVLAPLNEMVNSLKTMTEELGSGAQKMQHMSDSVGRGAGAVSEASDSFKAASNGLLAAAAPIEVSTSKIETATANLDRNVDATAQTVLKAAKQTAEIANETMERARDVLDGKRRGIEDALEGVQAVVREMTGQGERLDDVDEKLGRAFEVYNQKVEEALGSIKTYVSEVQGKFGEGIDQLQAVVDQAEDFAPQTRRAS

SEQ ID NO: 3832 - protein, 372 aa, Ruegeria atlantica
MKHAQIRRSVAEEEESAFVSMTDMTVSVLFIVIILLAFFARFYGNQEPDAVPRSTYEIVKDERDTALSSLERVQAELELVTIEKDRIAAELSDVSRERDELRAEVDRLSEKLLRQDALIRELRDTLREKGQRISDLETKLADALARIAKLETQLEMLRRQMRDPLENYIAQADATRIKVLKEIEARLKVDFPELEVKVNERNGALQFKGEGLFGKGARELLPAKRAVMQRVGTMLNEILPCYTFGDNSSWQEGCNPAFAVIEAIQIEGHTDSEGGELYNLRLSNDRAVSAFSTMTSEAPGLISHLNLREQPVISVAGYGEYRPIASNQTRAGEDENRRIDLRIIMFSPASTEQIDDLKSRLHSAAGGGDETQ

SEQ ID NO: 3833 - protein, 449 aa, Ruegeria atlantica
MRLSEIFAQRVEPTSVVLPAPKRLETAVDRVLKRWPDVFAEPSENDRETLVAELKRRLDDWSWSGAKISFVNQAAVALFDRERRSRADLEHVRKFYYEEAATNRSRTFLGNAVQVYIGSFVKGAVHTRRLSEALTNQIPHLSGRSRKLLKSFPAFFDSNRIAMEVASRMKDAERPFQELKSLGFNKPHAPGLLDHAHLEFLEKLDLRTHTDIEKLFHWLHPDGQLAKQSGASEAIEALLAPWLDEEPQEDVKRFLIDHLTESYGDIRINPGSAWINVSEQAKQVLLRWLTGESMRFLFDVLTDTQDSHMWSERRRFWMDQYDRGNISAAWVAFDPRGHKLARKNLGREKNLPFGRQVSHASDDGNKSLLIMKVGQRIIVEGTYNFKVHIYAKNDPEAPKLYQPKYDCADIRHDRRKRVSSGFVKIGPEERKMHLGDWQGYLRSRYPEMF

SEQ ID NO: 3834 - protein, 1042 aa, Ruegeria atlantica
MEFEFSHDDAKVILRPKSQRTGFLSLFGKNAPVSLNHLDPKERQVAFAIGDLRAIEAEYPGSIVIHDDRVELTHDGAAQVGAKSGQILGLPPLVDLELHTDAEGIVGSEHFRLHYEWQYQGRTVEPKRTGAFLNTARGIQRVPSWMLGAIRIADCFDPNEDEVDHWTALARFRKALVPEEEIGANTEMSNFLSGLKVSLADSFSISPIEKGEYLDFAPVPFATDTLSQSEGDEVIEEAASELDERELSVFQDRFQRSGALPSYKTGDKSYLVVDPSAKVTLEVMEEKKRATPFERAEFVKNPKPAITAAIQEDLEKRGALAGLNDAQVQEAIETATGATFVETREYSERVIGIGKWKRPELGDDWSNGTEWMPEGLSRSVVDRILEKNLKQTESVLEEMKAAAARGDAKIDVDGQAVPVNSSTIKSIESRVEQLRKEQEKTDGSGEDEGNRDQITSATDRDPIVVQTKHNFENIEWRPDRNKRGAFVEKRVPDLISTPLKEHQTKSFEWSLEAWSEGLPGILNADEQGLGKTLQTLSFLTWLKTNMAHRDNKARLPILVVAPTSLLENWEEEVSKHIGGDGLGFIYRLYGNSIAGFKRKSGSGKDTDKGQDTLNFDALHEAIEDGRGDRVWILTTYTTMTNYQHSLAKIPFSCAVFDEIQNIKNPGTLAAASARAIRADFRIGLTGTPIENVSGDLWSIMDQLVPGALGSLREFNDVFGSPNEENMSQLHQLVFKQQDDGNGAPVPPMAIRRVKEEAAKDLPSKTRMLHPRLMPELQATVYDAARLNLAKGGLGARLAMIHHIRTVSVHPNIEGNETGESFVNSSARLEATFEILDRLASKGERALVFIENIKMQYRFVELIKQRYQLPRVDIINGKTPIKQRQVIVNRFQRHLVDDKGFDLLVLGPKAAGTGLTLTAATHVIHLSRWWNPAVEEQCNDRVHRIGQTKPVEIHVAMAIHPGYREGSFDCLLHSLMQRKRKLASSALWPLADSRGDAALLQSGLTEIEINTGGEPLESAMAAMFERDGASLPQAKPDGSLVFS

SEQ ID NO: 3835 - protein, 729 aa, Obesumbacterium proteus
MDWLNSLLVILTSVQPAKVPFVVIVCVTIALVFFAIFYVFRAIKIVSKLKSKAKKISVWETESPAEKLHKLSELFAQSSMKHSWSEFEESLHQQKNLVEGELKLQKVRATAPSAVYFTEQQLIDIPLNTEFFKHLPGILTGIGIIGTFYGLMIGLFHFDPSTPEQVTSSVASLLRDVLYAFLGSFTAIAASIAVTWLEKFSLAKCYKYLEQLTAAIDQLFESGVGEEYLAELVKSSNESATQAKQLKDSLVTDLRDMLQNLVASQIQENEKLAQSLSSTYRDSGQQFAEQVSNAIESSLKSPLDKIAGAVQTASGDQSGQVHNMLEDVLTVFMSKLDNTFGKQFDNMHQMMGQSVGAIESMQTGFSALLQDMRSASEESKQGSAELMAQLLTEMKTGQQAMQSGMNDMLTSLQSSVAKIGTEGENAGERMAQQLEKVFADNEAREKAMADQMKEFIATIQQTSQQGQHETMQKMAASVEQVGEQLSSLFTQLEQGQKQLTTHQQDTQASLHQETQQIVSGFDEQVKSLLNALHAQQEATENALRRMAEQTTAHLQDMHTGADKMRVAAEHFESAGDKVKEANHLTADVLNKTQSAGNELSQASRELSSVVADYRNNRDSVAKSITLLEGIVANAQAELATRSQFLKELKQHNEGLHDYNREAKEFLEHSGQVLANGFNQFADGMKTSLDTTLGALDSNLDSAVKRLGSGIEELGESIESLEEMLSKVSV

SEQ ID NO: 3836 - protein, 247 aa, Obesumbacterium proteus
MFGQYSRARGRRSDEAEKPFWISYADLMTAMMVLFLVVMVASLSSVTQRIQRVEQGEKLRGQDISRLCQRLELHAKSLNKTIVVDCRDNRISFGEAGRFDHNRFFLNADGQKALQDAVPLVLDAANSDEGKKWFKQIVIEGFTDTDGSYLYNLHLSLQRSEWVMCSLLDSRSRLQQQITPLQQEQIRKLFLAGGVSFNNAKESKEASRRVELRMQFFGLKDEHEKPAVDVEDSVVPSIERCQLEMPI

SEQ ID NO: 3837 - protein, 563 aa, Obesumbacterium proteus
MISALSQLSADIAATVKRHVSTSDNKIFGDFPKLKAAEQYLAAKMEKSERTIVPPLDKRLRAIAALRQLKALTRYDWQLIFAGLSDKDPDAAFPILLEDDTLYSRVEQEIQQRIDRKNLKRREWKFLCSSYFGYHSKKPGENNNWCSLRDLLRIGYGVVKSQARKEKSWMKIIDHYGDLFTPEAGSLIADKMILGKFVDFSALENVVQVPDNSWLWYRAFVVLLSKVLELDDEEFKLRLPHLLELARQRERYKNIILRACLTQYYRSSYRNIPHPELKQMALDSWGSPQLRSKQNLWLNHLKDPNTSEKICGMVRSWLAKEDLTHFFQLLKGNGDVDQARLFYWLRFANQMGFTRIVMGQDARNDMHSDFVAFRQKNKGRLSHLLGGASADNAVIMQVGDYLFVEFSRTGNALYVYKSSETPFDPEKNELHLNDELKCGGLKFRHAPTAVGYSDKHLTGWMVAYEDMLRQRGIKYIPTDMQATSHPAQNFKYSSAPTQKNSKTEREQDIQQFLRGLKASISDKRALGGALHVRLSERDPKAIAKLTQLGFKPKHGDPLVFWSN

SEQ ID NO: 3838 - protein, 1082 aa, Obesumbacterium proteus
MLKRLLNKFMSNHLSSEKAMSHQYQIEELGLSFPFSLANDDALWPLIAYMDQLSEEGYVTELSDRWMLTWDELYRLSEDVEHHTSLPLLGVPAVMQLKASLAGRGGLSDADFNIYIQEWQEIASGRTIIFKRTGAVIDCPHGQFLLSKENWLLLSALEHFRCEQKEKAGEVTNQLGWAKIRRLAKNAHAELDNYLTKTIVVKPESLKIKVRKATIHDTSVIEIEPTFEDQPEQWLSSFDNNKQVPDQYRILSSDGSLSHVIISPEVKDVLSSVHSIPGRRVAGDDAISFVRNPYTFIGESAASVVPPEQHEQALQDAHIFFHHFNIEPLLDTESNMIDSVLLTLEPIAAIPQPSIRFSLSKPHEFEQFIQELSIKLASGLPAGIWKGYELELSQFTLEQLQNYQVLLLRWQNESAGVEFDDVLDLSKYGDRVIGIGELEKVTSPFLVKNESENWLPKELGETLFSEDFFDEFDQRSAELLSELDERIKLAEQQQELSVNMPWNEQSLPIDDAKSFLKDWRKKVESELSSDDKETNLQDKRAVLQIEQNIEYASYIKHRREALLNVRGAEPVLPVLLKKHIQLREHQRQGVAWLQQLYLKSPDETSGCLLADDMGLGKTLQILTFLMWYIEKNPAGLPTMIVAPVSLLDNWERELDNFFYVAGVEVLKLYGDTVKSFKFHKDEIPPELKAQGIKNLFRPGWVGNAQIVLTTYETLRDQEFSIARQKWSIMVCDEAQKIKNPAALITHAANAVQAQFKVACTGTPVENTLVDLWSLFDFVQPGLLGALNDFGQRFLRPIEGAKERDNAALELLRQLIEPQTLRRTKDDVAKDLPQKLEDLACKNLTMIPLQRDLYISSIVSYQSKQQMQDELEVAGMGMLGLLHRLKLICAHPYSVKPDSPLRNYSPKLKWMMQKLEDIQKNSDDKVIIFTELRDIQRELQHAIQQRFGFKPYVINGDTSTKSSSANSRQKLIDLFQEQQGFGVIILSTVAVGFGVNVQKANHVIHFTRCWNPAKEDQATDRVYRIGQTKDVYVYYPTVRDSAMPTFEETLDELLQKRRMLARDMLCAKGELQSEDFNQILSPN

SEQ ID NO: 3839 - protein, 572 aa, Serratia plymuthica S13
MIDDQDGTLVVRNAVRPSQFFNLDDLHFTQGFWRIVPGLFVTVGLSLTFLGLISALNSMSSSLDDGGSAALEGLLTIASAKFIMSLTGLCCSIVFTVSLRRGTSRLEKAVHSLNSLIEKRLTFISLEDLSIRQLKATIESREHFRKLGLEMVAEIGRPLREDLPRAIAESISTAITPVIEQVSRLGNDGVGEMVQNLSSRFSEDVGRALAQASERISLAGDQIKFLAERMDQSSGKMGNEMESAIGRLGQAVEMLRDGMQQTADMATSALNEGAENLLATMNSTLQGIKDNTGEGARAMGEAAADMKAAALGIRTELETAAKQGAEAAQARMSESASQASDAIGQAATQVLGAFGNTVGEITKATEAMTQKTSSELLSPLSAIAEKLEGVMGMLTETSTVLRRASEGIKEGAVASENASGSFRTSAQSLTSAADPIRAMMERIEVSTRQLRESSENSLSAIAHAAKTNAEQSAMTLSAAQETLGGQHRAVESTLTNLQSLIAALHGQGERLDGIDEKLGKAFDSYQQQVATSVETLFDHVKTMQKELMPALDTMQNIVDQAENFAPKQGRMS

SEQ ID NO: 3840 - protein, 263 aa, Serratia plymuthica S13
MTVSFLFIVMVLLAFFASRYNDKNTVPRDEYEQAVQTRDKTIVDLRAEIALLKQVDPLEQYMSQAADARLNLLYQLRNHLKKSFPELPVDVIPEEGTLRFQGEGLFTSNSYTLSEDKRRIVEALAKTLDSLLPCYTFSQNVGWNKSCNPSFAIIEAVQIEGHTDSKGEDVYNLNLSTNRAITTFTSMLTAAPDLAAHFNMRRQSVLSVAGYGKMRPVKPNDTPQNMAMNRRIDLRIIMHTPANAAEIEDIRKRLIEPLKKSAL

SEQ ID NO: 3841 - protein, 443 aa, Serratia plymuthica S13
MKLSDVFQKSVALFKPVIAISKSLTVKIQAIHERWPDVVKEIAERDREKVLRKLLGYVELWEWDDVKMSFICSGAPIVFDKEFRTQDDFAPLQEFYLRETIVTDSSSFISAMVSAYIRSYEPGSVHTTKIKNCLDIASEHMSDKWKDVVEQLPEFFDANQAHQALAEKMVAMDSPWKELKRFGITRPHDPGLMSHAHQAYITLLTPQLHERAAIERLFAWLKPNGRNSALMNGAAEAINALLSHWLHKQPDEELSRYLTETLVAFYEDPRLSRGGVWGSVDEACRNLIINWLTRENILFFLDVVSKVEDSHMWEPRRKFWLGLYNEGKITAAWVAFSDMASRKAKEIKSSMRDSSTLNFGNQTAGGYRDNTSLLILKIGKCIVIEGSHSYKVHIFRSDDKKAPTLFQEKYNAGLIRTIPDVARIAHLGYSWTDKVREQIEYLS

SEQ ID NO: 3842 - protein, 1042 aa, Serratia plymuthica S13
MTFTFNHDEEAIVLNIAEEKQSFIHRLFKRQQSATISGLTVDDRALTFAIADLKALAEEFAEPLHINDNTIAMSHQLAGRLDSKTAQILGLPPLVDLTLKTDIEGSLGSDTFRLQHEWLRNGVRQIPRRTGSILATSQGPRRLPLWMMEAVEIAENFTPGGGEASDWESLARFRQALDPGIQMGHEINAVRVSLTDFMQGLEVHIADRFSISTSSNGADDFEIIPFSGKNVEELENSGEAVSEAAGELSEQTLHRFQQRLRTQGGLSAYRVGEGNYLVIDRSARPILDVMVEKQKSSPEERRAFIENPRPAITSAVEKYLRQSGKLDGLDDVGEEEAIEAAAGPAFVETVEYSERVKGILHYRKGVVSTTMTGETVWLPEVIPDALTKIIDAMDSQALASVCDQMRNAIDASQDEVEVTSHPVKATEDTLRALEKRLADLKEIEGSKETTEIEDTSAVNDLPPATVILDTKDNFEELFWQPVLKERPIFIDEQLPAGVKTALRPHQLDSFSLQLSSWKSGMPGILNADEQGLGKTLQTIAFLRWLKENNNVSTASNKNRGPILIVAPTSLLENWNAEVRQHTDSEGLGHLLRLYGSSLSQYKDFDAKGVETKDGNTLLNFRQLHKAIMEGKGHRFWILTTYTTLTNYQHSFAKLHFSAVVFDEIQAVKNPDSLRARAARAVNADYRIGLTGTPIENTTTDLWAVMDQLAPGSLDTLRNFNSLYSEPDEQNMLQLYQQVFEPRNQLPPLAFRRLKEDAAKELPAKTRFLHPRLMPEGQAIAYETARLKLSQGGPGAALKMLQHIRGVSVHPAMEMSGDSQSFIDASARLNACFEILHRIRAKGERVLVFIEHRKMQFRFMELVRQKFGLEHINHINGDTPIQKRQAIVRRFQHHLEQDGGFDLLVLGPKAAGTGLTLTAATHVIHLSRWWNPAVEEQCNDRVHRIGQQHPVQIHMPMAIHAGYQEHSFDCLLQGLMSRKRNLARAALWPMGDSAGDISQLQAALRKDKSEASGDILDASIRMMFERDAEADGSKMDDGSYRIS

SEQ ID NO: 3843 - protein, 680 aa, Sulfitobacter mediterraneus KCTC 32188
MEFFADIGTSMSRFIFWGSSFLTKEQAPGLVSIGILIWLLLSVLVVGISAHRKLMSLRWLEGQVRAAKDEFDFATQVNKISQEVKKVRARTGYTHITAAWDEFRETMIEDKSAGQPVLRNSVRPSSFFNLEDLHFGPGFSRYMPGLFVTVGLFLTFLGLISALQQITGLSDASPEEMRASLDGLLGAASAKFIMSLTGLLASIIFTIVLRSLTGRVERRIHTLCAELESRLSFISLEGVAMEQLEIARGQKDSFLEIGTTLVAELGSSLKKEIPESISSSISTAMAPLLDKVGKAGADGVGQMVTDLSSRFSDDVGRALSDASAQLSAAGDKIASLSDRMDRSSGQMGEEMETSVAKLARAAEDLSAGLASAAQTTDGTLNAGAEKLLGIMNETLEGIRRNTAEGADALKEAAADMRAAAGTFREELDAAAASGSEAVRSRMETAGVEVEGAISEAGRGMVDLVTRSGHDLLSASGEFRESIQADLLEPITLVVGQLDEMADRLKDGSVQIATAAGHIKSGGDATRSAAETLTTASRDLQVAAGPVRSSVERIETATTGLAKSTANAAETVTRSSRETAENAARVLDAAKAALSAEQKLIETSLTKLGEGLDHMERQREQIDDMDDKLGAAFNQFASHVRTSLDTFAEHVRKMNGELAPALDTMREIVDQAEKFRPEQRR

SEQ ID NO: 3844 - protein, 367 aa, Sulfitobacter mediterraneus KCTC 32188
MRRLERNRTRAEEEESVFVTMTDMTISFLLIIMILLAFFATQLNDDESVPLTAYERVRQERDELRVENQDLRASVKALEAELARVTSELETVTAERDRLLSELDQLRDENEALRARVAELEEENEHLRSRIDQLVEEIERLREEIKRLRDKIERLQVVNPLEAYLSQAIDQRREILVELRDRLLIEFPELQVVISPEQDALRFQGEGLFRSGSPQLEPRQRAIVETMGRLLDEILVCFTLGERAERGPDCESGNALIEAVQIEGHTDSDRGRIDNVTLSTRRANETFFAIREEVAGILAHRNLRDQPVMSVSGYGEMRPIETNETTEGKAANRRIDLRIIMYAPSTVEEVEEVGRRLDALRAAGGSE

SEQ ID NO: 3845 - protein, 738 aa, Sulfitobacter mediterraneus KCTC 32188
MDALEKAGQLSALSVPELRYLQAAADRVRERWPDVQVARTEKEREALAQKLRDRVERSDWEETRLSFVVAAASAVFDAERRERPDLARTRDFLYAEIDLSTSETFLSGLLRAYLDSYVPKGTHTTALATALGTAARRMSTTGRLLLEAIPELMDPVSGPERLAARMSKMSAPYTELLGLGVRNPHGGGFMDFAHRSLTSIVQPHLSERDLIDWYIRWLRPPGKDVGRNTGAELAIEALIYPWLEKTPEDKLRSYLVETLIELYGDPRIKSGGVWGGIDERYMAIVHRWLTREDMRFFTGVVDATQKDAMWPPRRDFWLKLYDEGKIDAAWAALSSQAFEYARQHLMRQDAKNAHTRVGYQQARQNTSLLIMKIGNKIMVDGCHSYRTHVFDIADPMAPKLFEEGYNCDQIMRASDRRASGASKSHSSIPSWSRWVRDMINADVPWSQQTRPYTKVFRPRTPTRRTTPSRHTSTPRHTDLQPSRREIGASTSGQDIFSSTGATRPSSATGLSNPTSRPAAPPARVAAAQRVQPETSQPVQTDSGDAASLKQVRFPSLTDRMIAYGPAAAAAVLAYLEAPEKGRTRPALSPKSREGLAWVRAVKGEPPLRLRNALEHLLLNLKTSGVDLDDLFVSFAAPPPISSQPTRSKTVPKKEVAESGGQKFPQLPDNAKGRLDLLRAHADALEDLGMWKRTFDQRKPLAVAVRKLREGSPDLRPKEVAELQMLYEELRRGGKGGQK

SEQ ID NO: 3846 - protein, 1032 aa, Sulfitobacter mediterraneus KCTC 32188
MIQLTYDQDWVTLEFRSRQSLLDRLLSRGTVPDFDHDKRLSFALADLRATAEEAGDQVEIGSDRIQLSHRTLSALSSETADALGLPPLVDLTLRTDVMGQIGSPDFRLTHDWVRAGRKEIAHRTGAILETAGDGADGLRRLPRWMLDALEVADRFRAGSDLEEHWEALARFRRALEPGVRMYRADAEARLGMTDFLSGLEVTLTDRFSISPQGEDQFAIIPFLGERVEAAERDGEQISEAEAELQEGWLRAFQDKAFARGARPAYKLGGQSYLVVDPAATPVLKIMTDMQRADPVTRAAFVRNPRQKVTEAITDHLRSKGKLDGLSPAQEQELIEQTAEPAFVETREYSERVIGLTVYEKPALEITGSGTTWLPEAFTGAAAEIIEAMAPDQVERLIQQVDAAIANGQPSVNVDGAEIPATQTSRAALEQRLEAIRKREEPENKPVIGEEIDPRIGPIILDTADNLEDLTWAAKISPRTRLASDALPEVVKSALKGHQTESFLWKLEAWAAGLPGILNADEQGLGKTLQAIAFLAWMKENMSRSEAGRAGPVLVVAPTSLLVNWEEEVDKHLRAPGLGNVVRLYGSALGGKKRPGQQGIETDCGSTLLDLRDLEEAIDEGRGHRYWVLTTYTTLTNYQHSLAKIPFSTAVFDEIQAVKNPVSLRAKAALAVNADFRVGLTGTPIENSTVDLWAIMEQLTPGRFGSLKAFREKFGEPAEGNMRELYSLMFEPQSGLPPVALRRLKEDVARDLPEKSRRLHPRLMPEAQAAAYETARGKLASGTRGGALKMLHHIRSVSVHPDASSPTEDETYISMSARLLATMDILRGVQDRGERALVFIEHVKMQHRFIELTKREFGLPRVDLINGSTPIPRRQEIVNRFQRHLARDEGFDLLVLGPKAAGTGLTLTAATHVIHLSRWWNPAVEEQCNDRVHRIGQSKPVTVHVPMAIHPGYQHNSFDCLLHSLMARKRRLATSALWPMGDTEEDASRLQQMLSDGGATRVEDPVTAAMAMMFKRDDTPMGPKNLDGSISYL

SEQ ID NO: 3847 - protein, 651 aa, Aminobacter aminovorans
MRELLITTARFVLFWAIPVAFVFATELLLPQVNYGLAYDTIVAAVGGNIEGVSQPEFAYALAGILFIFAIGLAAAFLLLHVLPVILALSRAQRLVRAAGGNSRNRGEVRKTFASGFELLRQRLARRWLIGHAWIEFEETLFDIDSPNAIGNTVRPQVFFNASVARERLSGLKMMNAVPGYFVGVGLLLTFVGLVLALYKAGTAAAAGDANVMAAEMGKLLQIATFKFSTSIAGLGASIILSIVFRWFFVLIESAFDRLNAALERGLLYHAPQSIAMEMNRTMQDQLVQLKDITQGDFFARMGNEIAPRLNAAISEAMEPVTERIGSAVDSLSKTSQSGVETMMGSFVSSLQNGAGTEMRELAATLKQLQLAMAEMQSNVRGSGDDFAAKLSEAADNLNRMVERSGQSFETSSAQSRDALASVVETLRQTMEKANADMDAALGQAASGASAKLEAAMGNVMGKLDEQIIGVGASFAALSKSMTAIEGALASQRLALEGASDEARKTAHAFAESAGSVRTATAPLTKAGEKFANATEQLATSVATTLETLNAAKDEIATLAENLDATNTTTNEFWSGFSHKFDEVDTALAHAVKTLSESVSDQEQRLRDHVRQVDQGLTEAIQKMSPMLSSISDSAESIADSLEKTRTMEAAE

SEQ ID NO: 3848 - protein, 302 aa, Aminobacter aminovorans
MIAAETDESAGSHAEEDENYFVSMTDMMVGILFIFIIMLMVFALNFQKQTDQTETLTKQQREQIEKAQELARQIAVLQVRIDAAVSEIRRTDNARNELLEEIQDRLEAAGLKVTIDQNTGVLRLDEDAVRFKSDSSALDAIAATNVDKVSQVLLDVLPAYTACRRERGCTLPSSGYRLETVFIEGHTDKNGGPELNWPLSTARAVNTYRRMVDVSSDLRTLMNSHKREVLSVSGYADTRPATDRDDDNRRIDLRFVMEADREERLSEVANLLNQMKGQVEALQDSARAGLPDPEKPTPNGAP

SEQ ID NO: 3849 - protein, 461 aa, Aminobacter aminovorans
MSALLKEAINELVIRHGPSTTPVIEPAIVRLARKLPEGKGDLRGAKNYEEIAVRLKIALGRGERLSKAQARDGAWCLWETKVAIAAEPDLLDPFLAQLRALKHKASSRALAFSYLISFHAGGPGFAAVAEALRDLASVMGEPFEELHRTLQIFNEDQGPHLIGDAAFAERKSPAVILEEHGLRLQQVLAGGYVEPCARRVLQRAAEDQRLPALERLEFIQLVAVKSGTQKLNFPTHKDLVANALLRPHSGREVNKTIKDRTLDFLIALDGLGDPRTKSGNWVNIPEARDVAISWLTEQALRQFLDVVEEVNPNVNWRYRRKFWEAMHARGIISGAWVVLDGNGINEAYRRFGRNVRFGRFSSSSSGVQAGHAVLLLRIGAGLCVEWSFSGKCRFWADAQRSGAPQLYEQYYDAGELKTGERYAPIEEIIHLPHTGLNAWQHKAARRIASMTAERFNSRDYM

SEQ ID NO: 3850 - protein, 1000 aa, Aminobacter aminovorans
MKASFTHEVQPDGVLLKLQRRRLLGWQAVPVKDWHLIGGKQGAAARFLLPGVEAGESLEQAGGVLLPHSLVASLPATVAEAAGLPPLSTLSITLAFERIMTDANARIRASWYDQDENRIRIERTGALTRWGALDGRLSRPLYELAEAIDGYNRTEGRDAEARIAAWGFVQAALKRTTNDDFRSGDDYLTSLTVYQAGAVALDVVETAGGPDFFPVVMGREKAPTLEDDAAAPGEDSEAPPAQRDLVSDALLPRPMQQRFSRELFAGELKSRDAYVLDRNVFLVLDPSLKTALDVIRRKRAAPKAERIAFLKNPRAEIAQALGDESGETALSLLVETWQYSERVLGLGVWEPPAIPWLKTKSGQWLPERFPCRIGNEVVELDHASFQKLKTEVARATANNETQITVEGQQFSIADVQAAFVQLGLDPSGNGIDEPPTPGYQAEPAQAEPDPVPQPSGSVDDRLVIRQNIDGKDFTVSYSPRAIAIDPTFPSAPLVTTQPKPHQIIGFEWLVASYRAGWPGVLLADDMGLGKTFQALAFLAWVRRNRHKAGLDRGAQNKPVLIVAPTALLRNWIDEAERHLGPGALGERVDAFGSALRHLKGTKDEHWTPETAIHVDELRKADWVLTTYETLADNHRAFARVTFSVAVFDEAQKIKSPGAINTQSAKSMNAEFVLGLTGTPIENRLADLWCIMDRVVPGYLGDLQEFVSTYELGGNEELQQLKAKLDKPPEECSAPPVLLRRMKTEILEGLPTRQFKTKRVEMPVEQAQAYSAAVHQAQAGGATTGDMLRAIHTFRGVSLHPGGARNCDPLDKASVGRWFAQSARMLHAVETLEGLNRLREKALVFIEDLEIQALFASAISTHLDLERQPAIINGGVPGERRLEIVERFQSSQAPFDLLVLSPKAAGVGLTITAANHVIHLSRWWNPAVEDQCNDRCYRIGQQKPVTVHVPIAVHPHFGDASFDVRLDALLEHKRQLSRHMLMPPVADGDVQQLFGQTVKSA

SEQ ID NO: 3851 - protein, 696 aa, Shewanella sp. ANA-3
MATERQIELSWLLPDFSHLSFHPQTGTALSSLFVAITLTVTLLFIAYLLYKSIDVVLKINWLQKALEPLERKDVAQKKEVLYQLAKSKSKGKSKGIGFLWMEFDETLVEVRKGDQIEIRNTLDAGHFFNTYTLANSVTENRLIAAVPGFLTALGVIGTFMGLQLGLADLKLGAGVDVTTMQDGVAGVVNGAKIAFLTSVWGVALSVFFNFFEKLCEQFIRSKIRELEDKVDFLFPRVRPEEQLQIISENSSESRNVLQGLAEKIGEKMQEAMVTATQGIQSSLESSLSKIMAPAINKLVDETSQGNQKALEGLLESFMDRFGQAGNLQRSALDDVSNKVNQSVEAMQLTMSNFVEQLQKSQAESGDREKALIADISHQVSKLSSQSEDIHQKLTSYVENQIGKISSQMQIREEASAKRDSELVNVIGQQVNELVNNSRRQGELLTSFVETQLNNLTKSFDERDKRSTELETTRNNKIEKQTEAIVKISNELISTVEKSVSEQLAAVKHLVSQGETLQNSVNASVEAAAQATQAMKESSIELRVSADHMRVLSSHVNDAGNKLSGAIKSAVDSTADLANQNQISAQRIENARESLMKDVSRFSELSDQIKALITSASSTFTELKSTQRDFIGNLKEEVESLSRKMTDMLEEYSQQANGQTAEHLKIWSQSVTDYSTQMNSAVKALSSVVDEMQVKLG

SEQ ID NO: 3852 - protein, 243 aa, Shewanella sp. ANA-3
MDRLFTRGSTKVDEENPYWMSFSDLMSGLLVIFILAAVALIIELTQKSEQIDASIEELKKAEEARRNILIDIKEELAKQNIHVEIVENDTVLRIPESTLSFESGKDTLPENTTVKNEVRLIGIALHKAITTNERWKYLDTVFVEGHTDSNGIWYRGKGNWGLSTDRAVSIWKLWQTEINVAPKLSVLTNYNGQLLFSVSGYADTRRVDLQETTEEQRARNRRIDIRFTVKKPKIEDYEKAKNV

SEQ ID NO: 3853 - protein, 475 aa, Shewanella sp. ANA-3
MKFFLSDEAYKKNIKIMDSLTLEQKSIARKAGTGNPLFEAAWKKLHTLLQQNRFKDFNIEDRFDIRALSVALTGDMKLRHGIDISSALLIKVSKIIPHGSNLFIESLLQFFLSDFNLIKDPNAVGAWLSQERQRKGLNKGLEVKIFCSDGPTFFAQQAIKRNINFEAQVHSWGLDAYASGDFIKQAKSIYFVEQLQKIPVNEPHKLLEEVSKQVIAEGRYDADDLVGHVALRILIDRAPSKNVHDSWRDAVIAIAGDPRVPRSHARYIKWWSQLTSQQIKKVQGWLSKLDLKLFLEALEDYSISSRDDAMMRMFPSRKHFLEGLHESGAIVHTKLYLSKKALFYVKRHYKAEHIPEYSIVEDGDISVIYAELSNGHMVEGSHNCQIWFYKKLHESAPVLQFDKQKKTYRSLTLGLNEQMYRYGCEASDHFSHSPANFSWQRRALEALNKMGLKIRASDVLSGTDYNQYKRLYGVS

SEQ ID NO: 3854 - protein, 1148 aa, Shewanella sp. ANA-3
MKNWISSLFSSRNTKFKFSYDITKNSIDFYCPEKQFQDIKKGDADDFLTAQYIALQMLAEEGSAESIPNGFIVKHQVIAALDEDVHQLLNLPEIWNGQANVDIRGTTFEGSFDVTIHVDAPSGRMTSAYQVDGSIISFGNAQFTLKKVMFDVFSALKFHKESSKNESENLLLLHTFQQAQRAGAKLSLNHFNKLDIHVPDKITVEAELDSVGNLILTPQMGQKADHDSLQRVLGQIQSERGRTLKVGNEIILFNEKTAKAAKEIISNRTIPKSQVKNFLEAPGAYLDASLIDLDVGFSLRVKGATRFKHAYFGETDESGIDWFGQSQASSQILPISSVIKEIKTDDDRLQLTKILNDAKATGATEVKFEGKNYDIGSDSEVYEVLKKIEQKLIQQENTETDEGRDNTEAPGPQESDDSPIVIDIALNDEELDSPSKLVEEELNNVLYSQGISWDNYRREPFPHQIIGVKWILGLEEIARSKELVNGALLADDMGLGKTFMSLAAIEQYYCICEENGDVCRPTLIVAPLSLLENWKDEVAETFHKSPFKDIVILQSDGELNSFRDGGIETKASNIDDESFKPRYSLKFGEQHGAARLDLPCRLVITTYQTLRDYQFSLSQIDWGIVVFDEAQNIKNPNALQTRAAKGLKARFKLLATGTPVENSLADFWCLMDTACPGFLDSYQSFRHTYISPILQAAGDEIESVRASLGRKLREKVGALMLRRVKEDNLERLPKKNMFVGLEPTEWQYEPKLHSIMDSYQQKVYEGSIESQLENEESHVLTTLMRMRDTSLHPRLADGGRLDAPSSKNDLKQIFAESAKLKKMIEVLTDIQSRREKCIIFAINKRLQRFLSIALGNYFGLGPLHVINGDTKAVVKNKNTANRKSMIAEFEAKEGFNLIIFSPVAAGVGLTVVGANNVVHFERHWNPAKEAQATDRVYRIGQTKDVNVYVPILHHPTIESFDVNLHRLLSQKSMLKDAVVTQGEVMPNPAGADKHQLTADSIINSEDIPRLSWKQFEAFCVELLSKEFNADSAWLTKEGPDFGADGLLISGQEAILLQAKHKQGSYKGHNAVQEISNAKAMYGKHLGRPIGKQIFITNATQLAKSTREIAQELSVIIIDGNDLSDLCQCHRISFAQVLNRLSKQRYVVR

SEQ ID NO: 3855 - protein, 680 aa, Bordetella petrii
MTEGLLAYLNQVGGWTIASLRLFAAYMPHVLGALALLSILFFLRGLWYRARLGGVLRKLRKVDAKANREAIQHIFPTKRLRHLWQEYDQTLHAQYEERDGQLQIGVIRSTIPAEMYFNDQYVVDSHLRTEFFKHLPGIFTGLGIVATFGGIIDGLKQFQVSEDTAVVRNSLEILMQSVGHAFLVSACAIALAMLYTLLEKLLLASLYRKTEDISQTIDAHFKSGAGEEYLSRLVDASEASASQAKILKDSLVSDLKQVLQELTQSQIEAGMALHTQQLAAAKEGNKTLGEVIASSIDQSLKTPLDEIASSVKSASGDQSKAAIDMLNDVMVHFSQRLNDLFGGQISGINELNKETAQSMQDAVTALNTLLGKVEDSGKRATEEMALKMASSIQAMEERQASINAQTQDFVDQIRKLVESSQSETQQKLQGTLESVGQQMTTILETLNTSQAQVFAQNQAREQAMADRASHTVSQMSGSVEAAIQEISAASKAMTESVSALSSATSTSVEKMNAGAERLGIAASSFANAGERVAEVITQTTSIGNKLTEVSSSLSTSSTSLHEALGDYRVQREALAHVLAEVREMIGLAGKEANITADALQRIEVSTTKLGLAQKAADEYLDGVSLVLEQSSDSFRDAVVNTLSKVNYEFHEKLSSAVGLLATAVQELEGSLGTIAAPDRR

SEQ ID NO: 3856 - protein, 237 aa, Bordetella petrii
MIGAKIIVKRGGREEAEKPFWISFADLMSALVVLFLVVMGVALLSVTQTVTDIQTDEEIHSNNIQAILDRFESAASSYEGITIHRDRHAIDFGQRAQFAFGTWRLNAQQESVLRQFVPEILTIANDELGKNILKRVVIEGYTDKTGSYLTNLNLSLQRSQKVLCSMFATSGPNLLDDSQKADVRNLFFVGGYSFNAAKESDDESRRVEMRLEFRGLKEEPRPTAINIDDNFGECALR

SEQ ID NO: 3857 - protein, 558 aa, Bordetella petrii
MREGGLDKHLATLQQHVKAGSSPYEPEDLQAKAVRRFWETTRLDTLKEARLVSFGMCLPSHPNGPCLLEDSKRFDAALSSDTGVDQWVKKPQWFRRCYQGLVRSYFSYDDRKGKVAPDEGRKNWKKLREYLHDRSSNIIDPERINPDWAITAVENKGLFSENPCLPYAKTALSGDMSSINRIREQLGITDDSWFTNELVLSQVRHAVASPYEEFKVQVPNLLTMLASLARHGTKVRNRGLSLILDAYAQGSTPAIFEQLRDVSVDWWGNPWLPSTAAQWGGVSPQAREMVSEWLRGEFIETFFTKLAQDGIGDRRRANFWLRYVKSMTNVQFALGPRALNSPSRDFAVLLEKMKGLYTELKDSGSANNAFIMTLGNLVAVEFSATGHALYGYQKGVLPFVFDSSEPLRLSGRAVNTLKDRNQTVIWLLHKDNIHGWNRWEDMYEATLRESFGILPDDALPRAPRATSPTRAASDTSRSEPNSRISLPTEPSPNSLISKYGSFAGHKLKALSKYRGFDIADLRTKGGNIWAYTQSNDPELIQLFQSWGFQYKAGKGWWK

SEQ ID NO: 3858 - protein, 1246 aa, Bordetella petrii
MVFKLFKKKNSSSIAWQRTLSANGVVVHQSLGAMRLDSALLAGYLAQLVDDGLALESEQEVTIPWDGIFTALQRPDYEDLISVLALPSLTTMRPVLQSRNALTDENFSILLAGWQDESGRTVDSKLVGPLLSSPGTDELVRPEHWPLLKEVFAFSKRPPEARHDLEHRQAWGRIRALALEANARLDDFLRRTVVLTPERLDIGLRKIAIAEDQVIEITPSFEGAPEGWLERFDALRSIPDRYDIPTPDGIVQVLIVPQVKSVLQEVKRLPYRRIAGSRAQAFSLNPFATLGEDAKAVIDEEQFEQAREAAGIQFDRFTPVIERDAGGYPRKISLLIESANASGLSFSESIELDDTELAEFIARLETAFNKSFQLLGWRGFDLELLGETPDYLAELKVALAQRQQDNALVRYEQVHDLSAYSSRIEGIGFEEPYYSPFIAKKDSGDWVPENVQVLIASNAKGPQGALEGIPVTKEVLETLREAVAQAQAEGRPSVKVGGLSNDIPLDQAQDIVDSIDSALRDVQQGKDPTSREKTSTPTAPPRKTLILRPNIETVDYEESRREALLALPSAADIPNALNREFSLLPHQEQGLAWLQHLHKSRVEREVRGAILADDMGLGKTFQLLSLMAWLVERDPSVAPMLVVAPVSLLENWAEEAGKFIRPGVLPLLTAYGDALAGLRVPRADIEERLKTEDGLVRFLKPGWIGSAKVVLTTYETLRDLEFSFAAEHWSVMVCDEAQRIKNPAAMVTRAAKKQNVDFKIACTGTPVENSLVDLWCLFDFVQPGLLGALNDFGTRYSKPIEAKTDEERARVEELRLRIKPQILRRTKAEVAKDLPQKIIVEACRHLALSSEQRKLYASAIESFKARKDPGAISPFKNMLGLLHYLRLICTDPRRHGLTAPNPEPLKQYREKSPKLDWLLEQLKLIQKKDEKVIIFCEFRNIQRLLRHYIEEQFNIFPPIINGDTSATAGHADSRQRQIKKFQEAAGFGAIILSPVAVGFGVNIQAANHVIHYTRTWNPAKEDQATDRAYRIGQKKDVYVYYPVVKADDFATFDVKLDQLLTRKRELAGDMLNGSGDVRPGDFNMEDVVPPADRDSFNERITLSHTLSMEPRHFEGLVAVLWGKQGYACYCTPQSRDQGVDVVGTHAEKGVLIQAKTSSSDGKRLGWDAVKEVVAGAAFYQRKHQNVDFQKVCITNQFFNSQAQEQAAFNEVVLIDQTGLADLLLQYPATMLELDQFLYTEWSSLSH

SEQ ID NO: 3859 - protein, 670 aa, Burkholderia cenocepacia BC7; identical to SEQ ID NO: 1230

SEQ ID NO: 3860 - protein, 241 aa, Burkholderia cenocepacia BC7
MFGPKSSRRRNGRDEGEKPFWISFSDLMTALMVLFLVSMAVALIAITQKQKVIDDTIELRKKTIAQCLTEVEDVTKRPEFKGVTVHGNSIDFGAVVLFADQHHSFERSADERFIRSFVPEVLKVARAKSCETWLKRVVVEGFASRTGNYLYNLNLSYLRSQRVLCALLNTQVPDALSEADRRQIQTLFLVGGSSFNTASNDGPARMRRVEVRLEFRDFGSAAEPTPDIPLDPGKSCPNDLR

SEQ ID NO: 3861 - protein, 546 aa, Burkholderia cenocepacia BC7
MNEALELLRSGLARSFTQAAKNPDLWLDAKSMEHAKERVIRDHGGAAIKVDSRTIWASIEDFRRLGHAANFRELKYVCLGVSAMDAKGWCILAEERLREQVGKQVEEQVAIHRKLRCFQALLASYFSFALGASNLDPKAVKGWTTLRTWLQRQRQQLAIALDHVPPWFEALDRHSEFLTGRPCDKFVPDLMRGDASSLEEAMDSLGIDRDSWVMEAAVFAQMEAAEKLDDVRFKAALPDLLRIAMGEAGAKVGERLRIRGIALLVSRYARCSATPEHPGLRDAAVGVIGNPWLRRASWDAHVVDAVKQPDTRAREMVFGWLKGRLIQDFFELLSAEDTGDTRRLVYWLRFAPFVDDMWFALGPTAQYRSDWLFREFRERAKGRLLDLEGASGDNNAFVMRIGAHVAIEFGATGHAFYLLRWDALPPAVSRALTSGKAKDYVVLSQLKPELHEWKQSHRDAPVALRSWEQKFDDELLPRLGVAPKERPVCVPDLEKLLEGRNVTVTDNRAKGGALRIGPDDELAGVARQLAALGMQQPRRGRGWIKE

SEQ ID NO: 3862 - protein, 501 aa, Burkholderia cenocepacia BC7
MIRLFGSRRVGEQAEVHPRSKINVSWGRHGVVIIPDPADEAWLDEPSVFGADSELVLLLRQLEEEGYIEVRPSGASMDWESYYRLEAVEGYSASLHLLKLPAKRGWRPMLSSRGGLSDATFAIGISGWRDPAGAQPSGNVEIQGAIVSADGEQSLLSESVWRVVHAIAERRSRSAEGYSPEDNKRDWARIRRHAIDANADLADFLAKTIVLTPERIDIQMRKGGKGAQDMVEIMPGFDGAPSRWLEVFDRFEVVPERYEIPNGSGLVHVLMSEDARAVLSEIRRMPGRRVAGARAEAFLRNPFATLGPSAAVAIDPDQFERAREDAGIVFERFSARVVADQSGYPCDVGLLIEQVFEGKLVAEESKFESATELGSFIAKMEQRFATGAQCCHWKGFDLEILGDSPDQVEKLRSALAKLALPRKITVSDIFDLSLYSERIEGFGVEKPYYSPFIAKKGDGGWVPENVDLGLWFTDSKGETVAIPLDGRNLDKFRKEVEQAEQ

SEQ ID NO: 3863 - protein, 670 aa, Burkholderia cenocepacia K56-2Valvano; identical to SEQ ID NO: 1230

SEQ ID NO: 3864 - protein, 241 aa, Burkholderia cenocepacia K56-2Valvano; identical to SEQ ID NO: 3860

SEQ ID NO: 3865 - protein, 546 aa, Burkholderia cenocepacia K56-2Valvano; identical to SEQ ID NO: 3861

SEQ ID NO: 3866 - protein, 1253 aa, Burkholderia cenocepacia K56-2Valvano
MIRLFGSRRVGEQAEVHPRSKINVSWGRHGVVIIPDPADEAWLDEPSVFGADSELVLLLRQLEEEGYIEVRPSGASMDWESYYRLEAVEGYSASLHLLKLPAKRGWRPMLSSRGGLSDATFAIGISGWRDPAGAQPSGNVEIQGAIVSADGEQSLLSESVWRVVHAIAERRSRSAEGYSPEDNKRDWARIRRHAIDANADLADFLAKTIVLTPERIDIQMRKGGKGAQDMVEIMPGFDGAPSRWLEVFDRFEVVPERYEIPNGSGLVHVLMSEDARAVLSEIRRMPGRRVAGARAEAFLRNPFATLGPSAAVAIDPDQFERAREDAGIVFERFSARVVADQSGYPCDVGLLIEQVFEGKLVAEESKFESATELGSFIAKMEQRFATGAQCCHWKGFDLEILGDSPDQVEKLRSALAKLALPRKITVSDIFDLSLYSERIEGFGVEKPYYSPFIAKKGDGGWVPENVDLGLWFTDSKGETVAIPLDGRNLDKFRKEVEQAEQEKRESFSFPGCPRPVPTGWAKEALETLGKVKEEVKGGNYIPGKDKSARKMVERKGLVVKPNVDGLDYEERRGDLSADKAPPAIPSSLRPDIELKDHQRDGLAWLQNMWRNSPSVCRGALLADDMGLGKTVQLLAFMASLIEIEPRIDPFLVVAPVSLLDNWKAEIEKFFVEGAMDVLTLYGPNVAAKRAPRSALDDGLIESGSPKLLASDWLGSANVVLTTYETLRDLEFSLAAQKWSVMVCDEAQKIKNPNAMVTRAAKKQNARLKIACTGTPVENTLADLWCLFDFVQPGLLGSLKDFGSKYRRPIEVETDDEKARIEELRGLIEPQKLRRTKAEVAKDLPKKILHEGCRKLPLSARQRALYADAVAQFKSRGQGQGSGLQSPLGLLQYLRRLCSDPRPPGHIATSDESVETIKKASPKMDWMLRRLREIEASGSGDKVIVFCEFRDLQRVIQRAISEVFGFVPDVINGDTSTESGAASSRQTRITAYQQNPGFGVIILSPLAVGFGVNIQAANHVIHYTRTWNPAKEDQATDRAYRIGQQKDVYVYYPVVVGGDFVTFDEKLDVLLERKRALSYDMLNGVGDVTPSDFADIEAPGGGSPFGEDLFNPVDVGSLGPDAFESFCALLWSKQGYSRTIKTPKTGDGGVDIVAIKGNRGALIQCKSSGVEGKEMGWEAVKDVAAGSVAYSARYPGVEFQLIAATNRRFNQSARQQASLLNVTLIEGSDLVDLLSKHPTKRGEFDRFAMAGWSQ

SEQ ID NO: 3867 - protein, 670 aa, Burkholderia cenocepacia; identical to SEQ ID NO: 1230

SEQ ID NO: 3868 - protein, 241 aa, Burkholderia cenocepacia; identical to SEQ ID NO: 3860

SEQ ID NO: 3869 - protein, 546 aa, Burkholderia cenocepacia; identical to SEQ ID NO: 3861

SEQ ID NO: 3870 - protein, 1221 aa, Burkholderia cenocepacia
MIPDPADEAWLDEPSVFGADSELVLLLRQLEEEGYIEVRPSGASMDWESYYRLEAVEGYSASLHLLKLPAKRGWRPMLSSRGGLSDATFAIGISGWRDPAGAQPSGNVEIQGAIVSADGEQSLLSESVWRVVHAIAERRSRSAEGYSPEDNKRDWARIRRHAIDANADLADFLAKTIVLTPERIDIQMRKGGKGAQDMVEIMPGFDGAPSRWLEVFDRFEVVPERYEIPNGSGLVHVLMSEDARAVLSEIRRMPGRRVAGARAEAFLRNPFATLGPSAAVAIDPDQFERAREDAGIVFERFSARVVADQSGYPCDVGLLIEQVFEGKLVAEESKFESATELGSFIAKMEQRFATGAQCCHWKGFDLEILGDSPDQVEKLRSALAKLALPRKITVSDIFDLSLYSERIEGFGVEKPYYSPFIAKKGDGGWVPENVDLGLWFTDSKGETVAIPLDGRNLDKFRKEVEQAEQEKRESFSFPGCPRPVPTGWAKEALETLGKVKEEVKGGNYIPGKDKSARKMVERKGLVVKPNVDGLDYEERRGDLSADKAPPAIPSSLRPDIELKDHQRDGLAWLQNMWRNSPSVCRGALLADDMGLGKTVQLLAFMASLIEIEPRIDPFLVVAPVSLLDNWKAEIEKFFVEGAMDVLTLYGPNVAAKRAPRSALDDGLIESGSPKLLASDWLGSANVVLTTYETLRDLEFSLAAQKWSVMVCDEAQKIKNPNAMVTRAAKKQNARLKIACTGTPVENTLADLWCLFDFVQPGLLGSLKDFGSKYRRPIEVETDDEKARIEELRGLIEPQKLRRTKAEVAKDLPKKILHEGCRKLPLSARQRALYADAVAQFKSRGQGQGSGLQSPLGLLQYLRRLCSDPRPPGHIATSDESVETIKKASPKMDWMLRRLREIEASGSGDKVIVFCEFRDLQRVIQRAISEVFGFVPDVINGDTSTESGAASSRQTRITAYQQNPGFGVIILSPLAVGFGVNIQAANHVIHYTRTWNPAKEDQATDRAYRIGQQKDVYVYYPVVVGGDFVTFDEKLDVLLERKRALSYDMLNGVGDVTPSDFADIEAPGGGSPFGEDLFNPVDVGSLGPDAFESFCALLWSKQGYSRTIKTPKTGDGGVDIVAIKGNRGALIQCKSSGVEGKEMGWEAVKDVAAGSVAYSARYPGVEFQLIAATNRRFNQSARQQASLLNVTLIEGSDLVDLLSKHPTKRGEFDRFAMAGWSQ

SEQ ID NO: 3871 - protein, 674 aa, Burkholderia ubonensis
MNFQAFVVAVPTPVLVTSAVLAALVIVFIGVFLVPAASHWFRLRNVQKRIAKFETTNYPSQFKAVFASDRRLAHLWKEYDESLHRQREEREGQMVVQAVRATVPAELYFNHQVVVDSRLRTEFFKHVPGIFTGIGIIGTFSGLIEGLRAFQVSENAATVRGSLESLMHSVGEAFLVSASAIAAAMVVTFVEKLLLASLYRRTEEIAHAIDACFEAGAGEEYLSRLVKASEESASQSKILKDALVKELGELLRELTGAQIAAGREQQTLAAEVARQNNVALGNAIAESIQQGLKGPLEEIAATVKSASGDQSESAVRMLQDVMASFSQRLNDLFGGQISGLNELNQQTAHSIQEAVGTLHTLVANIEASSQRSTDTMAQRMAEAIEKMESRQEAINAQSAAFVEQIRELVATSQSETSQKLQTTLETLGTQVSEMLATLSGAQKEVFENNRARESAMAERATGAVATMSESVDSVVRELGAATTQMAQSVAALTQATTSSVDRMNAGAEVLGTASRNFAAAGERVSGVMGQAASVSAKLAETSGSLTSGAGAIQELLRDYRAHRDAISHLVTELRATVDAARKEATLTGDILNRIETSASRLGTAQKQADEYLAGVSRVLGEAHTSFATEVKRTLDKANTEFHTKLTSAVGLLSAAVGELELTLASMGTLAPVRK

SEQ ID NO: 3872 - protein, 236 aa, Burkholderia ubonensis
MLGARIVVKRGGRDEAEKPFWISFADLMTALMVLFLVVMGVALLAVTKNVTEKEKREEQHRKDIELILDRFQSAAKRYNGIKVDRDRHVIDFGDRARFAFGKSNLAPEQEEVLRQFVPEILTLANGDLGKRVLKRVVVEGYTDRTGTYLSNLNLSLQRSERVLCSMFATAGGSLLNEDQKENVRNLFLVGGYSFNDSKDTDEESRRVEMRLEFLGLGEQRPPVPVQTGNFGDCALR

SEQ ID NO: 3873 - protein, 261 aa, Burkholderia ubonensis
MVAEWLKLEFIETFFTKLAEDGLGDPRRMNFWKRYVKAIDHIEFALGSFARNSREPDFITLRRKMTGLTRELDASGANNAFIMTMGNLVAVEFSGLGNALYGYDAGRSIPFDTTRTLGLSVGGNNSLKQKGRSILWLSHQDGIHGWAKWEEMFDATLRKEFGIVPSTPAPRSNDRTSQPSQSLSSGKRGVGDSPSNRSRTTTESYSNVALRRFAAIHGLEVDDKTSMGGNLWVRGASSDEMVNQVLTRWGFRAKPGKGWWR

SEQ ID NO: 3874 - protein, 1253 aa, Burkholderia ubonensis
MFKLFKKAKERDLASWRRYWLSAGLVLTRHPRPDGETVDGSLVEGYLTQLTDDGLAGQTEDGFLLDWDSLYAAIELSDYAPLRDILKLPSFSATRPVLRSSHSLADRDFAIALDGWYADDRGQFRGVLTGPVMVDGTTEALMRPAQWELFKAVVAFSRRGADERTDVANRQGWGRIRKLALAAGARLDDFLYRSVVLSPEKLHIGLRRSDSVSDDHVVEIEPGFEGAPPGWLDTFDRAREIRDRYDIVTPEGIVQVLVTPKVRTVLREIKRLPGRRVAGSRAQAFLLNPYAALGADAIDVIEESQFERAREDAGLDYERFVPVFERDAAGYPVRVGVLIEIAVASGPTSSESHWLNDDELSAFVKALSRALGLGHQLLAWQGYDLVVQGDAEQHLKDLTAALAQRQTPPTLVSYAQVHDLSGYSARIESIGVEKPYHSAYIAKKSEEEGWFPDNVLPVVVYQPKDGGEPVAVPTSKPAIEKLRNDLQVAEAKGASELDVSWLKDSISLSDAKEIVTTFENVFSSLDSDKPFDPERSQRERREERGSKKQLVLRANIQALEYEEMRREALQAVPAQPKLPSSIRPEFALLPHQQAGLAWMQHLFSLQTDYQVRGAILADDMGLGKTFQLLALMAWLLELEPDMAPMLVVAPVSLLENWAEEANKFFEPDSLPLLTAHGEGLTGLRVPRGQIEQRLQTEDGLVKFLKPDWVGDAKVVLTTYETLRDLEFSFAAQKWSLMVCDEAQRIKNPAAMVTRAAKKQNVAFKIACTGTPVENTLADMWCLFDYVQPGLLGALNDFGQRYRKPIEAKTDEEKARVEELRARISPQILRRLKTEVDTGLPPKIVVEDCRQLPISSVQRNLYAKAVESFAKRNEPNHTTPFKNHLGLLHYLRLLCTDPRPYGLGVFKPEPLSEYRAKSPKLDWLLKQLHEIKDKGEKTIVFCEFREIQRLLQHYIEAEFGLRPDIINGDTSASSSHVASRQKRIKSFQDAPGFGVLVLSPVAVGFGVNIQAANHVIHYSRTWNPAKEDQATDRAYRINQKKPVYVYYPVIYAPDFTTFDVKLDRLLVYKRGLAEDMLNGAGDVVPADFNIVDIVPDAQSANIDERITLDMALRMGWQHFECLVGALWSKRGYVCYRTPGTNDNGVDVVAIDGNRGQLIQAKTSGTDGTRLGWEAVKEVVAGEAFYRRRHPGVTFEKVCVTNQYFNRQSHENAALNVVELLDQKHLADLLERHVVTMLEVERMLFAEWQTTESVV

SEQ ID NO: 3875 - protein, 667 aa, Burkholderia ubonensis
MNGITRTLGALHPSLASLHGVPLYVFLVVALLTVAFLVGYAYKGTQVWWQIWSALRAIRALRKDRGAPDPAEVGRAFRWEPLRHLWTEYADTLHELRVAGSGGAALTEVRATVPAESMFTREVLVDGRLFDDFTRHLPGVLTGLGIIGTFAGLLDGLQQFKPTPIEDAVNGLGPLLLGVQHAFVASGTAIACAMLVVFISRLVLACLYRLVEHLTHAIDSLYSTGAGEEYLARLVKSSEQNATSTAQLKDALVEDLHKMMTNLVDRQIAAQEASSLALGKHIGESISSAIAEPMKRVGEAMEVTARGNGEQVNSMLETLLTGFMAKLEDTFGGQMRGINEQMQRSMDSMSAVQSSLQALLADIKQTNEQAANQMSGTLEDAMRKAADNQQLLTDQMREFVQDFRRLVTEEQNKSKQAMDEAVMKVLGEVAVAMDRLEGTRKAAAAEEAGRNDRLANQTNQLVGGLTTQVETLLGAVSEQVTKTQQNVDALGAVSLRAIDGMNQGALTMGSAAQRFETAGGAVSAVFERSTKVADTLSSAAASLQAASTAVQRGFEQYDSTRKTVDTQVAALMGLIETVKREAGVSQELVSSIKASAEAMRKSEQEARLHLDQVNAALVKAFSDFGSSLVSQVKSTIAETDRHLAQGTGHLNGVVQELANAVQRMKRA

SEQ ID NO: 3876 - protein, 234 aa, Burkholderia ubonensis
MFARIFLKRGSKHEGESPFWISFSDLMSALMVLFLVVMAVTLVAVTQSIDAATRATIERAAAINKVMAMIANDPKSRGVGVDQQNYRIDLGKEVRFDSGSYTISVPAGQFLRSYIPVLLKAKDTPEGKRWMRSVVVEGFTDEDGTYLYNLQLSLDRSRSVVCALFQSTSSGEALTSEQLRKVQELFLVGGYSFNSIKKDKGESRRVEFKVDFWGLDEKQPEASDVLKGKEFGKC

SEQ ID NO: 3877 - protein, 576 aa, Burkholderia ubonensis
MLAAAALQQLNRELVAAIESMGLLSGEFGKPELVEKPTREAERIFQDFAAAKPRKEDAYAAALSFLRGKELDSWQRDLVASAIGEPIREQDGAMVLGGRRFPALLSLYESEAKRGDLWRLTWHGLLYSYFNFDPNLAKDDATRSGWEALRSFLERTWPLIDKQAGKSQVPDWVNVLRKESEVLSAKPVDKYSGLYLRGETGPTDRLAEDLGIPPSSWFWHALVLGVVQRATAESDAEFRRLIPQLLKLIQGKPGFRDEALEVLLIRYHACKGAPQDERLRDYVCQATVWKNPKLKAAGIATAWNRVPDPVWKMVLSWVNERNLKDFFDILAARNNADEGRLAFWSKYLKQITWTRLVFGADTMALKRSNPGIRDLIAREEGAYAQLTSKPEVDAFMMQIGSYLIIEFSKKPNACYVYEADQLPFEPYDRHYEGGTADLAAGYRQEVGCALRIVHREGWGDRAEVELRQLGIRPDRSEAHRVATAGAATTSTAGNRITSSGIASGRATAKFAGPDMAALRALVARFRGASIDDRRSNASGGRLWVEDPQQRATLGSELKALGFKWANSRQAWYFPES

SEQ ID NO: 3878 - protein, 1288 aa, Burkholderia ubonensis
MGLFDFFKRVAAGKADKPTLMTSWTQEGVRIEFARELAESTADGLLDAIHEAGPDDSVLGAYLVQLAAEDRCRLDRNGALIPWADLYDLQGSAEHVGALKLLGLPPQGPLRPVLDSSGTLSGQDFDLTVTGWTDGTKQVHLERLDGAVATVGGESQMLSAAAWATAAEVSAFRNRDDRERTQHAQELAWGRIRRIADRAGALYASPYLETTLVLTPDTLRLPLSKHDTPFGRVLTVSPTFEGAPDGWLTAFDGFNSVQPHYDLTRGSGRIRVVISEPVRKVLNVIKREMPNRRVAGAKAEKFVHNPFAFLGDAAHEVLKTDEFEADRAEAGAVAAVFNIVARTERGRLNAVELVVTEHFGDGSARTDCKACKTVDELDAFLLALKEALEQDLERFPWDEYDLTLDAESTVQLEQGLQLAHLWRTQPAERISFDDVYELDGYSGRVEGIGAVKPIYVPVFQKEKKDEGDSGWLPSDLTPMVKVTLQGHEGQVLVPLTKEWVRDFDKQVQEAEEKGLPDVKNSSLPTPIATAHARTLADSFKSMVEAQERVEEEHTSQAKKEMKTRQTLLVKTNFHDVDYFEERRTSLALPDDWQAQLPKCLRPGIELKKHQHYGVAWFQHLVSKAPTECRGALLADDMGLGKTLQLLSVLAWYYEGNPNAAPSVIFAPKSLLENWANESKKFFNDSFPEVLVLYGDELKERKQPPSLIDSQLRDKGIEDLLKPSWVGTAKVIITTYEVLTSYEFSLAKQPFAFLMCDEAQRIKTPGTLVTLAAKKLKADFRIACTGTPVENSLADLWCLFDLVQPGLLGALEDFGKTYRRPIECETEEQKEALKRLQTAIAPQTLRRTKASIAADLPKKYFALKKVEQTGLEYKAALDTEERLEIALSEHQRILYKGGLKKLQDAAKESNGRKRAQLSFGALHLMKAVCAEPYCLPGTKFLIDKSGRDAHLANSPKLGWLLEHLAEVKAAGEKAIVFTELREAQAALYYFLKETFGIRPYIINGDSQGRQGYIDKFSSKPGFDVIILSTLAAGAGLNVTAANHVFHFTRAWNPSKEAQATDRAFRIGQERDVFVYCPTIVANDFNTFEVRLDELLKRKAGLAGAALDDGGLTAMLNGAGNDASFKELVEEGGAAEAIPKRYLTMDDVDRMDGEAFEVFCCLLWNKQGFQATVTPKRGGDGGIDVVALKGREGELLQCKSSKSDEVGWDAIKEVTAGAARYQARFRGTKFRRVAVTNQAFTRAAVTQAEANQVSLVTRSRLEELIGAHPVSNHEFDEVLQDLTQFSADVV

SEQ ID NO: 3879 - protein, 667 aa, Burkholderia ubonensis; identical to SEQ ID NO: 3875

SEQ ID NO: 3880 - protein, 234 aa, Burkholderia ubonensis; identical to SEQ ID NO: 3876

SEQ ID NO: 3881 - protein, 576 aa, Burkholderia ubonensis
MLAAAALQQLNRELVAAIESMGLLSGEFGKPELVEKPTREAERIFQDFAAAKPRKEDAYAAALSFLRGKELDSWQRDLVASAIGEPIREQDGAMVLGGRRFPALLSLYESEAKRGDLWRLTWHGLLYSYFNFDPNLAKDDATRSGWEALRSFLERTWPLIDKQAGKSQVPDWVNVLRKESEVLSAKPVDKYSHLYLRGETGPTDRLAEDLGIPPSSWFWHALVLGVVQRATAESDAEFRRLIPQLLKLIQGKPGFRDEALEVLLIRYHACKGAPQDERLRDYVCQATVWKNPKLKAAGIATAWNRVPDPVWKMVLSWVNERNLKDFFDILAARNNADEGRLAFWSKYLKQITWTRLVFGADTMALKRSNPGIRDLIAREEGAYAQLTSKPEVDAFMMQIGSYLIIEFSKKPNACYVYEADQLPFEPYDRHYEGGTADLAAGYRQEVGCALRIVHREGWGDRAEVELRQLGIRPDRSEAHRVATAGAATTSTAGNRITSSGIASGRATAKFAGPDMAALRALVARFRGASIDDRRSNASGGRLWVEDPQQRATLGSELKALGFKWANSRQAWYFPES

SEQ ID NO: 3882 - protein, 1288 aa, Burkholderia ubonensis
MGLFDFFKRVAAGKADKPTLMTSWTQEGVRIEFARELAESTADGLLDAIHEAGPDDSVLGAYLVQLAAEDRCRLDRNGALIPWADLYDLQGSAEHVGALKLLGLPPQGPLRPVLDSSGTLSGQDFDLTVTGWTDGTKQVHLERLDGAVATVGGESQMLSAAAWATAAEVSAFRNRDDRERTQHAQELAWGRIRRIADRAGALYASPYLETTLVLTPDTLRLPLSKHDTPFGRVLTVSPTFEGAPDGWLTAFDGFNSVQPHYDLTRGSGRIRVVISEPVRKVLNVIKREMPNRRVAGAKAEKFVHNPFAFLGDAAHEVLKTDEFEADRAEAGAVAAVFNIVARTERGRLNAVELVVTEHFGDGSARTDCKACKTVDELDAFLLALKEALEQDLERFPWDEYDLTLDAESTVQLEQGLQLAHLWRTQPAERISFDDVYELDGYSGRVEGIGAVKPIYVPVFQKEKKDEGDSGWLPSDLTPMVKVTLQGHEGQVLVPLTKEWVRDFDKQVQEAEEKGLPDVKNSSLPTPIATAHARTLADSFKSMVEAQERVEEEHTSQAKKEMKTRQTLLVKTNFHDVDYFEERRTSLALPDDWQAQLPKCLRPGIELKKHQHYGVAWFQHLVSKAPTECRGALLADDMGLGKTLQLLSVLAWYYEGNPNAAPSVIFAPKSLLENWANESKKFFNDSFPEVLVLYGDELKERKQPPSLIDSQLRDKGIEDLLKPSWVGTAKVIITTYEVLTSYEFSLAKQPFAFLICDEAQRIKTPGTLVTLAAKKLKADFRIACTGTPVENSLADLWCLFDLVQPGLLGALEDFGKTYRRPIECETEEQKEALKRLQTAIAPQTLRRTKASIAADLPKKYFALKKVEQTGLEYKAALDTEERLEIALSEHQRILYKGGLKKLQDAAKESNGRKRAQLSFGALHLMKAVCAEPYCLPGTKFLIDKSGRDAHLANSPKLGWLLEHLAEVKAAGEKAIVFTELREAQAALYYFLKETFGIRPYIINGDSQGRQGYIDKFSSKPGFDVIILSTLAAGAGLNVTAANHVFHFTRAWNPSKEAQATDRAFRIGQERDVFVYCPTIVANDFNTFEVRLDELLKRKAGLAGAALDDGGLTAMLNGAGNDASFKELVEEGGAAEAIPKRYLTMDDVDRMDGEAFEVFCCLLWNKQGFQATVTPKRGGDGGIDVVALKGREGELLQCKSSKSDEVGWDAIKEVTAGAARYQARFRGTKFRRVAVTNQAFTRAAVTQAEANQVSLVTRSRLEELIGAHPVSNHEFDEVLQDLTQFSADVV

SEQ ID NO: 3883 - protein, 781 aa, Stanieria cyanosphaera PCC 7437
MVLLLNNLLLNVVFVAFIFAVAIWAIWTEIKSVNDYKKELKLTEEATECLKKNQLKQEIPHQEVGEEIRKWLFNHVDGQLESSKFIPRKEDNRFVLLSYPTILSKPVPRSTVYFVPTLLTTLGIFGTFFGISVGISGVNLGELNDASSLLTTSTQLLSGMKTAFFTSLAGLSGAIPLMFIIARQTKQKERNRNQLRKYLSEVAFLETSERLLSRFDHTSSRDAAKTLEEVAKNLKGLSQFHPDAIGNAVKQALASEDSLLVQQLKEIQKLQKIQNEQFNPDSIAQAINQELKLLINPISHKLEKIDHLVKNTTNLPQLTPEAIAIKTKQQLEPHLTKLLANTTNLPQLTPEAIAIKTAEQFRLIITPISQDLGKIREIQETQKQTVELLVQQLRNELIEPVVERLDQSANLTQEASEAVRELKNELGGITQSLAGAVETIQIFQKDTLTELQQFATSLHIILKDFREETKGVLEQVGSEINQAVAQSVAGMEAQRQAFAESANKAAKTFRGIREDLESALSTQAEQQKAMLEGVESQTRQILLETTAAFQDQSNTLKTVGQEASSLMNQAKDNLLGTLSNIDLMLQNTRQTVQQELERFRLDYQAALSEFFTQQNNLLNDTLGQQREGLAQVVVNLQHTFDEEIQKRQEMSEQVNQSLVKIKHTVETVSNLANTFGLTSGERLGQLTELARTIGNEAHRVERAYQNMTNQFNEALTKGNKELFEYLQQAKESYSNNLTELDLAAAQVCQKLDQNSHGLMSVAQYLVAAANELKNGQGSIES

SEQ ID NO: 3884 - protein, 264 aa, Stanieria cyanosphaera PCC 7437
MNNFPDYEIETESEEQDSGVYLSISDLMSSVLMIFVLLFITVQIQLQAKVNQVKQLEIQLQAEIDKTKKLEIQLQAEIDKAKQLEIQLKKYKKAVDELPIRILNALEGKIGGKGLFTVDPTTGDVSIGDRILFDEGSAELKPEGKKFLQQFIPTYSNIIFSDSMFDRQITRVVIEGHTSSKGSDKENMELSLRRALAVSDYILSNQFKFSTKERFKKKILASGRGEIDANQKIDHSSDRKVVFRFQFRRENFEQFLQSNNTNKK

SEQ ID NO: 3885 - protein, 502 aa, Stanieria cyanosphaera PCC 7437
MNFHFSQLNLPPLTQVRCEELIKLAGNNINNNFPQPLQIPSCITQSFITQPRSIDEIISDIQHGQIDQITLLEWIYCLYLKQKWDLQNPEQAENTSEAIWQAANDNAWLKHRLFWDLILNYNEENQTLASSLINSFSIFIPKTNSEKVSVQIIDVLSKPFPAPELAKISWQNLLTPRQLLNNYQLPDKIDAVKEAFNYVAIQFTKAKNPSKQQIEWLLNCLKQMSSEQELKTVDYLLINTSPEITHSHPELATWISQNYGSGVINSRWNELSSTAKNALKKWIGAVNYRDFQKLVDVILKKLYLQEYEAKRLRNRKEFWANYSDRFERIRILLPQSSVKVLGNNFADQDISILVEDGSSPTEVCIFDFGEWFIVEFFRGNGSETRLFKNDSIVEKKLFHSHELSVKRLRCLGGEIHDHEFIWQYYCEQWLRKNNIRPNQGTHYFIGLPDRYSKYHSQTGLPEPSFENKQKRSYKLEYWQREINRLEQEAKRFCQDNQIFQSV

SEQ ID NO: 3886 - protein, 540 aa, Thermoanaerobacter italicus Ab9
MLFKEITLFIIRLIPDFNDIFCFGIILLAGVVFFLAHRKPKEYIRLIELYKEKIHNTSDKDMLLRELVELTDEIIEKEKNDKYITKLLEEFKNSCYSGNIKNAVDVLDYTALVEIPGRRKIFDMMPGVFTGLGILGTFAGLVLGLSDLNFSGSTQALEEGINNLISGINLAFLTSIAGLVSSLGWSYFDRKRLHYYREKIDSFHSSYKKVFVQKEIDDYLKDIREIQEEQKTYMQKFVSDLSLELSNVLSNMLEQRIFPEFANIIHQQVTSKIVESFDNTIGEIKQSTESSKQMIERFANLAYDNQLEGVQRIVNKFIESMDLSLKGKFADLGESIGEMIKWQQMVKEGMNELIERLSNNILNLQEVNKAIENTIVNFSDYFDNVNAANNHLVENISKLESVSLNINGLIEGMSKMIKDINEQKDLLLKDKTEHIQIISRYILEINEKFSLLEKSYANISKDIDILNNSLKQSMEEFANKTHEGLKRSLSLFDEELASITSYLNSTLSEIEEAVDELPKVIIEFKKTLRNDEKEMQTIEG

SEQ ID NO: 3887 - protein, 230 aa, Thermoanaerobacter italicus Ab9
MKDEDKVHDYWQSYSDLMAALLLMFALLIVIMIYKYAGIAAELSLQKAKVDDLIGVRARIIDQLFKEFSNSDMTLSIDPQTGAISFSEGVFFDKDKFELKEEGKRYLNEFIPRYLSILMDPRFKKYISQIIVEGHTDDTGDYMYNLELSQKRAFEVVRYILQSNIKGIDSKTKADLMSYITANGRSYSQLIIENGKVNRQKSRRVEFKFRLKEEEMIMEMQKILGKGSVK

SEQ ID NO: 3888 - protein, 931 aa, Thermoanaerobacter italicus Ab9
MIKISKDLSDRGIKIACHVLKKRKPAEIKIPLFLNPVEWLKDILPDEMEVLNVLEGLWQEGILQEENNFYVIPYEFLYNIAEDQRRILCLPVEDNSIKVYIKAKGILGSSDFALIPDIYIKDEKMGPLDKRIKNVVSHNGCFYLIPLNLYSLLNEIDAYKPTADPLLQAKIIAKVKYKAKSANVTFDKFLESEEVYYSEKLDVDIVKHSDDHIQIVPVLGNEIDSLLKDSKDKVLKQHNTLYGEGIKRKRIFLEDRVVQNYNKILRQGHLKGTQIPRFLTNPYSILPEDIDLSNFSKRVKELGLKVYRANPYINIKRDKDSGWFDFEIGGIIHEDTGFSLDEDGDYIRKNELKNNAKIDVEEYRHLVQKAVESGEDYVNYKGNWVKIDREQASRFLNIVDNEQFRKTQRIDITRLPYVLKIYENIENLEYNETALSLKKQLTGDFSISDFGYPMYLKNCQLYEHQKEGFLWFKGLYENHMGGLLADDMGLGKTLQIISFLCYLKECNEIKPTLIIAPYTLLDVWESEIRKFSEITSVYRHTGYKRYKTPKLLKNYEITLTTYETLVRDQLLLGQIDWQAVVCDEAQKIKNSTTLTTTAVKALKARIKIAMTGTPVENNLGELWCIIDYVQPGLLSSYHEFRKTYQIPIEDAISNGSEAYVEVKNKLLNTIRPVYLRRVKDGILSLPAKNEFFLEVELTALQEKLYCQLIEDYKNKGKSESPLGVLQKLMELCAHPRLVRDEGEVNTFQLLSESGKLQRLIELLNEIKRRGEKAVIFTHYIKMQAILRKVIMDVFGINCPVINGSIKGDRMNVIDKFKESSGFGVIILSTRAAGVGITITEANNVIHYTRDWNPAVEKQATDRVYRIGQTREVNIYYPICISSRGKTVEERLNEVLQKKLQLLNEVIVPSRCLSITEENYDYLLQDFSDWSA

SEQ ID NO: 3889 - protein, 541 aa, Isoptericola variabilis 225
METLVSNTTLTLAIVFCIVIGSAAVLTWVWTVRFARLARARVDGVRAVLANVPRPVTAQHRTHLLAAAQERGGEVSHLWSEYDETLVADRHGRLLNTLDADYYFRTETLAPELLHNRVLAIMPSLLTVTGVLGTFLGLTLGLQGIDFDGTTDELTAGVRELISGASLAFITSVAGVLASLITQIVAKMHDRSVEKVIHRLQVELDEIFEKQTSEASLVSIMNSSSASEEYLAGLGEQIGRSLQEAVAPAMQRMAEQAAQQSEQVFEHLVDRFSSGFEELGRTLAERLDASSATLSQTIEYLGDKLAQQADEHNERMEELRAATARQVELLDERLPRVVEALEEATARLDAVSEHLAPSAENLRVTAESFEATSTAFRDVLADSVEAFEEISAKHNGAANSIAALTERLDTLAETTVSASDMLKDASGVLHDGLGGLREHQEKVLAGMKEQQSSFLDGLRSHQTETLEKLSNEVDGFRSALASWFVEYSKAVQEQTNARMNAWNEQTHAYTSSMLDAARALSAAVEEIDDALSRRADQKAAA

SEQ ID NO: 3890 - protein, 277 aa, Isoptericola variabilis 225
MRRPVRRGRPGSTNDDSYWISFSDLMSALLLVFLLAVVLLVVSLTNKEQELVAQQEQAAEAEAAFAAQRESLESQVATLSDREETRAQLVNEIAEQLRDRGIRVEVSEDSSVLHIPTSALGFDSGSYDIRPAHQPVALTIGTVLADALRKDERYAILDTVFVEGHTDNAAFGGLEGTGNWGLSTFRAISLWRLWDAALPQEKQLDALRRDDGTPIFSVSGYAESRPVEPAQLTEEQRAANRRIDLRFTVKGPTADELATIVADVSEGATAGAAGAGS

SEQ ID NO: 3891 - protein, 514 aa, Isoptericola variabilis 225
MSLTLPSPRVALASWPEDMPEKWQRVAAEAKHIARNAGSGRRAEALHGPVRRLLEERRTDELLTRMGDRVFARVVVALWAEEPRLAQRSMTPELVRAVVERPEGRPVGHPTAITLASLFLEHYDRLDDWHAGLFEAVASTVDVAAHRTHPRAHRDLVEVLRDLRRYVVERDGPRAFARHLITSGATPEKDRDARALCGDNSGRYAQVLRNTFYLELIAGADHSAEGHSFLADATARATALRRDEDDRRFGIAVLSALCDKSDTAVPSTEWVDAVLAIGGDPRHEQSSTWRDWWAHVDEPLRARAVRWMSGADLRAFLRAVRVYGDETQNESLQRMFPRRERFLMGLYETGRVQATRLILGNDVRRTMRRVTNINLVDAPRFDDMNTDTAIVFVDCGDFHLVEGSHKFKLHLYLGRPGPKLTDPRRRAYTRDELIHVIPDAHKRRHPLGERAHDAWTHDQGGAWLRKALDFLREGGIAIDEAALVDTHDMEDLLRRRSGLAPRRRSPSRAAWRRR

SEQ ID NO: 3892 - protein, 1005 aa, Isoptericola variabilis 225
MKLRDLLRKTPMRPDVAGEPPRLFDVAHGETTTFTTTPETFAELLAGTGTRSIQEQFLVLETLADEGRARPAEDGFEVTAEELARLSDDEAQLLRLPGRFTGHLEAAFRSTTTRPDFAVDLSLRTGRYPEPFRRTGAVVTLGLAQHAETYRLSPPALRALRAVEAHQRLSPAARTEARNMRVVAELQAAQRMAASQDPSTNDPHFDLDLRHFEQFTTRVPERVGVVVEPQDDGSLAIMPDVGVAPADLRQRWHQLPVDEDADGGVLRVGKELVLLDRERLAGVREVRRRPRIPKEQVREFLGAPGAFFDPDLVDVELRFSWLVAGLGRLAPVTFAQAADAGPEWISKEHGLTAPEVLAERPRTVSEHEEIEHTVAEAWERGEDVIPLGEDIVDISNRSRVEEALAVSRERVTRLGLEDAEDDVTDLVSAEEPSGPQVRVGWMLDDAEDLSERLRQAADNAALQRPVDYASLCRTPYPHQVEGIEWMARLMQASLDGADDDPARVRGALLADDMGLGKTFMTLAALAEAQRAERARTGSARPTLAVMPVALLENWLDELEATFGSFTGPFDDVVVLQGEGLAHYRTGRGRETAVNEDHLDHDGMVRRDVLPDLMRLRVGERFGDARLDRPGTLVLTTYDTIGRYQVSLAQVDWGTVVFDEAQALKNPDILRTRAAKALRARFKLLATGTPVENSLRDFWSLLDAAQPGLLGSWAQFRERWDAPMREATGERHAELGRALRAAVGPFMLRRVKEDHLDDLPPKILHTGEHARMMPPAQVQAYDDEIARYRAKAGTNGAMLGALQRLAQVSLHPGLVQDEVLADGVGAVDLSARTKVTVREILDGVRAAGEKAIVFASTKRMQRALALWLRDLYDVPVDIVNGDTPATGSEDSRVRRIRRFEQRPGFGVIIMSPLAVGVGLTVVGANHAIHLERHWNPAKEAQATDRVYRIGQTRPVHVYHPMAIHPDTGSFDVNLDRLLRSKIALKDAVVVPEAVTEDEVARAMGLA

SEQ ID NO: 3893 - protein, 706 aa, Vibrio antiquarius
MTNSLNLSSLWPDLSSLNVVPPQTPEQLSALFVVILWGVALFFLIWSGVAFIRARQRVVWLNKSLDDAEKSTPSDIRNDLISRAEKKKNSVGHLWLEFDETLLEVKGADDVVRLHNTFDADYFFNSSSLAGGSTENRMIAAVPGFLTALGVIGTFVGLQLGLSDLNIAGNVDVNEMKNGVAGVINGAKIAFMTSVWGVLLSVAFNFIEKILEQVIRKRIKSLQNRIDRMFPRLSAEYQLQSIANNSQQSRESLQGLAEKIGEKMQESLVQATQGIQQGLESSLEKIMAPAINKLVDETSDGNQKALESVLQSFMDGFGQQGEQQRVAMDSASQNVNKTLESMSTSMAAFVNKLEVQQNASSEREKELISTISVQVSELVTQGNEQKRVLTEFVEKQVSELGEQLTKRESAASEREQKLASSMESTIKDLVENVSAQSQVLTDFVQNQVGQLTQTFSERDGMASQMEKERNDIFVNQTQAMKAGTDELLAQVKAATESQQITSNNIIEQGKQLQNSIDSSVSASARATESMQQSASELRVAADSMNVFGSNIKEAGNKLSGAVTEAVNSTKDLAEQNQLGAVKIQALREQLLEDTSKFSAITDQINNMLISAEQSFSTLRTTQNEFLAEQKGNLNELTSEMKRNVKELTEQMAQLLEDYAEQANGQTAEHLKVWANSSTQYAESMNTAVRAISSVVDEIQDKVSQHA

SEQ ID NO: 3894 - protein, 244 aa, Vibrio antiquarius
MRRGIRSHTQNSVDEENPYWVSFSDLMSALLVIFILAAVALIIELTQKTNDVEAGIEELKQAELARKNIIYDVRDELAKRNVIVEIADNDTVIRIPESTLTFASGKSSIPNDATIQQAVKDIGVVLHSAIQKKDRFQYLDTVFIEGHTDSDSIHYRGKGNWGLSTDRAISVWNVWQNELSLTPKLGDLENAYHAKLFSVSGYAATRRANLQESNQQEKSQNRRIDIRFTVKKPSIAELERIVAQ

SEQ ID NO: 3895 - protein, 483 aa, Vibrio antiquarius
MSLNIKKLKVSLPANPFGQAIKDFAHLSNQLEVLSKSAGIENNKFRTAYGEVCNALASKKRVEDVIDSSVHVRALALSLHTDAKKNVSFTRRLLNKITEIVKKPSSLVIESFYQHFLSEYDRLADLEATADWLLEAKRLRGNDEQFDENILSTNGPKWLAERAIQNNVDFDHLLAEMKLERYANGRYLTAAKGIYYIEQLNTIPLGQDHPLLEEVQKTAVFDSRYDSESLLGHQILRILIGRSIGSHISETWMNVILAIGGDPRVPSSNPRYIKWWKGLEPILIQAVRGWLSKLDLKLFLEALEDYSYSSANYELQRMYPSRKCFLEGMFDAGVISNTRLYLSQDAARYLKRNYDPKHLPNFSTVKDGDKSIIYVQMNGAHMVEGSHSCYLWLYKHLDSSVCVFNYDIVRPTYSQLTSGINNQMTRLSSGAVAKITHSPIGYSWQRKALTALRGLGVKLTPKDVLSNEDYIDFKQRYGVREWS

SEQ ID NO: 3896 - protein, 1149 aa, Vibrio antiquarius
MELTSLISKFFSGLDKTSQFELVCDDSLDFTTSKKTLEKIKAGKADEWITAQYVALRMLEEQGDVSSFPDGFIMPADTAVRLDSDLRILFGFPSVWQGTIDADIQGKASTPTFKVDLSVTTKQGRTTLNYTVDGPFIRFSQNEQYLLTPEQFMAFNAHKAHGNSARSEYDNLLYLHSLQEAQQSGCKLNLKHFEKLRILTPNKITVEAELNSQGELILTPNMGQSASHESIQKVLGQLQSDNAVTLKVGDEIVLFSEEKLMAVKEVISNRVIPQQQVKAFLENPTAYIDASLVDLDLGFSIRVHGATVFKHAYFGETDESGIDWFGASSSSDVINPISKLADRIRDKTTLEDVTKKIEDAQQTGATVLDYEGKSYDISEPVAVEKVLKEIGHKISNPDTDLSSHGEEEDAETESESAEIHVVDIDLNDEELSENSPKVEQLISDISWDGELNWENHKRTPFPHQDIGVRWILGVEQKTLSDSKISGALLADDMGLGKTFMALSAIEHIYQRQKISGETKKPALIVAPLSLLENWKDEVDKTFKHSPFKDVVILQSAAELNDYRMGGVEIRSQSTSDDCLEPKYSLKVGKHFGPGRLDLPERLVITTYQTLRDYQFSMCLIDWGIVVFDEAQNVKNPNALQTRAAKGLKADFKLVATGTPVENSLADFWCLMDTACPGHLGSYQEFRARYISPILKAAGDEVEEIRARLGRELRIAVGALMLRRVKEDNLKGLPIKHMYAGGDFENWKYLEELKSIMVGYQRDVYEGTISNQLENKESHALTTLMRLRDSSLHPRLSDGGRLDIPKNAKSARALYGESGKIVSLLETLDRVRSKHEKCIIFAVNKRLQSFLSVTLGQIYNLGPLSVINGDAKAVAKRKSAPTRKSMISDFEAKEGFNLIVMSPVAAGVGLTVVGANHVVHLERHWNPAKEAQATDRVYRIGQEKDVHIYIPLLHHPEFESFDVNLHRLLTQKTLLKDAVVTPEDVVPQPAGVGGVVSGDLIDKRITAAELDKLSWQQFEALCVELLAKITDSESAWLTNSGADHGADGVLLSNRGNILVQAKFTQRQYDGYKGIQEIHSAKPIYEAAMRSSFERLIFVTNSPSLAKRTHEIAATCGVEILGRTQLLTYLEEYEITLKEILSRLGKERLKV

SEQ ID NO: 3897 - protein, 706 aa, Vibrio antiquarius; identical to SEQ ID NO: 3893

SEQ ID NO: 3898 - protein, 244 aa, Vibrio antiquarius; identical to SEQ ID NO: 3894

SEQ ID NO: 3899 - protein, 483 aa, Vibrio antiquarius; identical to SEQ ID NO: 3895

SEQ ID NO: 3900 - protein, 1149 aa, Vibrio antiquarius; identical to SEQ ID NO: 3896

SEQ ID NO: 3901 - protein, 730 aa, Pseudomonas cremoricolorata
MDFSTLLHLWGAASSEQLIAPKMVVGLVFILCAWYFVRYFCRSFKLSAQLKRLTVSLQNVKTLDPSLRRSKLERLFSGSRLEHSWREYAETLHDQFELKEGEQVLLRSRATAGAAHFFSPQSVVDTPLGTEFYKHLPGILTGIGIVGTFFGLMLGLQHFDPSTPEQVNASVDKLLKDVLFAFIGSFISIMASIAVTLTEKWRLGHCYKLLEAFNETIDGLFDSGVGEEYLAELVRSSAESSVQTRQLKDSLVTDLREMLQNLVDTQVRESLKLADTLSTTYRDSGQLLADQVSGAIENSLKSPLEAIAGAVQAASGDQSGQVQNLLQDVLVAFMNKLEGTFGQQFNGLHELMGQSVAAMQSMQQGFSTLIQDMRSASESSNQSSSTMIAQLLADMQAGQNAMQAGMNEMLANLQASVARIGNEGEGAGARMAEQMEKLFAQSEARQQAMAENLQAFVESIKQSIGQGQQETMAKIAGSVEVLGEQLSAVFKQLEQGQQQMDQSTRAAQADLHQGTRDLVGGLDEQVKALLQTVSEQQKSAQDTVNALSAQTEQHLHSMQLGADKMRAAAERFETAGQSVVRASESTAGLMGTVQGAGAELAQASRELNTVVADYRNNREALAKTLAVIEGVVASAQGEASGRSQYLQDLKVQSERMQSLNREVYEYLENISGVLSNGFKEFGEGMDRALRQTLGSLDTELDKAVKSLAGGVEGVKESLEDFGDIMERIRR

SEQ ID NO: 3902 - protein, 247 aa, Pseudomonas cremoricolorata
MFGKQMPSAARSKDEGEKPFWISFADLMTAMMILFLVVMVAALSSVTQRINQAEQGEKQRSKDISQICEHLSLKAKTASKTIIVDCKDNRISFDDAGRFGHNQYALSNDGQSALQEVVPMILDAANSEEGRKWFKQVVIEGSTDTDGSYLYNLHLSLQRSEWVMCSLLDSRSPLQVGLSPEHQQQIRSMFLAGGVSFNNAKDTKEESRRVELRMQFFGLKEKESSLKPDVPVFTNTDVEKCQLAMNR

SEQ ID NO: 3903 - protein, 542 aa, Pseudomonas cremoricolorata
MTSSIARLSAAISQSLSAHRTVQAPEPLERFPRLAAAGVDLYERFERAEKALPPPEEKRRAAISKFRNVLPLNASEWRLVFAGLSDKSERVGPILDDDQLYARVHEEVHQRIEKRRLNRRDWLALCFSYFGYDAAKPAQNANWCLLREDVQLGFECVRDQQTRVKEWVQIVQQHQELFSEQAGATLGDQMFKGEISDLSALQTIAQIPDNSWLWRRIFTVLISRIFMLDDAEFSQRLADLIDIGRQHPRYMNDILSACLSRYHLAAYREKPSSLLKQLALDNWGSPQIRSRQNSWLQYVDNDVCAMVVAWFAKEDLEHFFNLLKGEAEVDQSRLHYWLRFANQMSYTRIVMGSDAWHDSGRDFVHFRGKNKGRLSRLVGGPGHNNAVIMQIGNYFFVEFSGTGNACYVYQADKSPFNPDKLQLELASELKQPNRALDRMRHSPAPSRPDRIEGWLSKFDYALEQWGIRVQSQIAAAGSAKPLPFEDQVRDALKSVKHKVYDQRERGGAFQVQLDDHDPAAVTALQRLGFRPVNNQPLRFWRQ

SEQ ID NO: 3904 - protein, 1082 aa, Pseudomonas cremoricolorata
MLKRFLKGIGLQPNSAAENSEPVFSIEEQGICYPLSLAESTESWSLASYLDQLEEEEFVSQLSDRWLLTWDELYRLLDEPEHETSLPLLGLPPQKALIPQLSSQGSLASDDFKVSISGWRDPQSNASVQVQRTGGIVQHQGAKEMLPEASWKLIGAVRQLYLAQQNEPGEVTNQIGWASIRKLARKAGAGMDGFLDKTVVIKPEKLRLNPRKSTLGDIPVIELQPSFDGQPANWLESFDGAKQVQDRYRITGDDGSLTHVLIEPEVKSVLDYVRSLPGRRVAGDDALSFVRNPYSSLGESAAHVLDAEAYEDELAEAGIFFHRFHLEPKLDEAGQRIEQVTLTLEPISPTPQAPIEIEFKAAHEFAPLVHELQLKLAAGMPAGFWQGYELELSDFDLRQLAGINDLLKRWQNEAAGIEFDSVLDLSLYGDRVTGIGEAERITSPFLVKEATENWLPKDVAALGIDAGILGRWDPSDRAQFEAFGQRLDEARAAGDDTVCLQESEIPLSIAAAEQLLDAWSKKIAPVETGQVEQREKVGRAVLQIGHNIDEPTYVQVRQAALSAALGATPELPGLLKPEVVLRDHQLQGVAWLQHLFRLSPTDVSGCLLADDMGLGKTIQLLTFLVWYLEQYPKDQPTLIVAPVSLLDNWERELHCFFFADALPVLKLYGSALSAVKFKKDEIPADLKAKGIKNLLRPGWMGDARIVLTTYETLRDQEFSLARQQWSIVVCDEAQKLKNPAALVTQAIKAIPARFRVACTGTPVENTLIDLWCLFDFIQPGFLGGLNQFGRDYQRPIEAALERDTDALERLRGLIEPQTLRRTKQDIAKDLPAKIEDAACRSLGMHTLQRNLYLSEISAYSQKQQIEEQLDQKTSGMLGLLHKLKLICAHPYSVQPDTRLRDNSPKLQWLMKTLESIKRDGNGDKVIVFTELRDIQRELQHAIQKHFGFRATVINGDTSTSSQSANSRQRLIDQFQELPGFAVIILSTIAVGFGVNVQAANHVIHFTRCWNPAKEDQATDRAYRIGQQKDVYVYYPTVRDAAMPTFEATLDELLSKRRALARDMLSGASELQASDFEELLGAR

SEQ ID NO: 3905 - protein, 666 aa, Hahella chejuensis KCTC 2396
MKNAEYNLGNLWPEFGRILQWDITSPEGLSALVVLALIIIALSLGVWSLINYDRAIRRLRFYKRLLTGIAPEELLEKQREILSHALKSTKYGKLWREFDESLVHIPQKRRLCNTLDAAHFFNTHTLASGLTENRLIAAVPGFLTAIGVIGTFAGLQMGLAELNVTSEDFNELKTGIAGLIGGASIAFMTSVWGVLTSVIFNIYEKSLERSIRGKISQFQNEVDYLYPRITAEQSLSNIEDSSRQSLEKLAELDEKIGHKMQEAMREASGAISESVAQSLNSILAPAITRLVDSAHSGSEKALESLLERFLTGIGSAGESQRAMMEQAAREISSASGGMTQGLSRFTENLEQQVKSLITQSATVTGDIEAQLSHQLSQQRELDASRQQQLQQEFGGFLVSMEEQMRNLAHQSTQMLENVQTTLGRQSEEQQKREIARQRVLHEQFTSFNNSQVSLTESVEKLLARQEQQHTSLQSALSTLLDDFKDLSKSHREATHGMLQAGADMKASSNQLGLLSVNIKSATDAMTDKIQNAVSLSASISEQSQALLQAYKDLSDKLQLTNMQMEDTATNLDKAAQTASQGMSIVGSHFDQLSTSLKAHIGDLEKQIAELLSDYSDRVQAQTAERLNVWNEQTNSYLGVMTDAVRTLSEVVDEVDNKVSIRTGSHG

SEQ ID NO: 3906 - protein, 263 aa, Hahella chejuensis KCTC 2396
MRTVSKRYPSAQVDEENPYWISFSDIMAGLLVIFVLAAVALILELTQKSEQWDDAIKEIAKAEQVRKDILREIEQELNEKNIPVKISDNDTVLRIPEDVLTFRQGRFDIPKDQLHQDIALEIGKVLFHTISKNSRWQYLDTIFVEGHTDKVPYRNSSIKGNWGLSTFRAISVWNFWNTMLEENERLGSLKNHMGKTLFSVSGYADTRPVPCTNADPNVTLKELCPVGVLEESESQQKNRRIDIRFTVRRPALEDYHAVKQALK

SEQ ID NO: 3907 - protein, 493 aa, Hahella chejuensis KCTC 2396
MTLKLRSIEFSLPDWPDKAFNGIREAEKRLADIAGSAGKGSTRFQDTCSRIGRAASQGESAILANINDPIEIRALTYLLSVPAENHAPIMLTERIIKRMEEIKSPMSRLSLMQLVRAFFFRFDNLVSPLGLQTLIALIKDQLRTLNRGAQGGLSTYASSSSLLFSETGPAKLAEKAQREAIDLDVLFKRLSLTGLGESRYLTLARCQYYLRTLETIPINQSHSILSEICKKEVFTTPLDESRLVGHGVLEIIIDRSKGSVIHTDWRNAILAIAGDPRVPKSAENYQRWWSLLGEERVALMRGWLSRFDLKLFLSILEQSAKDSGERDMERMFAPRKKFMEGLLEEGVIVESRLFLSTYATRYLKQRYKKEDLPAYARVRSSRTSMIYLNIKNKVYLVEGSHSFPIKIFNKLAPESRLPNYNIDEVTDEQLRNGEMERFHRTYGLNGCLSQTHRDLIWQNSVLQFMKSNGVLIRAAKVIRQESYRAYKEKFGSN

SEQ ID NO: 3908 - protein, 1003 aa, Hahella chejuensis KCTC 2396
MSIRDLINRLTNSSHDIDISWKVDPVEGLDFIFRPEALADIESRAINNPMFGIQYAYLKGLHEEGVARNNANGYTIPAHFVAELDDDFCELFQLPRPYPGLYRCRIKGNTGQAAFHVSMDAELPDGCVINDIALFGPFLKFTDEELYRLSPPEWQALNALKRHIDLPADSKNEYENNWLIFQLQLAKKAGVPLNLAHFNKLEISLPTSIGIAVDELPNGDLSLTPTFGADIAIDDIKTRLDQLPTNGDHCILRIKNRFVLLDSKRLEAAREILTSRHIPKEQVATFLRSPTAYLNAALIDLDTGFSLRVHGAEKFSHRYFGDVEKSGIDWFAVDKSIPEPFERIKDLVVSEDNLAELNELISDAKNGGAELIEYADKKFDISDTENVSQTIDRIREALASSDLDKAPPALTDEKESDTTIKEQAVVSIDSNDEKEEFVSNIPLGGINATIQSFATDNLKRSPYPHQSEGIKWLLAHMDIAIEHDAPKGALLADDMGLGKTYMALVAISEWLRRQKPEGKYDKPVLIVAPLSLLENWQAEVNETFIKSPFSDIVILQSGSELSRFKIKGASRETQQVFEDKDIIEDYEQIRYSLKVGGLYGSDRLDMPRRLVLTTYQTLRDYQFSLSRVDWSAIVFDEAQNIKNPNALATRAAKGLKADFKLLATGTPVENTLKDFWCLMDTAVPGLLGAWQTFREEYISPITSADPDSINNEKLRIGKALRDRVGDFMLRRTKEEKLPGMPEKTIYSGDPNDLTDSYLPTLSGMMSGAQLKYYDEVIASVHGRKIEDKRRIVLPSLLKLKIACIHHDIGSGYTPSNSPKEFLRHAENSIKIQAMLDVLKDIEKRQEKVLVFATSKAVQAYTSALITTLFKIQAPIVNGDTKAVATPKDDLTRKAIIDRFQSEKGFRVLIMSPIAAGVGLTVVGANNVIHLERHWNPAKEAQATDRVYRIGQKKNVNVYLPMALHPNLSSFDIQLNTLLNNKVTLSDAVVAPTSVQPEDFSIFK

SEQ ID NO: 3909 - protein, 729 aa, Cedecea neteri
MSWLNSILAVLTSVEPHKVPVTVIGLVSFAVICFFFFYLIRVFKIIFGLRRYTQSIITIKENQPESQLEHLKNLFQQPELKHAWSEFEESLHPQRELENGDEKIVRVRATAPSASFFSEQQLVDIPLNTEFFKHLPGILTGVGIIGTFYGLMIGLSHFDPSTPEQVTSSVNNLLHDVLYAFLGSAIAIFASILVTWLEKLSIAKCYKYLEKFTAALDSLYESGVGEEYLASLVKSSNESATQARHLKESLVTDLRDMLLQLAESQKVENERLAATLSTTYRESGQQFAEQVSGAIENSLKSPLDKIAGAVQTASGDQSGMVQNMLQDVLTAFMAKLDTTFGQQFTSLNDMMGQTVGAIQTMQTGFAALLQDMRQVSDDSRQGSAQLIEQLLSEMKSGQQALQAGMNDMLTSLQTSVAKIGAEGEGAGERMARQLEKMFADSEAREKAQSEHMAAFIEAIQNSVQQGQSATMEKMAASVESLGEQLGSLFGQIDKGQQQISATQQANQQSLHEQTQRVMSEVDDQIKQLIDTVASQHQGTTETLRLLAEQTNRQIQDMQNGADKMRLAAERFEHAGDRVSEANHLTADLLNKAQSAGSSLSLATSELTSVVADYRNNREAVSKSIAMLELLAANTQSEQTTRSQFIADLQLHGERLQGYNREAQAFMENVSDVLGKGFEDFSEGVLRSLDKTLGKLDVEMAKASTLLAGSVEQIGESVSELDDVLSRVRA

SEQ ID NO: 3910 - protein, 245 aa, Cedecea neteri
MFGNAFGVKKRRSDEAEKPFWISYADLMAAMMVLFLVVMVASLSSVTQRIQRAEQGEKTRGQDISRLCERLEIHARNVNKTIVVDCHDNRISFGEAGRFDHNRFFLNAEGQKALQDVVPLVLDAADSEEGKKWFKQIVIEGFTDTDGSYLYNLHLSLQRSEWVMCSLLDSRSPLQKSITAEQQIQIRKLFLAGGVSFNNAKESKEASRRVELRMQFFGLKDKRDGADEVDFPAVVNKEVCQLVMP

SEQ ID NO: 3911 - protein, 560 aa, Cedecea neteri
MTPALNSLSQRIAARLSSNQREDNYLHNDFHTLASAAFDMEKRFDKAEKIPSPPQEMRLEALRRLRLAKELTEREWRMVFYGLADNDPLYPDRPILLEDDVFFPEVDNAIMKRLESKELKRKDWAALCSSYFAYQHESPEENPHWCVLRGHIAQGYSVVKAAIRREKSWMKTIEFYHDIFTPQAGGVISQQLLSGENNSLSSLEKIAQIPDGSWLWKRIFMVLLAQLDTLDDPQFLEKISWLLGLAAQWLRFRDDIMTATLTRYYHSTYRDQAHTALKQAALEYWDNPQLKSQQNKWNQYVPEPVAAMVRGWLAKQDLMHFFELLRGNGDVDQARLHYWLRFANQMGFTRIVMGPDAWHDRGNDFMKFREENRGRLSHLRGGRSFDNAMIMQINDYIFVEFSGTGNAMYAYRVGQAPFNPETGSLDINIHLKDKYRNVLRLPHTPRAEGYNKVRITGWMLKYDDELRKLGIRWMAEEPIKFVDKKAPSPVSVSDVKIINPLRDTAIQRLVENTSCVVSDNRQKGGVLSVQLKSPDETTERELLRLGFAPVTKEPHRYWIK

SEQ ID NO: 3912 - protein, 1083 aa, Cedecea neteri
MLKRLLSKLTGNRQQIERHLKNQYQVEDNGLSFPLSLVDVPELWALASWLEQLAEEDYLISLTDRWLLSWDALYRLLEDEEHASSLPLIGVPEVLPLRASLNSRGALSDSDFRVWIAEWATLPARKPIRFSRTGAILTHENQQYLLSRENWALIQATEQLSAQQSQTPGETTNQLGWAAIRKCAKQAAAKFDDYLEKTHVVKPTSLSLRLRKATVADTAVIEIEPHFEDQPANWLGSFDKNSQVHDSYRIPGENGELSHVIIPPEVKEVLNLIHSIPGRRVAGSEALSFVRNPYTFLGEDAASVIAPEEHEQALFDAHIFFHHFRLQPRLNDENKIEDITLVLEPVSPVPQPEVTFLFSAPWELDKFVQALGISVAAQMPAGSWQGYELELSQFTEQQWHYCQSLLSRWQQEIEGKEFDDVLDIDKYGDRVIGIGEFEKISSPWLTKAQSENWLPDDIDFSTFSVETLDGWQPENLHHLDELQERIIQAEAAGETHIISPWNDAELPLDAAKTFSKNWEKQQNTANESQGNVDVKAARAVLKIEQNIEEAAYIKQRRDSLLNARHAEPEIPLSLKEHIQLKDHQRKGVAWLQQLFLLSPQETAGCLLADDMGLGKTLQILSFLVWFIEKFPQEPPSLIVAPVSLLDNWERELDNFFYTAGIPVLKLYGETIKAVKYPKQAIPAHLQSQGIKNLLKPGWQGEAKIILTTYETLRDQEFSLARQPWSIMVCDEAQKIKNPAALITHAANAVQARFKVACTGTPVENTLVDLWSLFDFAQPGLLGALNEFGKHYVRPIENEDGRDTERLESLRALIDPQTLRRTKEEVARDLPQKIEVESCKQLTLSGVQKQLYLSSVANWQQQQALSEGMQQAGTGMLGLLHRLKLICAHPAVVNPEPRFRDNSPKLNWLLKILAEIKHTTKDKVIIFTELRDLQRELQHAIHQKFGFRPVIINGDTSTKSQSQNSRQRLIDDFQAQPGFGVIILSTVAVGFGVNVQKANHVIHFTRCWNPAKEDQATDRAYRIGQTKDVYVYYPTVRDSEIITFEETLDDLLQRRRALARDMLCATPDLSGADFEAVVARKPSI

SEQ ID NO: 3913 - protein, 641 aa, Erythrobacter sp. SD-21
MEITEWLGHGLIYFFTEIPLIGDAMAAFLAIVLIGTAFAIAYRYKRQYHAPLADAIDARVRLLDEITGGSTADVDQARLEFARRFNDIDAQMMEANDAEALPLRRTWEEYRETIVDPSADVLQNSARPEHFFVNLGDRHRGLNWFANIFIAIGLLITFLGIIAALSTLDFSGGVDAMQERLNDLMKVAGAKFWASVGGIVASIVLRSYDYRFGKRINDGLSMLCDKLEHGMAYLPPQRIASDQLAQLKEQTPALRTFSEQLAAALDGALEKQMAPMITHLGSIQQGIDKISGGGGEAVRDAIASSAGAEMAGLADAIGAMTVSMATMSERIEKQTGEADRQIEEAVRRFGQASEEMRSAFGELNRNFGVVADRMREENEQASELARQRMDELLSNLGNTLDDMKSGLASAASQMGEASARAANDAARIGQEAMEKSFSEFVERFNQTGGPLVGSMKDAGDAISTSADRLSTAQSAIGDHARAIEQVAARSSDLATAFGTVANDVEAATAPVRQSAVSIAEAVKSVETIVSRNAQSSESARDEMRQLAAALSETASAASSAWSEYRARFEDVDRALGDAIEKISDAAGNHASNLNERVGQIDKALGDGVAQLAGALEPLTTLRDTVEELAGILANQNREAAE

SEQ ID NO: 3914 - protein, 242 aa, Erythrobacter sp. SD-21
MEGVVRRKPPEEGESYFMSMTDMMVGLLLIFIILLAYFALNLQTKTEELTGANRTRAEILNDLQQSLKDRGLQVEIDTKTGVLRLPDDVLFDKGQWELTERGQAAISKVASAMVEVLPCYTASDLCEGERSPHLIDAVFVEGHTDSDVMSGGMNNYGLSVRRAETTFTMLQRNQPALRGFLNRPAGEDGSAPILSLSGYGPDRPVDRGDSEEAKKRNRRIDLRFLMTTPSAGLDRDILRQEQ

SEQ ID NO: 3915 - protein, 429 aa, Erythrobacter sp. SD-21
MGEAEPVIELKPFLRGAADTGANGLPRFQLNRVLRGAWCDPEFDELGVAALERADVDHRRSSDQAVIDGYLTYFPTGRSIMPMLAEAASRAAVRHDWAWRERGARWDLFKPQMGPAKVARDFVTRDADGISHLMRETGLGANLAASGFGQATFAETCKATAELQPAEAVGPQRSILRMFDTEAQAGQLELVVRALLEPWIRTKPEPEHRKAISEFLLDQVGDPRLQRTRWDRIVRSLAESIGEERAHEVTQVFKRWLTEVAMREFFRAIAKTTDRPDQWAQRENFWMAYLDEGLVSDAWPALGIRARNRIEDLIRQSGERPEYGMIRGGPASSSSIIMQIGDLRISEWSDNGSCRFWSDTDPGAPKLYAKVYDGGKLRTTNGRSDFEYESHVPASPGWEGKFAGIIHRRTSIAHPRFGRGRGRNWNDRW

SEQ ID NO: 3916 - protein, 1270 aa, Erythrobacter sp. SD-21
MVTTKFIATQNEGGGETIALLREQPGGLFRRASSEIVPVSEWPRVAPEAGQAALALARALDDGQISEEAEGIALPPQIVARLDEADAFALGLPPATSMTLQLNSGGSLAEGTIKVDMRWVRRGGLPVRADIAGARLREGGRVGRIPEPIYSAFQAALAVNAADDPDQRRAAFAELRSTLGDDIGTGIEADGFLERVRIAYAANFSLNAKTDHGRFDFDPVLFSRNVSESAEGDLVDEEEASLLTPQDNQHFQRRFRGQDGGRRSYLLSDGTLLFLDPMLGKALDIVRAKQVGTSQEKREFLRSPQRVLREELKLDAADDDEAADRLFIETQQFSERVSGIEVWQKPVLPWIKPKPNSWLPEGFGLRIGDPPDARHVELAPGEAETIASEVETAIDAGKETIAWRDESIPATPATLQAARAIADLEREIADEVEGRASDRTERESVDIFFLQVGENFEHLDYARLPRPDAEVQDFDAPGLPKGLKSEPKPHQVQAFAWFAEAWERRMPGVLLADDMGLGKTFQALMFLLWLRSKTPHPKPVLIVAPTGLLRNWQAELSQHIEAELMGPVVEAFGANLRNFRLEAGSDIRGGTSRLDVSEWNEAGIVLTTYETMRDYHMSFARIPFAAIVYDEIQKLKNPASQMTRAAKALNGTIQIAMTGTPVENRLQDLWSIADTVYPGFLGSSREFESSFPANDLERLGDLQHRLIERDKELPPFMLRRMKDEILTGLPEKKARKYPVEMPTAQAQAYDLVLARARALRESGEQGAMLKVLHMLRGTSLHPSPPRGISNIDEYIGQSARLQKTFEILEEVKQRGEKALLFCEDLEMQTFLAMAIQERFALERRPMCISGKVAGHKRQEMVTAFQSSPASFDVLILSPKAGGVGLTITAANNVIHLSRWWNPAVEDQATDRAYRIGQTRPVTIHIPMAVHPDEAIGPSSFDQRLDALMERKRSLSRGLLMPPESDRDVEDLLSDVLDGRPAENRDRSSAYAAAGQAPVDLQDTNYSASIRQAEPPAPPVGQPEIEEPTRDEESASSRGPASDNTTSSANLDPAAEHAAEPGLEEAARLHPHSDPGETASSNAERKNRRPILSVRTPVEAAEARVPFVQRVVFEQYGQRDWTIFEQYARDARIERLEIQDPYCCADEQARGRLINFIGRFEQLASGIAAVQIVTFDADSVQTRDPESTRDQRQDLEDRWKRMLASVPLHLAQKSRRSGGDLHDRFVKAKLENGDTIIWDLGRGIDGVMNARWSCVVNAHRERSAGRDPAVH

SEQ ID NO: 3917 - protein, 663 aa, Cupriavidus taiwanensis LMG 19424
MTTDFFALLSDVLHWGIGGLLLLALAGFVMQFLRPALRTRRELGHALERLEQLKAQGPVLDLDRVASDAMLSPTLRHCWNEYRDTLHGQKQATATGMMEVARWRATAMANGFFTEQALVESPLRSEFYKHLPGILTGLGIIGTFSGLILGLQNFHVSDDAAAVRGSLESLIYSVGGAFMVSGVAIFLAMAVTTVEKMMLNGRYTQVEALCGLIDSLFDSGAGEEYLQRLVEASETSATQAMQMKESLVTDLKQVLSELTQQQIATITSTSAQLGQSITHSLSEGLAEPLQRISHAVESVGNSQGEGVSKLLMDVLANFTAQMEGMFGTQMRGMNDMLVQTANTIQTASLRFERLAEQIQDAGTGAADAMAKRMDEALQQMQARQAEANDQMRAFVEELRRNVANGQSESAELTRSMMRDLSESTGALVRSLQDQAHAAYQAHAQRQADMEAQNGRLVAQQAEQLAGLTTAVNESSEAMRQTVARLEAATNANVERMGLGAERLQLAANRLGDNLDAMRAASEGMVGATGKLDQSARTLDTALLATQQALGEQKAVRDAVTAMVSALRDTVENAKREAGLTSELVGKLEAASRQLAQAQDDAANYLEEVNDVLTGAHGAFAQQVEATLRHGNKVFHEELAQATSLLKGAIQDLADVLDTVPTPA

SEQ ID NO: 3918 - protein, 252 aa, Cupriavidus taiwanensis LMG 19424
MLGVKMAPRRRGREEGEKPFWISFSDLMTALMVLFLVALSVALLAVTKKISDDEREEKARAEQISGLMTEVRKVAEQFPGVRVIDRTIDFGPRGRFEREGQNTLSAQQRALVRDFTPRLLEQLRTTEAGRHWFKRAVVEGYASQTGKYLFNLNLSLERSSRVICELLREPPAGDTRLSDADRQLVATRFFVGGASFNSLRATAEDSRRIEFKLEFKTRQERQEELAQPAPAADTAALLLALDPKERCPIADR

SEQ ID NO: 3919 - protein, 554 aa, Cupriavidus taiwanensis LMG 19424
MPYRRPIDALQARLAEAMSEAQVFRALEWGHPRAMTQALRELRHGLVDVGEVAPSKDQVQASLRRFGATQRVENFTELKYVCHGITVPVGDERWRVIDNGPLFNRLLTLVDEQQGRPKQYRRCYQGLLHGFFGFDRRASAASPAQVNWTTLRGFLDSRLDRLVQSANRRGLCPTWLGALVDHRNLLTDNPCRRYADALIQGNTDELRKVCADLGIANSSWVWDEALMAYVRTVCEAEDRAFHDRLSGVLQLVNGRLDLKLPETLAKRATAMTVVRYARCGERPEHQSLRDTCLARIGNPWMQRVAWDAAVGDEPARKMVEGWIKRRLIRDFFEHLAADGTADRRRLEYWLKWEPQISQMWFVLGRDAWRDRSATFQALRKRMEGQARELVDSDDGNNAFIMQIGDLIAIEFGKTNNACFVYHAANFKADLDAPRFDTNRDLKQRLNGERLTHNGAWEWKFDESLKSMLRSTPSPQRQQPATDIRSGASPSLSAADFREIAKLCADNSVGWEDNRRHGGALWILLTEPKRVPRLSVMLRSLGFNYKEGRGFWIKG

SEQ ID NO: 3920 - protein, 1097 aa, Cupriavidus taiwanensis LMG 19424
MFGALFGKTRPTPAPATHRTPAVSTTAEGLRYPSPVDSAEAWLANPFAVAEHQDLGARLAQLHQEGLGRCEGAAFLLPWHDVYALLRHPDLSSYRNPLGIPADTNARPRLSSRGAIADAGFSILLDEWVDPQGRPLQPSPKLIGRSLHAGATVSLLPPPVAALLDQIEGFHATPAAERTQPFKERAFGNVRRLATAIGCPVSDYVARTVILTPERLQLALARRGEGEASVTEVVPGFDDAPPQWLAAFDRLPLQDSYDVPDGPSLVRVVLTPDVKAVLAEVKRMPGRRVAGRRAEAFVRNPFALLGEHSHAVLDADQFEQSLSAAGIRFKRFTPHAVRAESGQLTAVMLLIEEIGEAASPASDALTLTFATPDELARFTGKLGRCLDDGSQCVTWGPQELEILGDTPADLATLETWLREWHQPALWTAAEVLDLSHYSERIEDIGTEKPVVVPVIARQDEDGGWFEDNAAAGLRIDTGEDRTPTFVPVAFSEIPSLQAAVEAAEAAGATDLQLPGLADPVPVIEARRAVDALLAAQAALRRAEFDPSGGGSGGSAKKRLLIKHNFEALDYTEARADRLQMPDGQAPDLPQSLRPEVALKAHQHVGIAWLQHLWDASPHHCRGAVLADDMGLGKTLQLLTFMAACFERDPSLPPALVVAPVALLENWRSELSRFFAPEIPALTLYGDALRALRVSRHELDEELQAQGVTRLLKRNWIGDARLVLTTYETMRDLEFALASQQWSIMVCDEAQKIKNPAALVTRSAKKQKVRFRIACTGTPVENTLADLWCLFDFVQPGMLGALSHFSRTYRQPIEAKTDAQKAKVEELRALIQPQILHRKKTDVAKDLPAPVEHTPCKQLPMSGYQHRLYEGALATLREQRDTNPSAQLQALHAIRQICSDPHGFAEAGTRDLAIERLVNESPKMGWLIERLKALAAERSGNHKVIVFCEFRELQLLLQRVIAAFFGFAPDIVNGDTSADPRVAHSRQRLIDRFQDQPGFHAIILSPLAVGFGVNIQAANHVVHFTRTWNPAKEDQATARAYRIGQTRTVTVYYPGVISAQFPSFDVRLDALLGRKRELAADMLNGCSDLKAADFADFG

SEQ ID NO: 3921 - protein, 669 aa, Gemmatimonas aurantiaca T-27
MIEFMLPFLQAVSGTGRPIGEFLAGIPVEIQFFCYLIAVVLVASSAYGIIGARRVHAAAMAVKGALQQLGPLDDDTRLLGRSLGSIDGWRAAASRLAPAHHPLAEEIERELVTSLDVDGRRRFRLRNREGGLWTLERLTERYVNLDYLDAVPGILTAIGLIGTFLAIALGLSGLRSENNVVIGVDALLGSLGGKFVSSIAALLAALVFQLLDLWGLRLAYKKTHQSLIDAVADGFPGLSPTQQITDLLESAHRQEQALSNISSDVVNRFSDVFASNLLPDLGALLAKSVQTEMGPVLQQVATGISALEDGIRRLESGKQESIGAELRSLTENLETSIRRALEQMGAQFRDSLSGNTNDEFKRAAEAMQGSASVLSGMNNSFADMQASMQRMFEEAEKRGSEAFAEGEGRTRALNDLVERLVAQLGDSASANANQVQQLLVEAVSNMGGKLAEVTGELERRTLEANEQNQRTSEALLHKVTGAAERTTSETERLLAVIGERAGDFVAAADQLAELRAAVQSVLAETGQRVREMQGAADSFRSVATEAGAMTRTLREAQASHLKAAETVSGLVHRTGEVVERQAVVVQLSQDTYSEAARVLSGLDEQLASALQTISTHMQDYNRQVEKNFQIIMNSVNSKMPELFERLGGLLQQVTDSVEELGDVLKRQNR

SEQ ID NO: 3922 - protein, 230 aa, Gemmatimonas aurantiaca T-27
MQKGSGAASSSLTDILASLVAVFVLLFVAAQNNRGAGVVTARDVLIKQLRGELVTAGLDSAAIDSIPNDPSTVLVILPDSVLFERGDSRMSAAGQNVVRIATPLLAGVICADSIRQTLDQVVVEGHTDNTIPFGMRPEAGRMFNLELSQRRSMNFVATSTATLAERDTLLECYLGLVSATGRGQENPLPRIPADSSPQRRVVLRIRLKTEIRDSVRIVQDVIGGGGAENP

SEQ ID NO: 3923 - protein, 459 aa, Gemmatimonas aurantiaca T-27
MQKILDSLRRVIAVAAINVESRLALTLDPAQELGPLELALTRLRSQGPIDGAGRPSGIDPDALWARWTMSTQSSEEFSLRELRALCWDSRAVEDLRFLELLESDGHIPKRGAFLRGLWHCHQHHWRLRSASRLESYFLLATTQAEHRTRWLEQLNELPEMLTDNAARSVGRALFARLDAVGSTIDNLRLTAPGQLAQLALRACRSEWLDALKLYAEQNDPRVISVLHQGLGGLLHSDLTSKEDFPKVVEWLLELLDRSGDAYRKALADWIVSDRRLGHPRRIGTSANWMGVSEKARLAALRLFAAKDIGRFFDILIGRQFDTQSRRPFWEQYINSPQFVDYAIACDPEDRKRLIANWTDGVPDVARLDGAPDRHSAFIMRFRTIHYDLIVVEMSRANNAMYLFDTSDFEDEVGTLEKSRFRFSALKNRSVAARTWSHSHSWQFRFAGNLREFGIVRGPQ

SEQ ID NO: 3924 - protein, 1150 aa, Gemmatimonas aurantiaca T-27
MKEAQANSEPNTYWLSAAPGGLIVGKGQPAGSVSSPNLLLGANTDGELSTDIAILREQGLATDHEDGWRVSWPDWPLALDLGARSLIAHSTLCHLVLQIDRRSELGRSDFRYIVRWREGAHEVEVTRFGAYVRHEATNRVMHLDKRLLEIAEAIDHFNALTPAERSSRKNVWGTLASIAGNARELGARLDRHLDSNLVIVPPTIGLLIRGDENGNVSFLPRLPGEGDSEAFRLEFERALDIQDVMSVTLPDRRVARVLLSEPQREVLRRMRKVRHLPVADVGELLDDPSPIFDGVFDAIDLADISREYGIRVIGIGSLTLPTDVRPVGGPSVFDRMQLSELVPTPQLPLAPPASESAGTGTQRSVVSIDVLEAETGSVHTVRLSGDEAVRRLQGQVRACLADGAEHFLHEGVAIKAEPELVAALDRHISGPVPGREDDVGSVGRSGHLYLLINEHEDSLTPGLEVVPLPDGDVVEAPRSLPLALHDSIKLKSHQLDGVQWLSTCRGMPGRRGAVLADDMGLGKTLQVLVHIALLLESGTALDGLGSDRNGPWRPVLIVAPLLLVESGVWTEEMRSRFANSGRVFEPYVVLRDEGIRKVMHNSGERDYLGKPVLDPAKLMAHKVVITTYETMMAYQHSLAQLVGGRPMWSLVVFDEAQEVKSPKTKQSIAAKALDARFKLAATGTPVETRLRDLWNILDTVEPGRLGTQRAFVTAYERPAMKPNRGSERQAALDALRVAIRYERPGALLIRRDKRILSDLPERIEHRVKCTMTPVEEEIMGRIRADLGSTAGRRQPLAALQRLHLCTQHPVLAGAATGHDVDALIATSARLAQLLKLLREIQVQSEKVLIFARSVDSQRLLARVIAQSLGTQVDIVNGQTGVTGGRATSGTVRREILSRFRATPGFAAIVLSPFVAGVGLTLTEANHVVHYGRWWNPAIENQATDRAHRIGQTKPVHVYYLLGTYRAPEQRSFDEALDDLLRERRDLAHDFLSPVTEDANAELLIQRLGSSARPISLVARMEPTTVSEAAAMLLSLARSRDESAVWLDAEGMYGAHALVARQGVVLVARIVQVDSVEEQQLLLSAQRAWQDALGVRTEGLMLACHGSVDINTKTWKALRLELDSQSSVDPDYLLTPYRSVHDVRERLLRHI

SEQ ID NO: 3925 - protein, 730 aa, Pseudomonas mediterranea CFBP 5447
MDSSTLVHLWDAASYEQLIAPVMVVGFVFILCACYVVRYLWKSFKLSAQLKRLTISLQSVKTLAPPFRRAELERLFSSGRLEHSWREYAETLHDQFEFQEGEQVLIRSRSTTGAAHFFSAQSVVDTPLGTEFYKHLPGILTGIGIVGTFFGLMLGLQHFDPSTPEQVNASVDKLLKDVLFAFIGSFISILASIAVTLTEKLRLGHCYKLLEAFNETIDGLFDSGVGEEYLAELVRSSAESSVQTRQLKDSLVTDLREMLQNLVDTQVRESLKLADTLSTTYRDSGQLLADQVSGAIENSLKSPLEAIAGAVQAASGDQSGQVQNLLQDVLVAFMNKLEGTFGQQFNGLHELMGQSVAAMQSMQQGFSTLIQDMRSASESSNQSSSTMIAQLLADMQAGQNAMQAGMNEMLANLQASVARIGNEGEGAGARMAEQLEKLFAQSEARQQAMAENLQAFVESIKQAIGQGQQETMAKIAGSVEVLGEQLSAVFKQLEHGRQQMDQSTRAAQADLHQGTRDLVGGLDEQVKALLQTVSEQQKSAQDTVNALSAQTEQHLQSMQLGADKMRAAAERFETAGQSVARASESTAGLMGTVQGAGTELAQASRELNTVVADYRNNREALAKTLAVIEGVVASAQGEASGRSQYLQDLKIQSERMQALNREVYEYLENISGVLGNGFKEFGEGMDRALRQTLGSLDTELDKAVKSLAGGVEGVKESLEDFGDIMERIRR

SEQ ID NO: 3926 - protein, 247 aa, Pseudomonas mediterranea CFBP 5447
MFGKQMPSAARSKDEGEKPFWISFADLMTAMMILFLVVMVAALSSVTQRINQAEQGEKQRSKDISQICEHLSLKAKTASKTIIVDCKDNRISFGDAGRFGHNQYALSNDGQSALQEVVPMILDAANSEEGRKWFKQVVIEGSTDTDGSYLYNLHLSLQRSEWVMCSLLDSRSPLQVGLSPEHQQQIRSMFLAGGVSFNNAKDTKEESRRVELRMQFFGLKEKEGNLKPDVPVFTNTDVEKCQLAMNR

SEQ ID NO: 3927 - protein, 542 aa, Pseudomonas mediterranea CFBP 5447
MTSSIARLSAAISQSLSAHRTVQAPEPLESFPRLAAAGVELYERFERAEKALPPPEKKRRAAISKFRNVLPLNASEWRLVFAGLSDKSERVGPILEDDQLYARVHEEVHQRIERRRLSRRDWLALCFSYFGYDAAKPAQNANWCLLREDVQLGFECVRDQHTRVKEWTQIVQQHQELFSEQAGATLGDQMFKGEISDLSALQTIAQIPDNSWLWRRIFTVLISRIFMLDDAEFSRRLADLLDIGRQHPRYMNDILSACLSRYHLAAYREKPSSLLKQLALDNWGSPQIRSRQNRWLQYVDKDVCAMVVAWFAKEDLEHFFNLLKGEAEVDQSRLHYWLRFANQMSYTRIVMGSDAWHDSGRDFVHFREKNKGRLSRLVGGPGHNNAVIMQIGNYFFVEFSGTGNACYVYQADKSPFNPDKLQLELASELKQPNRALDRMRHSPAPSRPDRIEGWLSKFDYALEQWGIRVQSQAAAAGSVKPLPFEDQVRDALKSVKHKVYDQRERGGAFQVQLDDHDPAAVTALQRLGFRPVNNQPLRFWRQ

SEQ ID NO: 3928 - protein, 1082 aa, Pseudomonas mediterranea CFBP 5447
MLKRFLKGIGLQPNSAAENTEPVFSIEEQGICYPLSLAESTESWSLASYLDQLEEEEFVSQLSDRWLLTWDELYRLLDEPEHETSLPLLGLPPQTALIPQLSSQGSLASDDFKVSISGWRDPQSNANVQVLRTGAIVQYQGATEMLPEASWKLTGAVRQLYLAQQNEPGEVTNQIGWASIRKLARKAGAGMDGFLDKTVVIKPEKLRLNPRKSTLGDTPVIELQPSFEGQPANWLESFDGAKQVQDRYRVTGDDGSLTHVLIEPEVKSVLDYVRSLPGRRVAGDDALSFVRNPYSTLGEGASHVLDADAYEDELAEAGIFFHRFHLEPKLDEAGQRIEQVTLTLEPISPTPQAPIEIEFKAAHEFAPLVHELHLKLAAGMPAGFWQGYELELSDFDLRQLAGINDLLKRWQNEAAGVEFDSVLDLSLYGDRVTGIGEAERITSPFLVKDATENWLPKDVVALGIDAEIFSRWDSSDLAQFEAFEQRLDEARAAGDETVCLPKSETPLSITAAEKLFDAWSKKIAPVETGQVEQREKVGRAVLQIGHNIDEPTYVQVRQAALRSALDATPELPDLLKPEVVLREHQLQGVAWLQHLFRLSPTDVSGCLLADDMGLGKTIQLLTFLVWYLEQYPKDQPTLIVAPVSLLDNWERELHRFFFADALPVLKLYGSALSALKFKKDEIPADLKAKGIKNLLRPGWMGDARIVLTTYETLRDQEFSLARQQWSIVVCDEAQKLKNPAALVTQAIKAVPARFRVACTGTPVENTLIDLWCLFDFIQPGFLGSLNQFGRDYQRPIEAALERDTGALERLRGLIEPQTLRRTKQDIAKDLPAKIEDAACRSLGMHALQRNLYLSEISAYSQKQQIEEQLDQKTSGMLGLLHKLKLICAHPYSVQPDTRLRDNSPKLQWLVQTLESIKRAGDGDKVIVFTELRDIQRELQHAIQEHFGFRATVINGDTSTSSQSANSRQKLIDQFQELPGFAVIILSTIAVGFGVNVQAANHVIHFTRCWNPAKEDQATDRAYRIGQQKDVYVYYPTVRDAAMPTFEATLDELLSKRRALARDMLSGASELQASDFEVLLNAQ

SEQ ID NO: 3929 - protein, 644 aa, Corallococcus coralloides DSM 2259
MFDLSVLQDESLRIPLLIIVSLTLVSLGSVAWRRKRLAQAVQDVEVHLEDLLAGRREEPGTRDEGRALWRAVREQLVFPPGKQEVPGPILMRSSPSRELRETCRALFRHSMGHGIGRNLTGIALVMTFGLLGVVLVGPVQAALTSTGAGGASQADLLSQAIGKMGAKFFISAAGLLGTLFFQAFAFSSERRLLMRLDAMRASFERITLTLDAHEISLAAARRDALGALKTEIVQTRRDLSDRLSHLESVEVSLQDIGTEVQKNFGTMMKEQVGDVITRQLGSVEKAVRDIAADLQRSISMGFTAALQLEMAGVRAHLDAIQQALAGQQEHDLGRILEQLRDTVSGGFHTQSQDMARQMAGLVEVLPRLEQQFEVMTQTLGSHARQWGSENQRAVEALGEKVSELVGSFDGVRDRLEGSGSNIASSFKDVLTGLRESSSEMVRLAAQASLNMQSNSVQQSGVLRNQMEELRVRSESDMGQFQAQSQEFVKVMRETQDGLRTVTKQMSDTADKLAAASRGVGESHHKAGAVSAKMDEVAQRLMDTANAFQRLSQERSNVVRQEQTLLNAQREAVDRVGPVLNALTKTYEDSVSRQAQILSSQWTEVMHRLDSVVDRSSGELVQGVDDLTETVQQLKETLRQQVARR

SEQ ID NO: 3930 - protein, 464 aa, Corallococcus coralloides DSM 2259
MGLDDWLDEMGERQKVVLAGLGTFQQQVEEGMQQLFLRVETAQQRADDREPDRLARMRQTLDVAAVLKKLHARDFASLTRRERRAVPGLWREVGPKDMAWFLTLSPDSLPRLVRQRLRDWSSSEDAASQREWAKLVGQRPLEKSAVRWALPMSVEEALGPDGPGTLAKHWLAHPLVDVVEMLKNSGLKPGNSYAGHVIARYLLRRLQSRQDVAEGLKFLVDEPLGRSWMPHNNTDDVAVSAPLEARVAVVAATLACWGNGQVASDVRGRIEERLIARDSVFGDPRLTTLSKAWQAVRVLGEAAFDEFLAALIQQDLEFFFERAMHEQDRRKFWLNYLGAIRRTTCWLDSVTYDVLHSKFATLPVEQQAAFRRAKRLPQGDVSAFELSFERYVVVEFSRTGNATYIYEHGESTQVLKRAVVEHASHFKHRGATRLIHTPGWQLRFEQALLDLGIAKDRRVKRNMR

SEQ ID NO: 3931 - protein, 858 aa, Corallococcus coralloides DSM 2259
MDLLGLETQSIRWDVVGIPGGARAQYKVRVDDEPVLVAGSVFPWVMTPQEGAPLPLTPTAAWACSEARIATHASAQEQLAVVIRLRGLLEDVTGLLGGRIQFSPSGFLKTFEPRPVTRLGLRWEADPEATELVSLQPFAVFEDGTQAPFPLSSVRPGGIAGNDSRRPLLLPEGTDEVLARTRSLQKRLSVDVTQEMHDPSLLIPEGRNLDSSLDLSQYSPRVAGFEVLRGRQPGEGREATGLVWVEPSTATEGFALTLHVDEGALRIQLNSREEALDVLQKNDAALVETSPTPLTIGGQQLVPSEALGRQLRIALNLSEPSSEEGDGTEVAVGALRPGGKVGAIVRDVATPASDGQQSPEPPSVPWAQLRGAFQNGVALKPHQEEGLAWLWRHAQVGSPGVLLADDMGLGKTLQVACFMTLRLLTAGGVERPHLVVCPTILLDNWKQELARFFQEDLWRTPFILHGAELRAVKRGDGLNTEFLAQQRLIITNYETLGAYQRSLLKVDFDVVVFDEAHNLKNPDTLRSRAARALKRSFAIALTGTPVENELFDVWAIYDAIQSRAPRVFGPRTSFREEHGGEQGPATLRSRLRYPSNDSTLMRREKADALKDLPEKRYQRHAVEMTALQEEQERLIARQASKRGAFWALAALQKLYQHPALLTDARGMNAGTALRESPKTRLCLELLEQVEGRANGGSAEKALVFVLSRAMQELLSGLIKERFRLASVPIINGEPENRRVALESIQTFSQARGFQVLLLSPLAAGAGLNIVAANHVIHYGRWWNPAKEDQATDRAHRIGQVRPVHVYYPLLHRQGRAEAGFDMRLHELVERKRSLARDFLAPVPEEAQQFAGVFQEGEG

SEQ ID NO: 3932 - protein, 641 aa, Novosphingobium pentaromativorans US6-1
MEITEWLGHGLIYFFTEIPLIGDAMAAFLAIVLIGTAFAIAYRYKRQYHAPLADAIDARVCLLDEITGGSTADVDQARLEFARRFNDIDAQMMEANDAEALPLRRTWEEYRETIVDPSADVLQNSARPEHFFVNLGDRHRGLNWFANIFIAIGLLITFLGIIAALSTLDFSGGVDAMQERLNDLMKVAGAKFWASVGGIVASIVLRSYDYRFGKRINDGLSMLCDKLEHGMAYLPPQRIASDQLAQLKEQTPALRTFSEQLAAALDGALEKQMAPMITHLGSIQQGIDKISGGGGEAVRDAIASSAGAEMAGLADAIGAMTVSMATMSERIEKQTGEADRQIEEAVRRFGQASEEMRSAFGELNRNFGVVADRMREENEQASELARQRMDELLSNLGNTLDDMKSGLASAASQMGEASARAANDAARIGQEAMEKSFSEFVERFNQTGGPLVGSMKDAGDAISTSADRLSTAQSAIGDHARAIEQVAARSSDLATAFGTVANDVEAATAPVRQSAVSIAEAVKSVETIVSRNAQSSESARDEMRQLAAALSETASAASSAWSEYRARFEDVDRALGDAIEKISDAAGNHASNLNERVGQIDKALGDGVAQLAGALEPLTTLRDTVEELAGILANQNREAAE

SEQ ID NO: 3933 - protein, 242 aa, Novosphingobium pentaromativorans US6-1; identical to SEQ ID NO: 3914

SEQ ID NO: 3934 - protein, 458 aa, Novosphingobium pentaromativorans US6-1
MEALASAGLAKPPTTQPELQRQLAKLDACVGEAEPVIELKPFLRGAADTGANGLPRFQLNRVLRGAWCDPEFDELGVAALERADVDHRRSSDQAVIDGYLTYFPTGRSIMPMLAEAASRAAVRHDWAWRERGARWDLFKPQMGPAKVARDFVTRDADGISHLMRETGLGANLAASGFGQATFAETCKATAQLQPAEAVGPQRSILRMFDTEAQAGQLELVVRALLEPWIRTKPEPEHRKAISEFLLDQVGDPRLQRTRWDRIVRSLAESIGEERACEVTQVFKRWLTEVAMREFFRAIAKTTDRPDQWKQREAFWIAYLDEGLVTDAWPALGSRAKHQIDSLIRQSGERPEYGQIRGGPSQSSSIIMQIGDLRISEWSDNGSCRFWSDTDPGAPKLYAKVYDGGKLRTTSGRSDFEYESHVPASPGWEGKFAGIIHRRTSIAHPRFGRGRGRNWNDRW

SEQ ID NO: 3935 - protein, 1271 aa, Novosphingobium pentaromativorans US6-1
MVTTKFIATQIEGGGETIALLREQPGGLFRRASSGIVPVSEWPRAAPEAGQAALALARALDDDGQISEEAEGIVLPPQIVARLDEADAFALGLPPATSITLQLNSGGSLAEGTIKVDTKWVRRGGLPVRADIAGARLREGGRVGRIPEPIYSAFQAALAVNAADDPDQRRAAFAELRSTLGDDIGTGIEADGFLERVRIAYAANFSLNAKTDHGRFDFDPVLFSRNVSESAEGDLVDEEEASLLTPQDNQHFQRRFRGQDGGRRSYLLSDGTLLFLDPMLGKALDIVRAKQVGTSQEKREFLRSPQRILREELKLDAAGDDEAADRLFIETQQFSERVSGIEVWQKPVLPWIKPKPNSWLPEGFGLRIGDPPDARHVELAPGEAETIASEVETAIDAGKETIAWRDESIPATPATLQAARAIADLEREIADEVEGRASDRTERESVDIFFLQVGENFEQLDYARLPRPDAEVQDFDVPELPKGLRSEPKPHQVQAFAWFAEAWERRMPGVLLADDMGLGKTFQALMFLLWLRSKTPHPKPVLIVAPTGLLRNWQDELSQHIEAELMGPVVEAFGANLRNFRLEAGSDIRGGTSRLDVSEWNDAGIVLTTYETMRDYHMSFARIPFAAIVYDEIQKLKNPASQMTRAAKALNGTIQIAMTGTPVENRLQDLWSIADTVYPGFLGSSREFESSFPANDLERLGDLQHRLIERDKELPPFMLRRMKDEILTGLPEKKARKYPVEMPTAQAQAYDLVLARARALRESGEQGAMLKVLHMLRGTSLHPSPPRGISNIDEYIGQSARLKKTFEILEEVRQRGEKALLFCEDLEMQAFLAMAIQERFALERRPMCISGKVAGHKRQEMVTAFQSSPASFDVLILSPKAGGVGLTITAANNVIHLSRWWNPAVEDQATDRAYRIGQTRPVTIHIPMAVHPDEAIGPSSFDQRLDALMERKRSLSRGLLMPPESDRDVEDLLSDVLDGRPAENRDRSSAYAAAGQAPMDLQDTDYSASIRHSEPPAPPVAQPEIEEPTGDEESARSRGPASDNTASSANLDPAAEHAAEPGLEEAARSQSHFDPGETASSNAERKNRRPILSVRTPVEAAEARVPFVQRVVFEQYGQRDWTIFEQYARDARVERLEIQDPYCCADEQARGRLINFIGRFEQLASEIAAVQIVTFDADSVQTRDPESTRDQRQDLEDRWNRMLASVPLHLAQKSRRSGGDLHDRFVRAKLENGDTVIWDLGRGIDGVMNARWSCVVNAFYEGSISTSRAMH

SEQ ID NO: 3936 - protein, 641 aa, Novosphingobium pentaromativorans US6-1; identical to SEQ ID NO: 3932

SEQ ID NO: 3937 - protein, 242 aa, Novosphingobium pentaromativorans US6-1; identical to SEQ ID NO: 3914

SEQ ID NO: 3938 - protein, 429 aa, Novosphingobium pentaromativorans US6-1
MGEAEPVIELKPFLRGAADTGANGLPRFQLNRVLRGAWCDPEFDELGVAALERADVDHRRSSDQAVIDGYLTYFPTGRSIMPMLAEAASRAAVRHDWAWRERGARWDLFKPQMGPAKVARDFVTRDADGISHLMRETGLGANLAASGFGQATFAETCKATAQLQPAEAVGPQRSILRMFDTEAQAGQLELVVRALLEPWIRTKPEPEHRKAISEFLLDQVGDPRLQRTRWDRIVRSLAESIGEERACEVTQVFKRWLTEVAMREFFRAIAKTTDRPDQWKQREAFWIAYLDEGLVTDAWPALGSRAKHQIDSLIRQSGERPEYGQIRGGPSQSSSIIMQIGDLRISEWSDNGSCRFWSDTDPGAPKLYAKVYDGGKLRTTSGRSDFEYESHVPASPGWEGKFAGIIHRRTSIAHPRFGRGRGRNWNDRW

SEQ ID NO: 3939 - protein, 1271 aa, Novosphingobium pentaromativorans US6-1; identical to SEQ ID NO: 3935

SEQ ID NO: 3940 - protein, 688 aa, Vibrio tasmaniensis LGP32
MLDRVAIISGDGVTDIIIITTLALFFFFAVREVKATWNAISQLKTIAGLKSNHSSDLVEPESLSEPQLKWLAEHLIYTPTENGLKVESKEGLWLTKSPLSHMLPPCDSTRYKLVPALLTSIGITGTFLGITLGLSQFSMAGDSKALLNSAAELLEGMKTAFYTSLAGLSSSAVFMALMKVSSSRLSKAQETFLKAISNQYFEASPVYYLKNMSNEGQQEVVAAQLRSATAIENMSQQFRETAASLSKLGDSFNGDAIADKVSEAVKGSIKDQLTPAVQAITGELSALRDIKEQSQKELVELLVDKMKSELIDPVSEELKKTSDAVSQSNEVSAQLNANVEKVVTSTAQTVETINEFQKDTMDKLQQFAESLKQILASFKDDTQGAMSTIAKEVQTLLDGASKGLEEQRDAFELSAGRASAAFEGIKTSMDGALNERQQKEQVLFDGVETRINALIEGSSAAFKQQTDVLEAVGEQASSLMTSAKQELESGLGDIDEKVKSMSTTVQKELETFRLQYQQNLTAYFEQQNSSLEDSLSKQRNGLNEVVENFRKVFESEYQARHNLLQELTAQYEKLEASAQTVERVAKAIGLNEVSRMAELQDAAQTMGRQIALLKKEYATASASFTDVTENLPKAMDEYFSRANESFETFFNDFDQSASTIHNKLSQAAGYLINAQVQNREFEADRVEV

SEQ ID NO: 3941 - protein, 218 aa, Vibrio tasmaniensis LGP32
MRSLSHSPRTADAEESGVWLSVGDLMSVLLMIFALLLISALVQISEVYEESQNTRIVIIKGINDKLNAEGIGVQADPETGDISITDSILFDLNDYKLKASGQEFLEKFIPIYSDAIFQSQATADEVSRVVIEGHSSSEGAFDRNMELSVLRANSVIAFVNSMEFSNKQRFFDKAVISGRGPIEARQDVADAADRKVKFRFQFKDEEFLGNFSEVKKVE

SEQ ID NO: 3942 - protein, 625 aa, Vibrio tasmaniensis LGP32
MDLVSTQRSDEVHVFEWLEAIENDIQWSNLNEQERERACIAVWTGVGSQLVLGDIALFKMGLALDGKPTSVVSDLVESIDVARTVPIWSEIDQAKLDWLLALKVKNFDEMASLCYQGKQTLSGYIKFLRLPQSNSYKAELSNRLLSPISDGDLSDYDDVWLADNFYALETTHQRVNFCEGFIGKLEQFDYGEQCAEIIEQHCFPLKKNSYWPQLGGVSKAILKKKFGLTSYFDLHAISAALYSEEAAIQLDFNDYQTRQIRSRSKFWSNYSSRFERVRVLLPSESYKWVESQNGALSEFVHLLPSSTNTDSEIYIFELDDLLVVEFLRGTIAETRFYKKSDWNAQKLFDSESLTSEKIRTMTQLEVHDHLDFWQHYCEKLLRTKFKVLPNNGTKSFKGLSKALGQYTESRGLPKPDEAMVQKRKASLETWIERFWEAEVKTGKFGELRGLAQKSTLYLSKAIMAKQLGNQADYELFIKKAANQGNPEAMWQLGKNMLLGTNSDARTRKYGEDWVSKAASCGHQEAMETANRFRISFLGDTKDSSREKNAFINGARDKAEWSEMNRERSRYLKSKHQNEKINYHETVDVIKEDYKPSWINRDKEEWSSINRARAKRLREKFKVNES

SEQ ID NO: 3943 - protein, 729 aa, Erwinia sp. Ejp617
MSWFDSFLAALTSVQPYKVPLTVIGLVILAGILFVVFYLARAVIVVKDLKRHTQAVKSLSGQTPEEHSDRLDSLFQKPQLKHAWSEFKDSLHPQFEVVDGEQKTARIRATAPSASYFSEQQLVDIPLNTELFKHLPGILTGVGIIGTFYGLMIGLHHFDPSTPEQVSSSVNRLLHDVLYAFLGSAFAIFASILITSLEKFYLAKCYKHLEKFTAAIDQRYVSGVGEEYLADLVKSGKESSTQARQLKESLVGDLRNMLLELTASQKKESENLAQTLTTTYRETGQHFAEQVSGAIENSLKSPLDKIAGAVQTASGDQSGMVQNMLKDVLTAFMSKLDSTFGQQFTRLNEMMGQTVGAIEGMQTGFSTLLQDMRQASDESRQGSAQLIGQLLAEMKSGQQAMQSAMNEMLTSLQASVAKIGAEGEGAGERMARQLEKMFAESAAREKAMAEQMIAFIDAIKHSVQQGQSETMEKMADSVSALGGQLSSLFTQLEQGQQQISAGQQASQLELHQQTQSVMSEFDGQVKQLIDTVAQQQEATHAALRQLADSANHQIDNMQQGAEKMRLAAERFEHAGERVSEANHVTAEVLNKTQTAGSSLAMAASELTTVVADYRQNREAVAKSIAILEAVAANTQAEQTTRSQFIADLKSHAERLQGYNREAQGFMDKVGEVLGQSFEDFSGGVTRSLDQTLGKLDVEMAKASTLLAGAVENMGESINDLDDLLSRTRR

SEQ ID NO: 3944 - protein, 245 aa, Erwinia sp. Ejp617
MFGNAFGAKKRRSDEAEKPFWISYADLMTAMMVLFLVVMVASLSSVTQRIQRAEAGEKRRGQDITRLCQRLELRARELNKTIVVDCHENRISFGEAGRFDHNRFFLNPGGQKALQDVVPLVLEAADSEEGKKWFKQIVIEGFTDTDGSYLYNLHLSLQRSEWVMCSLLDSRSPLQQHINPHQQVQIRKLFLAGGVSFNNARESKEASRRVELRMQFYGLKDKRADDIHDFPAVIDKEVCQLVMPL

SEQ ID NO: 3945 - protein, 566 aa, Erwinia sp. Ejp617
MSQALNKLSRRIADSLTRRFSGEQWLHHDFAQLSQAGHAIEQQFEKAEKLPLPPQEKRLEALRRFRLAKELTALEWRMVFYGLADNDPQAPHRPILLEDDESFPRVERKICELIEGKTLKRREWAALCSSYFAYQNDAPDLNRHWCVLRSHISRGYQVVKASVRREKSWMRVVEHYHDIFTAQAGTLIAQQMVNREKTASDTLEKIAQIPESSWLWKRIFTVLLAQIYEDSDDVFFDKISWLLEQAVGWARFRDDIISACLTRYYQSRYREQPHNPLKQAALDYWQSPQLKSQQNKWHQYVDENVAAMVRSWLAKQDLTHFFELLRGKGDVDQARLFYWLRFANQMGFTRIVMGQDARQDRSGDFVQFRADNKGRLSQLRGGRALDNAMIMQINDYLFVEFSGVGNAMYAYRIGQAPFNPEADQLDITTQLKDRPHELSYILRLPHRPRAEDYSNGRITGWMKKYDDELRRLGITCIAEQTPAAAVKPSPITRNPLQRHHIALLNPVRDRAIQNLINTMSCEVVDNRQRGGVLSVIVEKNQPAIVMQLLKLGFTATNKNPRRYWIK

SEQ ID NO: 3946 - protein, 1081 aa, Erwinia sp. Ejp617
MLKRLLSQFTGHRQQVESRLRHQYQMEDSGLSFSFERVTDEQLWALKAWLEQLADEDYLIELADRWLLTWDELYRLLEDEEHASSLALLGVPAILPLRASLSSGGALSDEDFQLYLGEWQASNSGRTVTVSLVRPIFNHDGHPRLLTKADWQLIQGLKQFHARQRSAPGELTNQIGWANVRKLAKQAGAQFDDYLAKTVVVKPASLKLKLRKATVADTAVIEIEPSFEDQPENWLASFDRNAQVNDTYRVPGPDGELSHVIFTPEVKEVLSSVHTIPGRRVAGGEALSFVRNPYTFLGEQAAAVIAPEDHEQALYDAHIFFHHFRLLPRVSEKNAIEDVTLLLEPISPVPQPETSFVFSSPWELERFINELGISVASQMPAGQWQGYELELSQFGEAQWLNCKALLTRWQEESAGKEFSDVLDINKYGDRVIGIGEFEKMASPWLTKAQGENWLPDDIDFPTVSAEVFNGWQQDNPQHLSSLKQRIADAEASGAATVIAPWNDREIPLDSAQALLKAWQKQGQSKDGDKDFAKENVARAVLKIEQNIDEPMYIRQRRISLLEAHQTEPEIPLHLKEDIQLKAHQKKGIAWLQQLFLKSPHETTGCLLADDMGLGKTLQILAFLVWNIEQNPDGEPGLIVAPVSLLDNWQRELDNFFCTAGIPVLKLYGETIGAVKYRQQDIPAHLKAQGIKNLLQPGWRGEAKIVLTTYETLRDQEFSLARQPWSIMVCDEAQKIKNPAALITQAANAVQARFKVACTGTPVENTLVDLWSLFDFVQPGLLGALNEFGKRYVRTIENEDGRHHRALEQLRQLIKPQTLRRTKEEVAGDLPQKIEVAECKALMMSGIQRQLYLSSIGAWQQQQDFAEGMQQAGTGMLGLLHKLKLICAHPFSVNPEPGYREHSPKLNWMLHTLDGIKRSGEDKVIVFTELRDLQRELQHAIYQRFGFRPVIINGDTSTKSNSQNSRQKLIDDFQSQPGFDVIILSTVAVGFGVNVQKANHVIHFTRCWNPAKEDQATDRAYRIGQTKDVYVYYPTVRDSEVTTFEETLDELLNRRRSLARDMLSTSSDLSGADFEVVLQDII

SEQ ID NO: 3947 - protein, 816 aa, Polaromonas naphthalenivorans CJ2
MPSIAPHLLISGALVLLLALSFVIYFLVPAFKHGRRLSELLRTLRSPALKDERNPDQLSQVFEKDAHLAHLWNEYRKTLYDAMPTSGGVVAPQWRSTVAAENFWNGQLVVESRVHAEFFKHVPGIFTGLGIIGTFLGLIEGLRNFKVSALTQGGDAATQDSVAQTAQKSLESLMHSVGDAFLISAAAISLAMLATFLEKLLLNSLYAKVDYIAQLLDDKFAAASAEKFLEQTASYTEESATQLKQLKGELIKDLTPILHELSDKQSKMLERLAGSFQERMSEASHNQIEASRDNTTAMADTISGAITNGLSGPLEEIKAAVKQASGDQSATAIKMLQDVMVSFSQKLNDLFGGQINGINELNHKTAETMQNAVTKLNELVANLQEAGRSSSASMGEQMARALSDMEARQAAITQSTQQLVAELKLAIEQSHTATSAGVQNSSDEMARRMAESIEKMEQRQDSINERTREFVEQIKAVVSSSQNETGTKVQSTLQAIGDQVGDMLNQFQAAQQAALATGQQREADNASKTESAVAALAARSQTFVDEVGQLLSRSQAATDAGVRSTMQALGGQVGSMLQEFQGAQQSALESGRQREEQNAQKTQELVSAMVGSVESLVQQIAQASARMQESVAALTTTTTSAISRLSDGADQVNSAARNFAAASDKAAGTIHQVSSVTGQLSDLTTHLTASSTALQQGIQDYRSHREAVAAMVAELNGLVNNAKSDVSITSNVLQRIEQASDKLASAHFETEKFMMGVATVLAKAHEEFRVSVTTSLGKANHEFQQKLSAAVGMLGSSIKELDDVLVTATPKKKAIA

SEQ ID NO: 3948 - protein, 235 aa, Polaromonas naphthalenivorans CJ2
MIGSRARTRRGSQGEAEKPFWISFADLMTALMVLFLVVMAVALLAVTRTVSAREALEAQHKKDVDNCMAQAVTAAERHKGVKVDLDRRVIDFGDRARFAFGSSVLAPEQEAVLRRFVPELLSMAQTPSCKRVLKRVVVEGYTDRAGTYLGNLNLSLMRSQRVLCAMFTTSGADALTEAQKDAVRDVFLVGGFAFNSSKDTAEESRRVEMRLEFLGVEEKPIASPATSGNFGACAI

SEQ ID NO: 3949 - protein, 602 aa, Polaromonas naphthalenivorans CJ2
MDLLNLFSSMLNQAALNSPVDVRASDDIDKVLLALEKQVKSGGRNDEPKDLQIEAVRRFWKTGHVETLREARLVAFGLAVTPWDDRRSLMEDKRLFGSALDAVDAWQGAPRQYRKCFQGLVRSYFDYDGMGRSTPDVGKVNWRQLRDYLNSNAASIRDASLNPDWVSCTLSNTGLFTEEPCAAYGPDLLAGNSDLVGDIRKLLGISDGSWFTRELIIAQIRQATQLGDQAFHAAVSGLLRLLGGNEVLRDRGLQILLDRYALIPQPPQHPSLRDYAVTCWGNPWLPSNQDRWGGVQTAARQMVSNWLKLEFIELFFTKLAQDGLSDTRRVKFWAKYVPAIEEIHFALGPHAMYSRERDFVELRDKLKGLIVPLQDNIAANNAFIMTMGDLVAVEFSGASNAFYGYNVKNRMPFDLTQPVRTPVNGQNSLKNSSRALYLRHQDNVLGFNGWEGRFQDELRTKFNIRPGVTSPQRVVVERQWNDAPAPPHPKSPQTPLFAARTLAPAASTRPMPRTFTTPAPVPKSTAPAFATDQSAPFAPDLPFTMDNLREVCMRIGASVQDRSDRGGALWVMAPAHIPHIRELLTNWGFKFTIGKGWWKKIE

SEQ ID NO: 3950 - protein, 1259 aa, Polaromonas naphthalenivorans CJ2
MNILSLFKKAPAPQAAQAPGWLRSLDASGIHVHRDKRAGDHSLSFPTLTGLMTQLSDDGLTQEDEHGRYFLAWDSLYEAMDLPGYAELSQALDLPATTGLRPTLSSRHALTDSDFSISLGAWRDASGKAVSPHHVGPVLQLNGKAELMSAPQWDLFKRVVAFAERFPEDHTDHRQRQAWGQIRRSALAASAHMSDFLVKTVVLTPERLKMAFRKSDATGKDTVVEVIPGFEGAPPNWLEQFDRFDTTLDRYDLPMDDGGLVQIVLSPQVKTVLQQIKRFPARRVAGSRAQAFLLNPFATLGEAASEVIDEAQFEQAREDAGLEFERFTPVIERDGAGFAQKVGILIESASSSGPTGSNTQYLDDAELRAFIASVEQAISRGLQLAFWQGSELEILGDTPDHLHALKQALAQRTEPRLLVTHAQVHDLSHYSSRVEGIGVEPPYYSPYIAKKKEEDSWFPENVFPVIAFTPEGEHEAVTVPVNNHALEELRDQTQKAQAAGKSAVELPWLPKPMPLAEAQRITQTFDEVLEDVKKGKFDPDRKGATKPSARKTLMLRANIETVDYEEKRRQAMIVALGEPTISNSLSKDHRLLGHQEEGVAKLQHLYSLRHTFQVRGMVLADDMGLGKTLQLLSLMVSIVESDSNAAPMLVIAPVSLLENWLEEAHKFFPGALRILTAYGDALSPLRVPRESIEERLRNEDGLVRFLKPDWVGNAQLVLTTYETLRDLEFSFATQHWSLMVCDEAQRIKNPAAMVTRAAKKQNAQFKIACTGTPVENTLADLWCLFDFVQPGLLGALNDFGRKYRRPIEIDARDKEGQTRIEELRSLIEPQILRRTKLEVAKNLPRKIVVDTCRRLPLSSTQRNLYAKAIGDFKKRADPSFRTPFKNHLGLLHYLRLVCTDPRRHGLSIFKPEPISQYRASAPKLDWLLNQLGLIQSQGEKAIIFCEFRNIQRLLQHYIEEVFALQADIINGDTSASASHSASRQKRIKAFQAKPGFGVIILSPVAVGFGVNIQAANHVVHYTRTWNPAKEDQASDRAWRIGQTRDVYVYCPVVAAQDFTTFDVKLDQLLERKRSLAGDMLNGSPDISLAEFKIEDVIPDADVGSIDERVTLDLALRMDWRHFEGLAAALLCKRGFETVYCTPGSSDNGVDVVGIRGNLGELVQTKTSAADDRSLNWDTVKEVVAGEAFYRRRHPGVTFKKVGLTNQHFNVQAHESAVLNGVDLMERRHLGEMLEKYPVTMLDVERLLYTEWSDADLHAF

SEQ ID NO: 3951 - protein, 631 aa, Rhodanobacter fulvus Jip2
MNNLFHLVMADWLHQLLGSAILLLVLFFFWHVLIKGLILVVRLGRLRKKLSALGGEPPARVKASLARIFEHTPWKDAWREYEETLHEQTDPTKSEPTVLGVRATVQAEAFFHTEALVDDPLHVEFYKHLPGILTGIGIIATFTGLITGLQHFDASATEPEALKQSLGSLFSYVRNAFMFSAVAIGLAMLLTVVEKVIYNLCVHNASGVAAELDALFRSGVGEEYLSRLVKSSEDGATQTKQLKESLVQDLKALLTNLAEQQIQATRQLSIDIGQSLQASLQEPLQHIAETVRAASGDQSASSARMLENLMSAFMAQMKETVGGQLGDLSGLMQQTTQAVAQVELTLRGLVADMERSSQASSSGMQAAVKGLMQSFADHQSQLADSASIQQSQALAHMQDVLQRMAEAQETSTRRTQEESSAASEQLGKVTAQSISASQQATEAAQTLLSGVQQVSMDAIGGLEKGAARINASIAAMDTVAERLARAGQSLSGLQEQSMEAAAKLERASTTLGTGAQTISQTMGVLGQTSTRLEGVSELMVSESQARESALREIQQVLVKSREASELFGQLTSEVEKHLVDGVDRFGEATSKVLNNVLKQYDDALGSTVSMLKETMEELRERAEDLADLAER

SEQ ID NO: 3952 - protein, 236 aa, Rhodanobacter fulvus Jip2
MFGRASPTRRRGKADGEKPFWISYADLMTAMMVLFLSAMAVTIAAVTRKVTGPEEQRRGEIVEICSSIQQQLAGVGNLNIDCVNNRISFGDAGRFATNNYRLPTEANAALARLVPVVLQVADGPLGKKWMKQVVVEGSTDTVGGYLYNLHLSLQRSEWMLCLLMDPRKNAELQLTPQQLQRVRQLFLAGGVSFNNQRATADESRRVELRLQFYGLNDEHKDLEPLSGSTPTDTCQL

SEQ ID NO: 3953 - protein, 559 aa, Rhodanobacter fulvus Jip2
MTTLAMRLQQSLDRSLQQLQRRSQSWSPRVLEQARKEICGASDQLIFDPHATNRLDAAMDRLLAGGAERIGQRDHVVLAYNLAEVHANLEGNSLLNTLSELTPLLEYWRKQLAARGSARQIWRGALLSLFRGAPADMGFESTRRFLADTLGILRAAKFRPSWLVALERHPRLLAECPVDPYALAWVEGHREGIDELRELVDLPPRSWFWSSLIEAILEACCSMTKDSLFDERWPIALKLIDDHPHCRDLVLSRILARYAQKQVVIRQDDLLQVSLEAWGSPQLGADAVGRWSDTSDEARNMVCGWLAEEDLEDFAAFCKGDDSVDARRLAYWLRFKKQISFSRIVLGSAIHKAQDKESREFIARKKGRLAYLNGPPNNNAIMLRIADWWFVEFSEKGNACYPYGKDHLPFNPGAMHLRLWIDLKMKAAVISSQAETLTHQPPASWEEKFDRFLSERGIWPDGTGRGAARKAAGSSATNEDPFPPKAPEKPAPRESGLPALGLGQPLLDELKSFSPLLVDNRSKGGALWIEITRTPDSALLRAMERRGFRYARPRGFYKK

SEQ ID NO: 3954 - protein, 1080 aa, Rhodanobacter fulvus Jip2
MKWDWLSRKKQNDIQQNSQPSASTEGWTLGDSESLAGSGLGAYANQLIEEQYAAQHDGHYLISWDSLYRLLDNDEHATSVALLALPPRSVLVPHLVSDGSPADVDFRIRLDHWLAPAGPLPQSAVLRIGAVVRWQAGEELLPSSAYLLLGAMRELSTEGCHWTPEERLLATGRIQSLARVCRASTDDYLSQTDVVVPERLDIELVSEQAAGVPVIELIPRPEGSPPEWLSTFDAHDRVRARYDVVRPEGGMTHVALPEAMQAVLEHVKDAPGRRYASREADAFLHNPYPFLGDDAEAILRPEQFEAARQRAGIVERELDALPSDDGLEMLLLDTAGVATDVCEPMTDIAAAKALLAAATVARQAALPLFRWRTHRVVFSGTTPSALRQLGEWIAASAATPETLGVDEVFDLQAYSDRVVGFDGKPIHVPFLGKKDASRDWVPDNIQRHVSSTDPATGQNTSTALDEDQLSELEQATNQAERDGSAAVRVPGTTMEIQTDEARRWLSSFSEGIKKQPIAPSIPKNPQPGRATSLRILHNIEALEYGAAVALSPPNDIAATLPAALRPDVQLKQHQQYGVAWLQHRYGQCVQGIRGTLLADDMGLGKTLQCLCLMAWYRECRPSPKPCLVVAPVSLLENWKAEIDKFLDGSQGSTMLLYGQELARHRLPSAQLGDEFTNLGLKKLLRPGFARGATFVLTTYETLRDYELSFGRERWGILVCDEAQKIKTPGALVTRSAKAMQADFKIACTGTPVENSLADLWCLFDFFQPGLLGSLSEFTRVFRKTIELREDGHEAQIERLRKSIEPWVLRRMKSEVAELPPKIDEFHDESDPGVRAIPMSALQRKLYSEAVIGYKRAKEKAEEEEVQAGTLTLALLHRLRMICSNPLAAAQEGAELLSITENVLHSPKLRWLLDQLEQIKRRGEKVIVFTEYRDIQRLVQRAIGERFGVGVSIVNGSTTVDSLNDMSRQKIIDRFQAQPGFGAIVLSTTAVGFGVNIQKANHVIHFTRPWNPAKEDQATDRAYRIGQEKPVWVYCPTIAGDGYESFEQRLAERLSRKRALSQDLLAPESTVSWSDFEDLIA

SEQ ID NO: 3955 - protein, 692 aa, Paraglaciecola polaris LMG 21857
MASEKQIELSWLLPDLTQLNFPPETGLELSSLFVISLWAITLFATIVFLIKYFRTRSRLNWLFKLLKNLERENVANKRIDLLKEAKTRDKDIGFLWMEFDETLVEVQRGETVELRNTLDAGHFFNSFTLASGVTENRLVAAVPGFLTALGVIGTFVGLQLGLGKLELGAGVDVKDMQNGVAGVVEGAKVAFLTSVWGVALSVFFNFGEKWLEQKTRSKIRKIENKVDWLFPRIRPEEQLQIISDNSSESREVLQGLAEQIGEKMQEAMITATQGIQSSLETSLSEIMAPAINKLVDETSEGNQKALEGLLESFMDGFGQAGNQQRAALDDVSAKVNQSVEAMQTTMTGFVEQLQKSQAESGDREKALIADISNQVSSLSTQSESIHQKLTLFVENQIGDMSSDLQKREEASAKRDAELVITIKSQVDELVDNSRKQGETLTNFVTAQLQGLTESFDEREKRSVDLETSRNDRIEKQTEAISTLSNEILRSVEKSVADQVSSVQQLINQGQTLQNSINSSVEASAQASQAMKESSTELKVSADSMKILSSHVNEAGNKLSGAIKSAVESTADLAQQNQLSAQKMENLRDNLLDDVSRFGDLTTQLSELIESAATTFNGLKITQKEFIGELKDEVDDLGQKMTNMLNEYSQQANGQTAKHLGVWSQSVTDYNVQMNSAIKALSSVVDEMQVKLG

SEQ ID NO: 3956 - protein, 243 aa, Paraglaciecola polaris LMG 21857
MDRFLSRGSAKVDEENPYWMSFSDLMSGLLVIFILAAVALIIELTQKSQNIDASIAEFKKAEEARSSILFDIKEELAKQNIHVEIVENDTVLRIPEGTLSFESAKDTLPQDETTQLEVRAIGMALHKAITTNERWKYLDTVFVEGHTDSVGIWYRGKGNWGLSADRAVSIWKLWQTEIPVEPKLIELKNFNDQLLFSVSGYADTRRVDLTEETEEQRAKNRRIDIRFTVKKPKIEDYEKAKDV

SEQ ID NO: 3957 - protein, 475 aa, Paraglaciecola polaris LMG 21857
MTFFLSDSVYRNNILIMEQLTKEQKSIAKKAGTDNPKFEAAWSKLFNLLSRDCFDLFSIEDRFDVRALSIALTANSQLRSAIKINKTLLNKVSEVLPSGSNLFMESLFQYFLSNFNSINDPNEIGDWLCKERKRKGLFHSAEEKILCSEGPTFLAKQAIKLETNFEQQVKNWQLDLYASGDFVKQSQSIYFVEQLQNIPVNQPHDLLEEVSKKSVANSRYDASDLIGHVALRILIDRAPSQNVDESWQNAVIAIAGDPRVPKSHPRYSKWWSQLTKIQSKKVQGWLSKLDLKLFLEALEDYSKSSRDNDMMRMFPSRKHFLEGMHEAGTIVHTKLYLSKKADKYIRKNYKPEHIPDYSIVEDGDRSIIYAELTNGHMIEGSHNCQIWFYRNLHESAPVVKFGRQRERYRSLTVGLNETMYKYGCEAYDNFTHSPSNFSWQRRSIEVLQAIGVQIKASDVLSTSDYNKYKRFYGVG

SEQ ID NO: 3958 - protein, 1156 aa, Paraglaciecola polaris LMG 21857
MKNWISSLFNLKESDAKFDFEFNPESVDFYCPEYKFNQIKSGQADEYLTAQFVTLQMLAEEGNAETIPNGFILPHEVVASLDEDVHQLLNLPSRWKGKAVADIKGTTSGKSFQLKIKVESPSGKMTAAYHVDGSIIAFGDTKYTLKLDMFSIFDALQHYLTSAKSESDNLLLLHVLQNAQKLGTQITLGQFNKLDIHVPDKIAVEAELDHSGNLILTPSMGQKAEHDKLQRVLGQLQSESGRTLKVGKEIILFNEKTAQAAKEIITNRTIPKSQVEQFLKAPGAFLDASLVDLDVGFALRVKGATRFKHAYFGETDESGIDWFGQNHASGQILPISAVGKVVKTQEDLEQLAQLVSDAKVTGATEIQFEGKSYDIGSLSEVSDTLSQLEQKIKRPEEAGEEPLPQDRPENENIDDIDDTPIVIDIALNDDELDNPSKLVQEALNDVLYREKLDWSNHKRTPFPHQITGVKWILGLEEMARHKELVNGALLADDMGLGKTFMSLSAIEHYYRLCEDSDETCRPTLIVAPLSLLENWKDEVTETFNESPFRDIVILQSDGDLKQFRDGSTETKASNIDDETLEPRYSLKFGEKHGPNRLDLPRRMVITTYQTLRDYQFSLSQIDWGIAVFDEAQNIKNPNALQTRAAKGLKAKFKLLATGTPVENSLADFWCLMDTACPGYLDSYQTFRQSYITPILQAAGDEIAQVRATLGRQLREKVGALMLRRIKEDNLEGLPQKNIFVGIESSDWQYEPKLHAIMTPYQQKVYEGSIEAQLEDENSHVLTTLMRLRDCSLHPRLTDGGRLDAPTSKLELKTLFDESAKLEKAVEALNDIQNRQEKCIIFAVNKRLQRFLSIALGSYFGLGPLHVINGDAKAVVKKKGTLSRKTMIADFESKEGFNIIIMSPVAAGVGLTVVGANNVIHFERHWNPAKEAQATDRVFRIGQVKDVNIYVPILHHPEFESFDVNLHRLLSQKSMLKDAVVTPGEVMPNPAGADKYQLSAESIITFDDMRRLSWKQFEALTVELLFCEYQADSAWLTKEGSDFGADGVITAGSQAILIQAKHKQGAYKGHKAVQEVANAKTIYGNNLGREITKQVFITNATQLAKNTRNIANQLDVAIIDGTELGELCERHSITFGQVITRLSKERYVIHVNNDKQK

SEQ ID NO: 3959 - protein, 726 aa, Crinalium epipsammum PCC 9333
MITNLIFIGLTLLIGLFFLGLEIKFTCDYKKYYSQESKDTQDTIKYLNDQLVNQEKIVNGVLELKKFPNWNWIKEHLEGNYRIQDGVFNAQIKDSRFVLKKYPAALTWSIPRSYFKFIPGILTAIGILGTFWGIQIGLQNINLNSTENFSQLLPSIQQLLDGMRTAFLTSLFGLGSASVFTLILAGSEWARTKTRNDLRKKLDKIAWLKTDADLESNQLTAEAIGKATGTQVRDKIAPLINPIKEELREIRAIQAAQNQLTPQEISQQVALAFAPLINPISEHLREIRSTQFAQKQLTSEAIGQQVALALAPGFTEIRNDLLAQRQTIEQQRQELLTTLIQELRTEVVEPVVLRLDESARLTREASQAVRELKDALGEITQSLAESIQTIQRFQENTLGQLQQFAVDLRQILSQFQTETQGVLQQVATEIQRAVSTSIEGLATQRQAFIASARQAATFFQGIQENLQEALKTQAQQQKEMLAGVESQTINILAEANQAFLTQSRTIETVGVQASSVMDTARTNLEATLNNIDENLQNTRNTVQQELENFRINYQSALVTFFNEQNNLLNDTLGQQRDGLAGVVADLQRVFVEEAEQRKELAAQVNDSMARINGTVQRVSELANVVGLSSSERLAQLIELSRTISGEAQRVERAYQNMGNQFNQALDNWNQQIITYLDQATNSQTTFFNQADNSMAKVCNGLNETANGLLDVSQYLVSAANEARMRK

SEQ ID NO: 3960 - protein, 239 aa, Crinalium epipsammum PCC 9333
MSNFSQFDVEPEVEEQDDSSFLLSIGDLMSGLLMLFALLFIIVQMQLSERIQEVKRLETELAAYKKAIDELPIRILNAINGNVGGKGVFIVDPKTGDVSIAERLLFDEGSAELKPEGKKFLQEFIPVYSQVIFSNNKFDEQITRIVIEGHTSSEGSDKVNLELSLRRSLSVSDYIFSNQLNFKTKGQLRNKILAAGRGEIDANQKIDNPSDRKVVFRFQFKREDFSKWFPKTRSPVSQP

SEQ ID NO: 3961 - protein, 474 aa, Crinalium epipsammum PCC 9333
MNVRFRQLHLNPSQPPSYQPTELLKLSKGLKTNSYLKNLANIPRLFRTKFRSLTEILSDIQSNQIEQVSVLEWVYCLYHKNTWDAKNPDLRIASSQAIWKAANKNSWLLQKLLWRVVLYYSGQRETAIASSLVDTFPSNIKSNSLAIQIINIIKQPHAAKKLAQLCYTNLLLPQQLLEQSHLPTWIPVATEALNHVAEVFSDPSNINYKHTDWLLRCLNQMSADQQLLAVDSLLNKISPELGANLTQLVTWLEENYSPRVTNSRWNQLSLFAKSALRKWIGAVNYRDFANLIDQLLETLDQNSLDFKQLKSRRKFWADYSDRFQRLRILFPQNSVNILGSYLHGQDVSILIDDGSEPTEVCIFDFGDWFVIEFFRGWSSEIRLIANNPETEAILFGDNLSVKRLRCLGGKRHDHRYLWQFSCEEWLNQNQIPPNSGTKPYPNPTSQQLQDRNHQLIEWNRVIQKLEKEAQEYCF

SEQ ID NO: 3962 - protein, 729 aa, Klebsiella variicola
MSWLNSFLVTLTSVEPHNVPFTVISIVSLAVACFLFFYLFRAIKIVNSLKKYTRSITSIESSSPEEQLAHLQNLFKRPELKHAWNEFEESLHPQRELEGGEEKIVRIRATAPSSSYFSEQQLVDIPLNTEFFKHLPGILTGVGIIGTFYGLMIGLNHFDPSTPEQVTSSVNNLLHDVLYAFLGSAVAIAASIFITWLEKLSIAKCYKYLEKFTAAIDKLYVSGVGEEYLASLVKSSNESATQARHLKESLVTDLRDMLLHLAESQKVENERLANTLSNTYRESGAQFADQVSGAIENSLKSPLDKIAGAVQTASGDQSGMVQNMLQDVLTAFMAKLDTTFGQQFTNLNEMMGQTVGAIQTMQSGFSALLQDMRQVSDDSRQGSAQLMEQLLSEMKSGQQAMQAGMNDMLSSLQASVAKIGAEGEGAGERMARQLEKMFADSEAREKAQAEHMSAFIEAIQNSVQQGQSATMEKMATSVEALGEQLGSLFGQIDKGQQQISANQQVNQQSLHEQTQRVMSEVDDQIKQLIETVANQHQGTTETLNKLAEQTSRQIQDMQNGADKMRVAAERFEHAGDRVSEANHLTADVLNKAQSAGSSLSLATSELTSVVADYRNNREAVSKSIAMLELLAANTQSEQTTRSQFITDLKQHGERLQSYNREAQTFMENVSDVLGKGFEDFSEGVSRSLDKTLGKLDVEMAKASNLLAGSVEQIGESVSELDDVLSRVRA

SEQ ID NO: 3963 - protein, 246 aa, Klebsiella variicola; identical to SEQ ID NO: 2302

SEQ ID NO: 3964 - protein, 560 aa, Klebsiella variicola
MTHALSSLSRRIAAKLSSSHQDENYLHNDFNALSSAANDMEKRFDNAEKIPTPPHEMRLAALRRFRLAEELTEREWRMVFYGLADSDPLHPDQPVLLEDDALFPEINSAIEKRIETKTLRRRDWAALCSSYFTYRHESPETNPHWCVLRGHIAKGYFVVKAAIRREKSWMKTIEFYHDIFTPQAGGVISQQLLSGESNSLSSLERIAQIPDSSWLWKRIFTVLLAQLDTLDDPQYLDKISWLLGLAAQWVRFRDDIMTATLTRYYHSTYRDQAHPALKQAALEYWDNPQLKSQQNKWHQYVSEPVAAMVRSWLAKQDLMHFFELLRGNGDVDQARLFYWLRFANQMGFTRIVMGQDAWTDRDSDFVKFREENRGRLSHLRGGRSFDNAMIMQINDYIFVEFSGTGNAMYAYRIGEAPFNPESGSLEINVHLKSQGRCILRLPHAPRAYGYSNVRITGWMLKYDDELHKLGIRWMAEEPIKFVDKKESSPTSLSDVKIINPLRDTAIQRLLENISCIVSDNRQKGGVLSVQLKTPDDTTERELLRLGFTPVAKEPHRYWIK

SEQ ID NO: 3965 - protein, 1080 aa, Klebsiella variicola
MLKRLLSKLTGDRQQIERHLKNQYRAEENGLSFPQSLVDDPELWALASWLEQLAEEDYLISLTDRWLLSWEALYHLLEDEEHASSLPLIGIPEVLPLRASMSSRGALSDKDFRVWIAEWTTLPSRQTIRFSRTGAIFTHENQQHLLSRENWALLQATEQLSIQQTQAPGETTNQLGWATIRKCAKQAAAKFDDYLEKTHVIKPTSLSLRLRKATVADTAVIEIEPHFEDQPANWLGSFDKNSQVHDSYRIPGENGELSHVIIPPEVKEVLNSIHSIPGRRVAGSEALSFVRNPYTFLGEDAASVIAPEEHEQALFDAHIFFHHFRLQPQINDENKIESITLVLEPVSPVPQPEVSFLFSAPWELDKFIQALGISVAAQMPAGSWQGYELELSQFTEQQWHDCQSLLLRWQQEVEGKEFNDVLDLGKYGDRVIGIGEFEKISSPWLTKAQSESWLPDGIDFSEFSVETLDGWQPDNLQHFDELQERIIQAEATGETHIISPWNDSELMLDAAKTFSKTWEKQQKAAQKSENIAVEKAARAVLKIEQNIEEAAYIKQRRDSLLNARHAEPEIPLSLKEHIRLKDHQREGVAWLQQLLLRSPQETAGCLLADDMGLGKTLQILTFLVWFIEKFPDEPPSLIVAPVSLLDNWERELDNFFYTSGISVMKLYGDTIKAVKYPKQAIPAHLQSQGIKNLLKPGWQGEAKIILTTYETLRDQEFSLARQRWSIMVCDEAQKIKNPAALITHAANAIQARFKVACTGTPVENTLVDLWSLFDFAQPGLLGALNDFGKHYVRPIENEAGRDTGRLESLRALIEPQTLRRTKEEVARDLPQKIEVVSCKQLPLSDPQKQLYLSSIANWQQQQALSEGMQQAGAGMLGLLHRLKLICAHPAVVNPEPRYREGSPKLNWMLKTLDEIKHTSKDKVIIFTELRDLQREIQHAIQQRFGFRPVIINGDTSTKNHSQNSRQRLIDDFQSQSGFGVIILSTVAVGFGVNVQKANHVIHFTRCWNPAKEDQATDRAYRIGQTKDVYVYYPTVMDSEITTFEETLDELLQRRRALARDMLCSTPELSSADFENILKGT

SEQ ID NO: 3966 - protein, 704 aa, Vibrio crassostreae
MKDSLNLSSLWPDLNSLNVIPPQTADQLSALFVVVLWFVAAFFLLWSISAFIRATRRVKWLNHLLNDAEKANPADSRHDLIAKAELKKNSVGHLWLEFDETLLEVRGSDEVLRLHNTFDADYFFNSSTLAGGSTENRMIAAVPGFLTALGVIGTFVGLQLGLSDLNIAGNVDVNEMKDGVAGVINGAKIAFMTSVWGVLLSVAFNFIEKILEQIIRKKIKVLQNRIDRLFPRLSAENQLQSIANNSQQSRESLQGLAEKIGEKMQESLVQATQGIQQGLESSLEKIMAPAINKLVDETSDGNQKALESVLQSFMDGFGQQGEQQRVAMDSASKGVNETLESMSTSLAAFVNKLEAQQSASTEREKELISSISVQVSELVTQGNEQKRMMTEFVEKQVSEMGEQLSQRESAASEREQKLASSMETTIKELVDNVSEQSQVLTEFVNNQVGELTQTFSKRDEQSSLMEKERNDMFVSQTNAMKSGTDELLAQVKSSVDMQQSASHQVLEQGKHLQNSIETSVSASARATESMQLSAVELRNAADSMSVFRSNIKDAGNKLSGAVTEAVSSTKDLAELNQLSVEKIHSLREQLVEDTSKFGELADKINGMLDSAESSFNQLRSTQNEFLTEQKSNLTELTSEMKNNVKELSEQMSTLLEEYADEANSQTNEHLKIWSTTSTQYAAQMVNAVNAISSVVDEIQDKVSH

SEQ ID NO: 3967 - protein, 243 aa, Vibrio crassostreae
MRRGSRYQSNGSVDEENPYWVSFSDLMSALLVIFILAAVALIIELTQKTNDVEAGIEELKKAEQARKDIIYDVRDELAKRNVIVEIADNDTVIRIPESTLTFASGKDSIPKSPEVQQAVKDIGAVLHMAVRKNERFKYLDTVFVEGHTDSDGIHYRGKGNWGLSVDRAISVWNVWQAEVELTPKLGELENAFGQRLFSVSGYAETRRANLQEANQQDKSQNRRIDIRFTVKKPSIADLERIVN

SEQ ID NO: 3968 - protein, 483 aa, Vibrio crassostreae
MRLRIKKLPVTLRHDPLAKSIEELSQLTQKLGVLSKNAGIENTKFKSAYGDVYKALIANKAVEDVVDTSVHVRALAISLQTDVKNKVSFTRRLLNKITEIVGKPSALVIESFYQHFLSEYDQLTDCDATAEWLLEAKQKRGYEGEFDEQLLSSNGPQWLAKQAIERNIDFDHWINELDLQHYANGRYLTTAKGIYYVEQLETIPIGIDHPLLSEVQKKAVFEAQYDSEDLLGHKILRILIGRSIGSHMSESWMNVVLAVAGDPRVPSSNPRYIKWWRNIDARLTQAVRGWLSKLDLKLFLEALEDYSYSSSNYELQRMYPSRKHFLEGMFDAGVITNTRLYLSRDAAQYLKRNYDAKHLPNFSIVKDGDKSIIYVQMEGAHMIEGSHSCYLWLYRHLEPSACVFNYNITSPTYSQLTSGLNYQMTNLSGGATAKITHSPSSYSWQRRALTELRDLGVQLTAKDILSSDDYVDFKQRFGVREWS

SEQ ID NO: 3969 - protein, 1148 aa, Vibrio crassostreae
MELTSLISRFFSGLDKTSKFDLVCDGSLDFTASKSNLEKIRSGRANEWFTAQFVALKMLEEQGEVTSFPDGFMMPASTAVRLDAELMTLLGLPELWGGVIDADIKGKASNPDFKIDLAVTTQQGRSTLNYSISGPFIRFGKEAEYLLTPSQLMVFEAQNLHQKSEKSEYDNLLFLHALQEAQYQGCRLKLKHFDKLRILTPSSVTVDVELNANGDLILTPNMGQHASHEAIQRVLGQLQSDSSVSLKVGDEIILFSEEKLKAVKEVISNRVVPKSQVKAFLENPTAFIDASLVDLDLGFSLRVRGATTFKHAYFGETDESGIDWFGTSLTTETIYPISKLIDAIDDRPALLEVSKKLDDAQHTGATVFDYEGKSYDIGDREAVSKTLVAIEDKISKPAGGTSEDEPGELEKDSSEKEIHVVDIDLNDEELSENSPQVDKLIADMAWEGELNWDNHKRKPFPHQEVGVRWILGVEQKILTEPSISGALLADDMGLGKTYMALSAIEHMYQRMTIDAKTKKPTLIVAPLSLLENWKDEVDKTFEASPFKDIVILQSAADLNRYKMGGVEIRNQKNSDEELEPKYSLKVGKNFGSERLDQPQRLVITTYQTLRDYQFSLCLIDWGVVVFDEAQNTKNPNALQTRAAKGLKADFKLVATGTPVENSLADFWCLMDTASPGYLGTYQEFRSHYISPILKSAGDEVEEVRARLGRELRIAVGALMLRRVKEDNLKGLPAKNMYAGGHFDGWGYLKELESTMVGYQRDVYEGTISNQIENEDSHALTTLMRLRDSSLHPRLSDGGRLELPRSSKVARELYLESGKLSSLLETLDRIKSRQEKCIIFAVNKRLQSFLSITLGQIYGLGPLSVINGDAKAVAKRKSVPTRKSMITDFEAKEGFNLIVMSPVAAGVGLTVVGANHVVHLERHWNPAKEAQATDRVYRIGQTKDVHIYIPLLHHPEFESFDVNLHRLLTQKTLLKDAVVTPEDVVPQPSGVGGSITEDLINKRITPDELDKLSWQQFEALCLTLLSKHYDSESAWLTNAGADHGADGVILTQSGNILMQAKYTQRRYDGYKGIQEIHSAKPIYESEMQKTFGRLVFITNSPSLAKRTDDIAKTCGVEVIDRAKLLTYLDENEVTYKDVLTRLEKRRLKV

SEQ ID NO: 3970 - protein, 704 aa, Vibrio crassostreae; identical to SEQ ID NO: 3966

SEQ ID NO: 3971 - protein, 243 aa, Vibrio crassostreae; identical to SEQ ID NO: 3967

SEQ ID NO: 3972 - protein, 483 aa, Vibrio crassostreae; identical to SEQ ID NO: 3968

SEQ ID NO: 3973 - protein, 1148 aa, Vibrio crassostreae; identical to SEQ ID NO: 3969

SEQ ID NO: 3974 - protein, 672 aa, Gluconobacter thailandicus
MLSLLFQVGLSIRNLVLGFAQILVSESSPGLVVLILFTLLIIASFRVVRLYASRLAAIRKLRGKIETDLPKNRESISDRTEEAKENSADRSIWEAWREFDETLVLDTKEPPNLRNSVRPSLFFNVEDLHFGSGFFRICPGLFVSVGLACTFLGLIAALQNMAQSNAITDQTMQRLLQIASAKFIMSLMGLACSIVFTIILRRLTVKLDKELCGLCVTIEQRLTFVSVEQIGFDQLKAMQEAREHNRALTTELVAEIGRPLRTELPEAISNSISAAMQPLLDKVGQQGSENLSELASDLSSQLSSSVGTALSQASDRLATAADRIGQLVAQMDNSSGRMGSEMEQAIARMGQAVDDLRGTMSETARLTSGALNQGAEQLLSVMNRTLEGIRDNTSEGARAMSVAAQELREAAGAMRSEMEGAAHAGAEAARLRMEEAGDAANVSIAAAGQSVLSAFGQTGSDIARMAGEVSARANSDLIAPITAISERLSNFVEVLDQGAGAMRRSVDAVRDGALAGAEAAVAFRSSSQDLVAAAAPVRATTERMESSLRQMTEGTHNAVSIVTRSAQSTAESAAHVLATASETLTAERRGIETTLEAVSQMLERMRGQGERLDTIDKKLGAAFDLYATQVEQSMQSMRTHVINMSKDLNVALSTLQSVIEQQQEFSPQQGHS

SEQ ID NO: 3975 - protein, 287 aa, Gluconobacter thailandicus
MRGLQRRRENQEIEEETAFVSMTDLTVSFLFIVILLLAYFSSKYNPQKSVSLPVYEQVVAGKDAAEKKIHELETEIARLKQPNPLERYIDQAMAERKHILEKLRDQLNIEFPDLKVTLSEQSDALHFQGDGLFASGSASLRPERVNIVQSVGIRLQQLLPCYTLGAQSAWQPECNPDFAVIEAVQIEGHTDSDGDDQSNLVLSTNRADETFRVMVAREPLLTSHLSYQKQPVLSVAGYGKMRPIASNDNVAGKAANRRIDLRLIMYVPARSEEIEHLRASLVGTSHG

SEQ ID NO: 3976 - protein, 425 aa, Gluconobacter thailandicus
MAPLRPLPPPNFENIERTIRRVLDRFDAPPIASDRSPEDILHKILDHIRNNDWRGVPLSFVIQSAGFAFSSDFRNTPAFELIRSFLLKEVDASTRSGFINPMVRVYMESFDPAAHHTLDLAATLQRNREQIGPRWQDLIFHIPDLFDPHSVLETIAERMDAMDDPWHELRAIGLRQPHAPGLMDFAHLAFIRRIAPRLNQKQEIERLLGWLRPDGQTLQQTGAGAAINALLAPWRQQSPSRDISSLLTDRLTEFYGHPKVHRHPAWNEVDPELEKMFLRWLMRADFRFLFRILDEVERGHMWSDREQFWETMLEQGLVDELWVAFNEEGYRVAQEKLPANTRETTLRFGHQTGEKDKSLLLMRIGKKIVVEGTYNFKLHIFDADASGVPELYKSQYDVARIRRSRCLDSFAHLGDWQTRARRSIL

SEQ ID NO: 3977 - protein, 1028 aa, Gluconobacter thailandicus
MNFSFTYSSEAVVLDVLPERRGMLARMFATSSSGSDLENLSEQEHRLVFALGDLRALSDEMDERLEITRSRIIIGHRLVAALDAETAATLGLPSLTDLMLCTDAEGVIGSPDFRLSYHWERNGQRRTPRRTGAILDIAGGQRIPLWMLDALDVADGFVRTHDDARHWEALARFRRALDPGIEMAGESPTARLSMTDFLQGLKISLSDCLSISPNKDGTDFEVVPFSSRRSDTEGMSSETDGELEYSDLGRFQNKFRERGVLKAYSLARGHYLVMDPSIAPVLKVMSEMQHASPQERHAFIRNPRICITEAVESDLRAKGELTDLSPEEQEELIESVAVPAFVETKEYSDRVIGVEVYRGNLIGRDGPSGTTWLPEAFSPEVSALTGDMSVSELRALREKVEAGLTAGENVVPVAGGILPVTPQTLAFLDSQLAAREEASGEVAQEEAEDAPKSGPVILKTLENTDNLSWNIPLRPRRSDMGETVPPGIFTRLKDHQVDCLQWQIRAWKAGLPGILNADEQGLGKTLQTISFLVWLNEHMKRVGPRRPILVVAPTSLLKNWEQEVERHVEKPGLGFLVRLYGSSISARKLPGRQGTDKETGEEKLDFSDIHNAIERDSGHLTWILTTYATLTNYQHSLARIPFSVTVFDEIQNIKTPGTLSFLAAHTLDTDFRIGLTGTPIENSTRDIWAIMDTLAPGALGSLQDFRERYGKAEEGNMEELHQRLFSSFQTRPPLAIRRLKETVARDLPAKSRFLYPQAMPSLQAQKYEEARIKLQKGGAGAALKMLHHIRSVSVHPAIDTDLDTEDFIGMSARLSTTFDILRRIRTAGERALIFIEHRRMQHRFIELAKVKLGLKKIGLINGDTPIRKRQEIVNNFQKNLDEGAGFDLLVLGPKAAGTGLTLTAATHVIHLSRWWNPAVEEQCNDRVHRLGQTRPVTIHVPLAIHPNYREQSFDLLLQSLMQRKRQLATSALWPMGDSDTDVAFLAEKLKEGDSVSKGDVICHSMEKLYARDGLEIPESNQHGGWYFK

SEQ ID NO: 3978 - protein, 507 aa, delta proteobacterium MLMS-1
MESIHQAAVFITSGWGVAAICFLIAGGALYVGVRFRADITRCLAQVRQACELLERSDNDVEFAAQIEEIDELLRQNELLCHQWKEFRKSLIDPDIADQEQVLYATHNVNQIFSHNTLLAQRINLRLYNAMPNLLTGAGILGTFLGLVAGIFLAGGNLADPEHASKALEDLLGGASLAFLTSIVGLSLSILFSWREKYRLHEFEKYRKRWVEGLDNRLRTITPEKISRDTLVEARRQTRVLADFTDQLAFQLTEALERTVPKALAEQVTTPLAQSLEKLQAAVEEMASKQTQNNEEMLREVVAQFTEAISGAAGKEMKEFANTISSMSEQMQTQVTALGERQEEFDRHSRESTTNLAKILEQGAEGMSKQLSAQMEEIGKQHEEANQQARQYIRELANTFQEGAEVLRRQMAESVSEIVNAISRSVQEMATLLDSTAARMAAQLDQTAEAFALTANELNSSVVEIKAMLEGSRSLVVSNNKVKTTAFNFRDFGTGETLGRWRNVPYAS

SEQ ID NO: 3979 - protein, 272 aa, delta proteobacterium MLMS-1
MSTGQTPQQTAWEDDGAGYLIAVSDLMAGLLFIFIITLMAFVLNFQQKSKQAEIERQELLREQKRYSLIVDDLTNIGHVRDSLLEDIGSKLRQLGVQVETDLEHGIVHLTEQAINFPSGQAILPEEELAKLAKVGDVLVDTLPCYTADPPAYLNCSPEHAGKLESVFIEGHTDNVPLRDGSRKFQDNWDLSAQRAIFAYRSMVIGEQPLLGQLTNTAGFPIFSVSGYGEGRPRNRYEAPTADAANRRIDLRFIMTPPSDKNIPMLEKLEGAL

SEQ ID NO: 3980 - protein, 486 aa, delta proteobacterium MLMS-1
MSTLQHAISSWKTSFPNPDDVLLPIKTRHALVEIDRVLAGAVAKKPASIDLKRSYLELKAEFARVGNLDTLNRRVIRHIPWIIFEPWEEDPPLVEDHRFVKAYVKRIIDLAHGRLVTGFVIGLLFYYPSQLPHFSLLAKVADKLLATCERPRCRQLREDVDNYGLLAEDGPKLFWHFLSGQIGSLSERLARTNCFSGMLLKSAFLEMTLNEALRLARKSLGTDGFRLDFINSLFALALEREQGKVSLRFDTPSQRKQFAEALLLPFLDRPIDQNIQQVIAKDVLGLYGDPRFDRRRWQGVDEKAIRVVLDWLIKDTLEDFFRLLAYFARGNEEATRHWRYRRAFWGAYLKKGVIEAAWVALAPKLGKQAAQILSKEDATFATIERGPGVLANHSALIMEIGDLIITEWSHNGKCRAWSHHFVEIGVGPKMYQKSYNRPQLIDYPGMETAHHHSEKGSWQRKLKDYIYEHTGITVRYMDYMPGANSL

SEQ ID NO: 3981 - protein, 952 aa, delta proteobacterium MLMS-1
MTAILQHTVTKQGVTFRLVDSASEPIPLDNWGSFTVTTGHGQGSVGCLLGLMVDEKTHSSDNVSIQVAHGEIAALDPVRLTQLGLPAAAPHRLELRGSGLLSAPGFSFEYRLITPSGRPAIGVQRTGVQLKAGNNLYTLLDPLYSLLTDLESFNNTPPENLDQRFMIWAELKKLLPADAVVDDHLRNMHIVRADSFTIDFDDKEQVNPVLLATADHSEPSVHSSDWTTREILTPIAQRSMFSRFAALSDVQARYVLEGGWYVVLSKPIRQALEVVKEYQGRKVEERRALLDNPVGILKERLVGQLTDEQIEAIFEETPAFLSARVQGLGEWNPKLCAYMLPGTQKWLPPESALLNLPLQDQVFSIPSHELPELAKKMHTALAAGDSEITFADQTFPVTPESCDTITTLVHKAEKLTKTHTPEDDKSRTLDLVPQIIDNLDNLGFSVEPRPTRGSIGGLPANLESSLYKHQRVGLQWLQEHWVKGNSGALLADDMGLGKTLQALAFMAWVQEQKEKEPLTPKPFLIVAPTGLLKNWEDEAMQHFAAPGLGELTRAYGGGLRDLMAETQREQIKKINHTDWVLTTYETLRDRIKLFIGVDWGLVVFDEAQKIKNPTARVAEMAKSLQADFTLALTGTPVENRLSDLWSIVDTTNPGLLGALKKFHDDFEKPAQSDPTAAAPLAHKIMEEQKPSIMLRRLKEDHLEGLPVKKQWLLTEEMPPQQAQAYEEIVASAATADMSKGAMLEILHALRKVSVLAVPLGAAGMTDEIVYSSARLRAMINVMDELFAKNEKLLVFVEFLDLQESLIPYLQQRYLLPKPPLRISGKVSGAKRKSLVDSFQQSRSNLFDVMLLSPKAGGVGLTLTAANNVIHLTRWWNPAVEDQCTDRVYRIGQNKPVNVYLPLAIHPRFNEHSFDQNLHLLLERKRKLSRSVLTPPAMDDSDLAGLFSHSVGK

SEQ ID NO: 3982 - protein, 679 aa, Methylobacterium aquaticum
MTELVLAFGIAARDAVLAAAGLLKSEAIPGLIAVALVLALALLTLLYGRGIAVRVAAIRKLRLVVRRAADEASFGRSIADFDAEIERSGSRGARKQVATAWDKYRETLVEHDEDGAIILRNSVRPAVFFNADDLGFGAGFWRAVPGLFVTIGLFLTFLGLISALGAMDLSTPDKVQSSLRELLLIASAKFIMSLTGLLCSIVFTIVLRWGIGSIEGALHTLCAEIEKRLSFISLENLAAEQLRATREQREHFRLIGLELVAELGRPLREDIPAAISSSINATIGPLMQQVGQLGTDHMGSMVKDLSARFSDDVGRALAQASERLVQAGDRIGELSTRMDQSSGRMGSEMDAAVTRLAQAVDDLRASMGATAATTNNAFTDGADRLLGAMNQTLQEIRDNTRAGAEAMGAAAADMRAAAEGFRTELEAATRTGAADATARMQAAGQDASARIGAAGSTVAEAFSRTASDIAEATKEVGAKAARDLLAPLDSIAARLRETADGVTAAAGSTGRLGDGVRASAEAAERAAGQFRGASEALVAAAIPLRATTERIETGIRQLAEATQHVAGTVSQSAEQTARSAADALAAAQTALGGQARAIEASLAGAGELVNRLKGQGAQLDSLDEKLGTAFDLYTMKVAAAVDTLSDYVRRMQAELAPALDTLRAVVEQAEQFVPESRRR

SEQ ID NO: 3983 - protein, 310 aa, Methylobacterium aquaticum
MRGAIRRHAHDEEEESAFVSMTDLTVSFLFIVIILLAFFASQLKDDQTVPVAEYQRVFDERNALRTSKEALERERDRLAAENAELRREVARLEEELRKERTNRLQTYLAAVSNERDRILRTLRDRLLADFPDLKEIVSIEADALRFKGDGLFASGASRLAEDKRRVVAAIAARLNELLPCYTFGKAARWQAECNAAGAVIEAVQIEGHTDASGQDRSNFSLSTERAIETLFAMSGREPALLDDLNSAGQPVLSVSGYGRLRPVADNASERGKATNRRIDLRIIMYTPQNVEEVERIKDNLRRGLTGTALQ

SEQ ID NO: 3984 - protein, 438 aa, Methylobacterium aquaticum
MSLDDILARLRIPEPPALPNLKVLTATAERVLQRWPDVVADPLESDRDALVRRMQIHLAEDRWDDVTMSFVGQVARAAFDERRRRRPDLADLRRFYLDEIRASQRTTFLGAMASVYLESFEPGAPHTRDLAQALSEVRDRLGARWRNLLAAIPEVFRPDAAPEAVARAMMAMQSPWVGLKALGLRSPHAPGLMDFAHLAYVARLEPSLATRDGLERLFAWLKPEGQATARSSGASEAIEAVLGHWTTGDPPETDLSFITQSLVGFYGDPRVQQGGAWAGVAPDRLAVIIRWLTGENIRFFMDVVSAVEDSHMWEPRRRFWLKLHAERRIDAAWVAFSPSGTEYARRMLAARGTRGVLNFGQQSAGGSRANTSLLILKCGTKIVVEGSHSYKVHIFRDGDPRAPTLYRPVYDCERIRLTLGAEARSHLGKWQDWVEERI

SEQ ID NO: 3985 - protein, 1033 aa, Methylobacterium aquaticum
MSPALAFAFDPDSITLSLPKTGGLLGRLGLRRDRRELDRLPPEERTLLLAIADLRALAAEKPTELFEVAADRVRLSHRLASALDAKTAEAIGLPPIVDLALRTDAEGVLGSPSFRLRHEWFKNGQRQTVQRVGAILKTSAGERRLPEWLMDAVAVSEGFEPGRDEALHWNALARFRQLLDPGVRVADSTPAARVSMTDFLAGLEVRIADRFALSPKDGDDFDVVPFSGLNLAKSGYDEATGIPEEAGELAGPLLRGFQDRVRVRGALSAYRLGPGNFLVVDPAAAPALSLMARMQHAPASEREAFLRNPRPLITEAVEAALRSEGRLDGLDSIGEEEAIETAALPLLVETQEYADRVTGIGVFRKPDLQIGLDSGTTWLPEAFAAQLVRALEALAPAEVDALHHRVSDAMAAGETTVPFAELDLPARPEALALIEHYRGSDAAPEDVHGMDPGPSGPVVLETLVNFDELKWTAQVKPRVAAGPDTLPSIVRTPLKDHQRESFAWQVAAWKAGLPGILNADEQGLGKTLQTIAFLAWLKQHAADPRATHRGPVLVVAPTSLLENWEQEVARHTAEPGLGHLIRLYGSGIGVRKRADTSGRDIETGESKLDLAFLREALDEGRAHRYWILTTYTTLVNYQHSFRQIPFSAVVFDEIQALKNPASLRAAAARSVKSDFRIGLTGTPIENASVDLWAIMDQLAPGSLDSLPEFRGRYGTPDATNMAELHRRVFASDATLPPLALRRVKDVVARDLPEKVRRLHPRPMPDRQAAAYEDAHFKLAQGGAGAALKMLHHIRTVSVHPCLDDTEDDSAFIESSARLTAVFDILQSISEAGERALVFVEHRRMQYRLIELARARFGLSRIDLINGETPITQRQAIVNRFQRRSAGEQAFDLLVLGPKAAGTGLTLTAATHVIHLSRWWNPAVEEQCNDRVHRLGQTRPVTIHVPMAIHPGYREDSFDCLLHGLMHRKRRLAQSALWPAGDTQDDVAELRRLLNAAAKQVGSDPVRTAIAAMCSRIEMKAPVWTNDGSVVFDI

SEQ ID NO: 3986 - protein, 642 aa, Methylomicrobium alcaliphilum 20Z
MNKTTFDLSSLLPKFSFLFNGGMTEGEGLSAFFVLLLLIIAGLFFGYAVYGYFSAAKKIRFYKDLLANVDQNELAGKQRDIRNKALEHEGYGRLWREFDESLVKSSDGKRLFNTLDAAHFFNVSTLAGRLTQNRLLAAVPGFLTAIGVVGTFVGLQLALSQLQLQQNAGVEELRDGIGSLINGASIAFMTSIWGIGTSLLFNFGEKLLERGVRKDIYQLQNQIDYLFPRINAEQSLVAIADHSRSSDETLQGLAEKIGDRLQEALIQTTSSIQVGLENSLNQIMAPAIQSLVDNANKGSEQALESLLTKFIDGVGEAGKSQKDMMEEASKSVGSAVNEMGSQMQNFVGQLEQHQKNSQQLASAQVEQIKTQLQQITDASQQTLAQTAENTQDIFLGLQQRLQQQYDEQQKTDRQRQEVFEQGVENSKQNQQQIMDRIEQMLTVQNAASAQIHEQLELLLASFKQVTSENSAASKSLMQSSQQMTSVSNQLGLLSTNVKQAAEAISEPVLQLLEANRQVSAENKAVLEQSQVIFADLSRLNVQFDEVGKTLLQASKHAETGFNALDQHLEAFKNGLKTHIQDLEDELSKLLNSYSEQVQDQTYARLNQWNEQTREYATTMKDVVESIASVVDEIETKASGNYA

SEQ ID NO: 3987 - protein, 252 aa, Methylomicrobium alcaliphilum 20Z
MKLGARSHSENVDEENPYWISFSDIMAGLLVIFIMASLALILELIQVQEKLKQTQIEVTEAIKEIAKAEQVRRDILYEIKEELMQKNILVEVSDNDSVLRIPDQQLSFKTNEYTIPPEKSSQLIVKAIGNALHRSITKESRFQYLDTVFVEGHTDSRRSPRHMGNWGLSTFRAISIWNFWNEQLDHEDPLAGLKNHDGKPLFSVSGYAETRPVNLLERTEAELQQNRRIDIRFTVKRPTIHQYEQVNALMAE

SEQ ID NO: 3988 - protein, 498 aa, Methylomicrobium alcaliphilum 20Z
MLKLPAMNFSLPEWEPKRDFAPYESLTESLMQMSRKTGFQSKAFLKSCNAIFTKAKQGKVSEIPGLIRKPLDVRALTTLWLSELFFEMCPVTQELINALYHPRPFLSKLVIQQLLRLFFQRFEQAGDLNALLHCLHQELGRSAKQLKSSSLGKLIKHKTKIINVEGPSWVAKTAISKKTDLDIFIESIGLKSFAESRFYSLCQNHYYLEQLRKLEPWHPDPLLQEIIKPSVYESPYNQTEMLGHEILRILIDRSPKEKVDEQWQGIILTIAGDPRMSKSSPRYQRWWTALSTQQIQKVRGWLSRFDLLLFLKVLEDYADMNGKEDMNRMFPARKKFLEGLFDLGLVEDSRLFINKNAEYYLKKNYKKDELPYYSIVADPNRSMIYLKVKGKHMIEGTHNFKLWIYEDLPPDSQIFNLEEKYFAPKELTTKLESNFYKYFNGLSIKSPVSITHNGDWQYKAIDAFESFGVRINPEKVLTEKMYLQYKRKVGLQSNFRML

SEQ ID NO: 3989 - protein, 1003 aa, Methylomicrobium alcaliphilum 20Z
MSLKNLIKKVLINGSTTSFSVLPDSEGLNLFIEYELFKDCAVGNADLLLLNQYACLQMLVEEGLAESIRNGFVIPSENAVCLDEGVRYLLKLPPVFEGRVSTRVEGQSSQAAFAVRLVLNYLGEDIYQYELVGPCLKLSEKEIFLLNQAQWSAFKCVAMHQQLSTADKSEQQNLLLIHRLQQAQKAGLDIDLSHFNKLYILHPEQVGVAAEQDDNGDLILTPTFGAGIDPRDTSIRLGQLKGANDVASLRIRDDIVLLDEDRFKATQEILTNRRIAKDQVKHFLATPSAFLNAALVDLDTGFSLRVKGATAFHHGYFGDTDESGIDWFGSLAEKTIHAPLADQLHDLEEVEAFEKKFHDAKAHGADSMVFNGQNIDISNPQAIEQQIRQLKKEFSRTTRQHESPAPIETEAPMERAVVDIVTNDEILEFGGLALLNRAEQSIFTEKIDFTVYRRQPYPHQEDGVRWLLGLMQCALKPSGSKIEGALLADDMGLGKTYMSLVALSEFYRLTESSGDTRRPVLIVAPLSLVENWIDETDKTFMKSPFKDVVVLQSGKDLKKYKIQGASTETKQAVTDDSSLDSESIRYSLKVGKYYGNDRLDLPQRLVVTTYQTLRDYQFSLCRIDWQLVIFDEAQNIKNPNALQTRAGKGLKARFKLLATGTPVENSLSDFWCLMDTAQPGLLGSYQEFRTQFIKPINQVGDNEDAARVRLEVGKKLRQQVGTFMLRRMKEDQLDGLPEKRIFVGAGNNNQSGWQYEPRLASVMKNGQLNAYDQVLADIQSIKSNGGDARGAILQALQELRAISLHPVLMQKSEHPNDLEPKKFSSQSEKILCALQVLNEIQKRQEKVIIFIINKNLQRLLKLCLSQLYRVPVNVINGDTKAVVSTKGAETRKQLIEQFEAQKGFGIIIMSPIAAGVGLTVVGANNVIHLERHWNPAKEAQATDRVYRIGQQKNVNIYIPVLLHPKHTSFDLNLNSLLQNKIDLKDAVVTPQVVTPDEMFSVFQ

SEQ ID NO: 3990 - protein, 781 aa, Pseudomonas xanthomarina
MMDLLQHLIPDFAHMFSANPNGISAWFWLVTALIFGFSLFFLMLHFRHFKARMRALRSLLDGQSKDTLAASRRETLHKAQELQASNVGMLWREFDESLVQSSDQQKLFNTLDAEHFFNARTLASGLTASRLLAAAPSFLVAVGVLGTFVGLTVGLEGLVGTSDEIEALKGGINKLISGAAVAFMTSVWGVAFSLLLNIIEKMFERSALNDIQRLQHDIDFLYPRIPAEQSLVHIAEYGKESKEALQELHERIGDRLQETLNGMNEAMQTALTDALNNIMAPAIQTLVSTTSQQSTQVLETLVGSFMDGMTSVGREQGSQMQQAAADVNAAVSGMSERLNQLFTSLSEQQGRQMEVAQQQSSQFEAQLQRIAGSADQRQEQLEQRFSELMAGLSSQLQGQLGSAQRRDEERQAMFERLLSESSANQAALLEKFSSSTQDQMRVMAEAGNERHNNLEKVFSRLMMNLNTQLDTQMGAAEQREQARAQRHEEQQAAVLAQQQQLIGNLGQTSQQQIGAIAEAAATQQRNLEETVSKLLGSFNEQVSGYGVQAEQREQSRQQRFNEQLENMAAQQRELLAGIASAVQVTQQQSRQMAEQHQQLMTRLQQATEAAATSSKHMDSSANQLGLLSANLRQAADALGQRLEAVTQGVEAASTQNAALAAQLQGQASSLSQLQAALLEGAQRFEQAASEARNGFGDMKQTQQEFLSGVRHEFTTLGETLRAQVEAIEKQAEEWLRSYASEVRTQTEDRMNKWNEVSLAYADQMHRNVQAVSGILDELEAR

SEQ ID NO: 3991 - protein, 254 aa, Pseudomonas xanthomarina; identical to SEQ ID NO: 1282

SEQ ID NO: 3992 - protein, 754 aa, Pseudomonas xanthomarina
MRLPPVEFPAASWGAQMLERWTVLTKKAAAMETEAGNNDAFERMLAVLRGMASSGRFDGLPALLRRRITARALSWLWLNDEVIGSRLLNTRLLAALLDAQQPRLTRMTLQQMAQLYFRRFDRLDEKEGVRELLERSLLQQLDLIPPSKIQTSRADPLVTLKREGHWLLSLDGPRYLAERVRQGGRELGETLMELGLHGFDDGRYGDICRAHFYLETLRHLPLGESDPVLDELLKPTVAKAPFEGTRRIGHVALEILIDRAGQEPGEVWQNFILNLAGDPRISSTNERFVEWWRPLGEERIQKVRGWLSKEDLRLFLQAVEQYGLETANTEMQRMFPARKRFLEGLFKLKLIRNTRLLLGGKAQQSVKRILGKDVKTSFARMDGPMNDKAVIYLDCGDFHLVEGSHSFKIWVYLAAPGETLRTYERNTFSHQDLTTTVPGTYKKLYPGLPYDAFVHTPHAWQNKVFTFLAENGIALDVEQLLSAEDYRLQLRKFGIPAVSAKRTVVPAPAKEGAKAVARAPTAAQQGTEHAAAPMLRNADVPTPARRSADVESVAANSAMRSSTIASGRDNPVPQQTKLPPFSSLQLAALRYLETHSRCGFYALLEAVSNQGGNALNVKTMLESSLSQYVQQDGEGHWLLSTHGEQLVAELARSEPSDASQSVPSAANMNANENAGSRVARLEPFALAVLRYFAANPGDKVRYAANVLEVDARLVNQALYGPLKGICTQDDKYGWQLTGAAQRELETFDAQGEES

SEQ ID NO: 3993 - protein, 1012 aa, Pseudomonas xanthomarina
MRLRDLLMSLIGERGVPVGSQEGFASSADSNGVNFYLPVQTFKALQDGKGDALQKIQLIVLNMLAEQGIAEHTANGFHIGAEDIAGMDSEQADILRLPRRFTGRFQTSISGRTGNSGFRVGLAVEVAEGLTPFSRKGPYLCLTSTERYWLTPAELMGLMAWEKHESLEPAQRGEAANLRLMAELQTAARSGMRIDLSHFDRLDVVVPENVGVIATRLPDGSLMLCPSLGDGSTPDQLEKRWSQLDMSADGGVLRIDNRVVLLDQAKMDGIRNVLANKRIPPDKVAEFIASPTAFLDAALVNLEVGFSVRVAGIGKLQHMDFGALDATKNDWFALDKRPAPAEIIPKLVQTPEELERFEEVLRSAIEQGATSLSFAGEVIDISDAPLVARQLDQVKETLERPELPEQSAAAEDDFDEPKEKVAVILKDAGEINSTLLAKASNARLLDAPDWSAYARQPFPHQVEGIEWMLRLMSAALSDDHDDLYRLQGSLLADDMGLGKTYMSLVAIGEYLAAQRRSEKPQKPVLVVAPLSLLENWEDEVGKTFLSIPFRDLVVLQSGRDLNRYRVKGAERESVQLAALADDDGMMDAQTIRYALTIGPEAGAQRLDMDRRLVLTTYQTLRDYQFSLCRIDWGMVIFDEAQNIKNPNALQTRAAKGLKADFKLLATGTPVENSLGDFWCLMDTAQPGLFGSWENYRDTWIKPILSAGEEERDEVRVRLGEQLRKAVGPFMLRRVKEDQLKGLPSKTIRSGVEQVDRGIQRYAPELGVSMRGIQLQVYDDVLDGYRARRASADDMRGSALAALTQLRSVSLHPRLDDEPSLYSRDGHHARQLMSESGKLAVMLKLLDEIRDKGEKVILFMMTKRLQRVLKLWLDQIYGLDIAVINGDTKAVATKAEEMTRKKLISAFEAKSGFNLLIMSPVAAGVGLTVVGANHVVHLERHWNPAKEAQASDRVYRIGQQKEVFIHLPAVTHPQFDSFDVHLDRLLRGKLMLKDAVVTPEAVSESEMIYSMGL

SEQ ID NO: 3994 - protein, 729 aa, Kosakonia radicincitans DSM 16656
MEWLNSFLTILTSVQPEKVPLVVIIVVAIALAFFAALYVYRAIKIVNKLKKQSGIISDWKNETTAVKLQKLSELFTGTPLAHSWSEFAESLHQQKTLVDGELKLKDVRATAPAAAFFTEQQLIDIPLNTEFFKHLPGILTGVGIIGTFYGLMIGLNHFDPSTPEQVTSSVASLLRDVLYAFLGSFTAIAASIFVTWLEKLSIAKCYKYLEQFTAAVDQLFETGVGEEYLAELVKSSNESATQAKQLKDSLVTDLRDMLQNLVASQVAENEKLAHTLSSTYRDTGQQFAEQVSGAIENSLKSPLDKIAGAVQTASGDQSGQVQNMLQDVLTAFMSKLDNTFGKQFENMHQMMGQSVGAIEAMQSGFAGLLQDMRNASEDTRQGSAELMSQLLSEMKSGQVAMQAGMNDMLASLQSSVAKIGAEGEGAGERMAQQLEKMFADSEAREKAMAEQMKAFIDSIQQTSQQGQSETMKQMAASVEALGEKLGSLFTQLEQGQQQLASHQQDTQTSLHQETQQIIAGFDEQVRLLLNALNEQQGATESTLRRLAEQTSAHLQDMHTGADKMRLAAERFETAGDKVKEANLLTADVLTKAQGAGNTLSQASQELSSVVADYRNNREAVAKSITLLEGVIANAQSELEARSQFLKELKQHNEGLHDYNREAKEFLENAGQVLANGFNQFSDSMKTSLDATLGALDANLDSAVKRLGSGIDELSESIENLEEVLSKVPA

SEQ ID NO: 3995 - protein, 247 aa, Kosakonia radicincitans DSM 16656
MFGQTFRIKPRRSDEAEKPFWISYADLMTAMMVLFLVVMVASLSSVTQRIQRVEQGEKLRGQDITRLCERLELHARNLNKTIVVDCRDNRISFGEAGRFDHNRFFLNADGQKALQDVVPLVLEAANSEEGQKWFKQIVIEGFTDTDGSYLYNLHLSLQRSEWVMCSLLDSRSRLQQQITPLQQEQIRKLFLAGGVSFNNAKESKEASRRVELRMQFFGLKDEHDKAAVDVGSVTVPTTEKCQLEMPL

SEQ ID NO: 3996 - protein, 567 aa, Kosakonia radicincitans DSM 16656
MISALSRLSSDIAATVKRHIDTEAAAFGDFPKLRAAEQYLSVKMEKSERTTVPPLTKRLKAITALRQLKVLTRYDWQLIFAGLADSDPDAAFPVLLEDDSLYNRVEQEIQQRIDSKKLKRREWKFLCSSYFGYHAKKPDENNNWCSLRDQLRIGYGVIKGQVRREKRWMAVIDEYQDLFTPDAGNLLANKMSAGELVDFSALETVAQVPDNSWLWYRAFVVLLAKILELDDDAFKEHLPNLLELARQRERYKNLILRACLMQYYRSSFRNTPHPQLKQMALENWGSPQLHSKQNLWLTHLKDPDTSEKICGMVRSWLAKEDLTHFFQLLKGKDDVDQARLFYWLRFANQMGFTRIVIGQDARQNMHSDFVAFRQKNKGRLSTLSGGNSADNAVIMQIGNYLFVEFSRTGNALYVYELSSAPFNPEKSDLHLNYELKAGAIKHRHAPTAYGYSDNHLTGWMVNYEDELRRLGIRYQPSDIVVSPSPSPSPSPISTNMVNPPPADAMQGSREQAIRSLLKQLDATVSDKRNIGGALHVRLSSRNAEVVEKLVRLGFKQKNGDPLTFWSK

SEQ ID NO: 3997 - protein, 390 aa, Kosakonia radicincitans DSM 16656
MLNRLLSKFKGNNISSEKRVSHRYQVEESGLSFLFKLADEDALWPLVAYMEQLAEEEYVVELSDRWLLTWDELYRLATDEDHQTSLSLLGIPEIKPLKVCLAGSGSLSDADFNIYIRDWKESATGRSVQIERTGAIFRNSEGQFLQTHENWLLLSALQQFRDEQQHRAGENTNQLGWAKIRRLTKKAQAELDNYLAKTIVVKPESLRLKLRKATIHNTPVIEIEPSFDDQPTQWLNSFDNSKLVQDQYRVLGDDGSLSHVIISPEVKEVLSSVHSITGRRIAGDDAVSFIRNPYTFIGEDAASVIPPEQHEEALQDAHIFFHRFSVTPVLDDEAKRISSVSLVLEPIAARPQPAITFSLTKPYEFEEFIQELAVKLASGLPAGIWLNRHG

SEQ ID NO: 3998 - protein, 729 aa, Kosakonia radicincitans UMEnt01/12
MEWLNSFLTILTSVQPEKVPLVVIIVVAIALAFFAALYVYRAIKIVNKLKKQSGIISDWKNETTAVKLQKLSELFTGTPLAHSWSEFAESLHQQKTLVDGELKLKDVRATAPAAAFFTEQQLIDIPLNTEFFKHLPGILTGVGIIGTFYGLMIGLNHFDPSTPEQVTSSVASLLRDVLYAFLGSFTAIAASIFVTWLEKLSIAKCYKYLEQFTAAVDQLFETGVGEEYLAELVKSSNESATQAKQLKDSLVTDLRDMLQNLVASQVAENEKLAHTLSSTYRDTGQQFAEQVSGAIENSLKSPLDKIAGAVQTASGDQSGQVQNMLQDVLTAFMSKLDNTFGKQFENMHQMMGQSVGAIEAMQSGFAGLLQDMRNASEDTRQGSAELMSQLLSEMKSGQVAMQAGMNDMLASLQSSVAKIGAEGEGAGERMAQQLEKMFADSEAREKAMVEQMKAFIDSIQQTSQQGQSETMKQMAASVEALGEKLGSLFTQLEQGQQQLASHQQDTQTSLHQETQQIIAGFDEQVRLLLNALNEQQGATESTLRRLAEQTSAHLQDMHTGADKMRLAAERFETAGDKVKEANLLTADALTKAQGAGNTLSQASQALSSVVADYRNNREAVAKSITLLEGVIANAQSELEARSQFLKELKQHNEGLHDYNREAKEFLENAGQVLANGFNQFSDSMKTSLDATLGALDANLDSAVKRLGSGIDELSESIENLEEVLSKVPA

SEQ ID NO: 3999 - protein, 247 aa, Kosakonia radicincitans UMEnt01/12; identical to SEQ ID NO: 3995

SEQ ID NO: 4000 - protein, 569 aa, Kosakonia radicincitans UMEnt01/12
MISALSRLSSDIAATVKRHIDTEAAAFGDFPKLRAAEQYLSVKMEKSERTTVPPLTKRLKAITALRQLKVLTRYDWQLIFAGLADSDPDAAFPVLLEDDSLYNRVEQEIQQRIDSKKLKRREWKFLCSSYFGYHAKKPDENNNWCSLRDQLRIGYGVIKGQVRREKRWMAVIDEYQDLFTPDAGNLLANKMSAGELVDFSALETVAQVPDNSWLWYRAFVVLLAKILELDDDAFKEHLPNLLELARQRERYKNLILRACLMQYYRSSFRNTPHPQLKQMALENWGSPQLHSKQNLWLTHLKDPDTSEKICGMVRSWLAKEDLTHFFQLLKGKDDVDQARLFYWLRFANQMGFTRIVIGQDARQNMHSDFVAFRQKNKGRLSTLSGGNSADNAVIMQIGNYLFVEFSRTGNALYVYELSSAPFNPEKSDLHLNYELKAGAIKHRHAPTAYGYSDNHLTGWMVNYEDELRRLGIRYQPSDIVVSPSPSPSPSPSPISTNMVNPPPADAMQGSREQAIRSLLKQLDATVSDKRNIGGALHVRLSSRNAEVVEKLVRLGFKQKNGDPLTFWSK

SEQ ID NO: 4001 - protein, 1081 aa, Kosakonia radicincitans UMEnt01/12
MLNRLLSKFKGNNISSEKRVSHRYQVEESGLSFLFKLADEDALWPLVAYMEQLAEEEYVVELSDRWLLTWDELYRLATDEDHQTSLSLLGIPEIKPLKVCLAGSGSLSDADFNIYIRDWKESATGRSVQIERTGAIFRNSEGQFLQTHENWLLLSALQQFRDEQQHRAGENTNQLGWAKIRRLTKKAQAELDNYLAKTIVVKPESLRLKLRKATIHNTPVIEIEPSFDDQPTQWLNSFDNSKLVQDQYRVLGDDGSLSHVIISPEVKEVLSSVHSITGRRIAGDDAVSFIRNPYTFIGEDAASVIPPEQHEEALQDAHIFFHRFSVTPVLDDEAKRISSVSLVLEPIAARPQPAITFSLTKPYEFEEFIQELAVKLASGLPAGIWQGYELELSQLTLEQLEHYQSLLLRWQQEIAGIEFDEVLDLNKYGDRVIGIGEFEKISSPFLIKGESEDWLPETLGEALLASDFFEGWEPQSQEQLSDLEERIESAASLQETTVSMPWNEQSLPIDDAKSLLKNWQKKIETLESDTDKDIAEPEKRAVLQIEQNIEHAAYIKQRREALLSAKDAEPALPVLLKEHIHLREHQRQGLAWLQQLFLKSPEEISGCLLADDMGLGKTLQILAFIVWYIEKNPDGLPTMIVAPVSLLDNWERELDNFFHTANLEVLKLYGNAVKAVKFHKDEIPVELRAQGIKNLLRPGWVGGAKIVLTTYETLRDQEFSLARQKWSIMVCDEAQKIKNPAALITHAANAIQAQFKVACTGTPVENTLVDLWSLFDFAQPGLLGALNDFGKQYLRPIEGATERNNLVLESLRRIIELQTLRRTKEEVAKDLPSKIEDISCKQLTMAPLQRDLYVSSIASYQNRQKMQDELEQPGAGMLGLLHRLKLICAHPYSVKPDNRLRNHSPKLEWMMRKLEDISKKGDDKVIIFTELRDIQRELQYAIHQRFGFKPYVINGDTSTRSESANSRQKLIDIFQEQPGFGIIILSTVAVGFGVNVQKANHVIHFTRCWNPAKEDQATDRAYRIGQTKDVYVYYPTITDESIPTFEETLDALLQKRRALARDMLCTKGDLVSEDFNQLLRS

SEQ ID NO: 4002 - protein, 481 aa, Dactylococcopsis salina PCC 8305
MLNAIEINNWFFINIVRIIFILGLSIEIVLIVNYYRETGKKAKQKNENRDLSIFSKGNIRSPLHFIPTLLTAIGILGTFWGISQGLKGIALENINDTDALLNNSTELLAGMKTAFQTSLWGLGGASLFIFILAISETLKRIRRNNLIPKIRQNSDQNTTQALINQLGNVVEKMEGLATLNAKNIGEEVATALKPIFGEIQNDLNPQRQTIENQRQELLKTLIGELKNEVIEPVVTRLDESAEMTREASHAVKELREQLAGMEAQRTAASDMMGNASDNLNGTLTNIDSMLQNTRQTAQQELENFRLNYQESLNQFFEQQNNLLEETLGKQREGLEEVVKELQRVFQEDAKNMTEQVIESMNTIQTTTKAVSDLANTTGLTSAERLAQIQEIARTLGNESKQINQAYQNLIYNFNQGLETWNENLTQYFEQANETYQQGRQESEQAAAEVCNQLNQTSQGLMSVANYLVATAEDLNNSNSNR

SEQ ID NO: 4003 - protein, 240 aa, Dactylococcopsis salina PCC 8305
MLNLDKLNSNSELDLEDEQDQESGVWLSISDLMSGLLLFFALLFIATQIQLQKKIEELRKYEEALKNLPLVVQTAIEEGVGGDAVEVDPETGDVSLDDKILFAEGESELKPEGKAFLNKFIPIYSDVIFSDEQFDKEIARVVIEGHTSSQGSDEVNRALSLERALSVTNYIFSEQLNFSNEERFEEKILISGRGEIDANQSLDNAKDRKVTFRFQLRRPDFSDFVNQEGEKVKESIDNQR

SEQ ID NO: 4004 - protein, 501 aa, Dactylococcopsis salina PCC 8305
MKNFKSIVSIEPLQLKPTALQRLAYNLENNNEYYPPDLPPEVAQYKNYTPRSLDKILMDLEDGNIDHITFLEWIYCIYAKQEWDREHSSEQRLATSRLVWENAIGNDMLKQRLCSRLAYYYDGNKKVLAPSFVETFSTLSDVVGDDDLTVSVLLQFRKRDPLLPLAQLSLAEELTPKNLFITAQLPSNLSIINDVLEYVVTAFSQSKLQQNHAAWLVQCLEDMTVEQEISAVETLLKNVSAEIGGQFTNLVTWLQNNYGSRTTASKWNRLSSEGKSALRQWFGSANYRDFQRLVDLVASQLPDKDEEEHPEKNQLISRKYFWEQYSNQFKRIRVLLPQSSVNVVGNQFVQNIDILQDDGSEETEICIFDFGDCFVVEFFRGSGSETRIFNRFQYPNIEQELFESSQLSVKRLRALGGKVHDHKYLWQIYCERWLRERRIVPNPGTTYFKRRNKHNPNQPYRDPYDPQKGLREPDADKQSKRKEVLRRWQREIERLEREAKY

SEQ ID NO: 4005 - protein, 629 aa, Bacillus boroniphilus JCM 21738
MFALFESIYNWINNIGLNSFTNGFLLFQVIFFGTYLALHYYMEKENIKAMKYIRTELNNLDSSLNIKELNKEINKIFGKLKENNPYRVQWERYFSRVKKENSVDEKIRVEPFFGYDVMHDTLGKRNILDNGSGIHVSLGVLGTFIGLAIGLSGLNMANPDLLREGVSGLIGGMKTAFYTSVLGVVLSIVWILLDSMITRKRNEDIEWHINKLHYFLNADDEEIFLNRLEKIQQQQTEQMKTLLTDALEKAMVPFVRTIEKGNQEISQQMKEQHETSLEHLHLMKNQSEDMANRIMDGVSESMNESIHEFSQVLRLAQENQGRMNSLLENTVEQFNQAAESNSNMIHKTENMVSTFTNLSEQMDETQRNYASAQENLLNAVNDIGNIQSMMVEHTATQKEMISHQQSFMSKSDELVNQFVAFGDRMAEVQNSMIETLVEKTDLVSKRFEDLSNELVEASNNQKEASKDSAEFMERAKVAIAELVPLSESLTTTINGLSELAESIVEMKDMQEEMIPKLDSWNTALVEDMRRFMTVTSDHLNGVTQQTRYSREQWESAAKHFESIKDELNSTMISFKDNMNQGVSETFKLFDEELREAVVHFKLMGEQYRNSVEHLTEYVNQIEEKVEQGV

SEQ ID NO: 4006 - protein, 223 aa, Bacillus boroniphilus JCM 21738
MRRRRKETNYWMSYADLMSAMLMVFVLLLSVIILDYKSDMDEKQRQIDAVTNVKNNIIADLTEEFKGSNMNIEVDPQTGAIRFPGNILYEVNSSELSPEGIKFLREFVPKYFGIILQDKFSEDISSIIVEGHTDKAGSYLYNLDLSQARAFSVVQEIYDENFVDFPEKDLSKDYLTSNGRSFMVPINNPDGTYNPDKSRRVEFLFRLKEDERIEELQKLVSED

SEQ ID NO: 4007 - protein, 810 aa, Bacillus boroniphilus JCM 21738
MTVQSYFDILHDRVTIQDDLEQEIFAGDELDLKEDLSALGLPIVEEHLQVFIQMTGLSGKQPEFKVTMKDTKGENVEFEWDIEGPFLRKEDEVKLLSEGIWQLYQVIHSEIEDPYEKIARVQHLAKKYHFILDDFLTREKYTFVEEIELEPKLLDDDTLKLEIKTDDAIADQLVEQNQLNASIKKGDTRQRVRFAPKVVEDIRKIKQKQVLRGEEIAQFAENPHAFYGGDTFTFNLEDFSERVKGYIVIQRVRYSVVNGKRVWFNTESGEPVEMDEGEMRDQVTREPDKLFYKQNNTYFYLDKKAKQELGFVDQEEKQTKEKIALEILKNEDELEYSKAGTGERRYKSYPIPEGLKANLFDYQKEGFFWMASLAEAGSNGLLADDMGLGKTMQVITFLLHRENQDQLAPTLIVLPKALINNWKNEIAKFAPSLSPFVYIHSGPSRHRTKAELEKENIILTTYDTLKGDQFVFGQVDFQNLITDEAQNAKNYGSARSLALRAMKAQFRLAMTGTPVENSLEELWAIMDFVEPGAFSSLADFRKQYVKEVNTEKLRALLQPYYLRRTKSEVLADKLPTKHIKEPYYLSASRIQQQLAASIVSARSGNQANMLTALMNLRQAYGHPSAVNDDIEPLVKHSPKLEKVLELLGTIQKQQEKVLIFTEFRKLQSILKVEITRKFKIHVPIIDGSTDNRAGVVEEFNKLEGFQVMILSPKAAGVGLTITSANHVIHFTRWWNPAVENQATDRAYRIGQERDVYVYHLITQDPGNFPNGTVEEIMHQILIDKSELAEDVIVPFNTKKMQSEVWESVRK

SEQ ID NO: 4008 - protein, 680 aa, Roseobacter sp. MED193
MEFIADIGTSMSRFIFWGSSFLTKEQAPGLVSIGILIWLLLSVLVVGISAHRKLTSLRWLEGQVRAAKDEFDFATQVNKISQEVKKVRARKGYTHITAAWDEFRETMIEDKSAGQPVLRNSVRPSSFFNLEDLHFGPGFSRYMPGLFVTVGLFLTFLGLISALQQITGLSDASPEEMRASLDGLLGAASAKFIMSLTGLLASIIFTIVLRSLTGRVERRIHTLCAELESRLSFISLEGVAMEQLEIARGQKDSFLEIGTTLVAELGSSLKKEIPESISSSISTAMAPLLDKVGKAGADGVGQMVTDLSSRFSDDVGRALSDASAQLSAAGDKIASLSDRMDRSSGQMGEEMETSVAKLARAAEDLSAGLASAAQTTDGTLNAGAEKLLGIMNETLEGIRRNTAEGADALKEAAADMRASAGTFREELDAAAASGSDAVRSRMETAGVEVEGAISEAGRGMVDLVTRSGHDLLSASGEFRESIQADLLEPITLVVGQLDEMADRLKDGSVQIATAAGHIKSGGDATRSAAETLTTASRDLQVAAGPVRSSVERIETATTGLAKSTANAAETVTRSSRETAENAARVLDAAKAALSAEQKLIETSLTKLGEGLDHMERQREQIDDMDDKLGAAFNQFASHVRTSLDTFAEHVRKMNGELAPALDTMREIVDQAEKFRPEQRH

SEQ ID NO: 4009 - protein, 367 aa, Roseobacter sp. MED193
MRRLERNRTRAEEEESVFVTMTDMTISFLLIIMILLAFFATQLNDDESVPLTAYERVRQERDELRVENQDLRASVKALEAELARVTSELETVTAERDRLLSELDQLRDENEALRARVAELEEENEHLRSRIDQLVEEIERLREEIKRLRDKIERLQVVNPLEAYLSQAIDQRREILVELRDRLLIEFPELQVVISPEQDALRFQGEGLFRSGSPQLERRQRAIVETMGRLLDEILVCFTLGERAERGPDCESGNALIEAVQIEGHTDSDRGRIDNVTLSTRRANETFFAIREEVAGILAHRNLRDQPVMSVSGYGEMRPIETNETTEGKAANRRIDLRIIMYAPSTVEEVEEVGRRLEALRAAGGSE

SEQ ID NO: 4010 - protein, 741 aa, Roseobacter sp. MED193
MSLMDALEKAGQLSALSVPELRYLQAAADRVRERWPDVQVARTEKEREALAQKLRDRVERSDWEETRLSFVVAAASAVFDAERRERPDLARTRDFLYAEIDLSTSETFLSGLLRAYLDSYVPKGTHTTALATALGTAARRMSTTGRLLLEAIPELMDPVSGPERLAARMSKMSAPYTELLGLGVRNPHGGGFMDFAHRSLTSIVQPHLSERDLIDWYIRWLRPPGKDVGRNTGAELAIEALIYPWLEKTPEDKLRSYLVETLIELYGDPRIKSGGVWGGIDERYMAIVHRWLTREDMRFFTGVVDATQKDAMWPPRRDFWLKLYDEGKIDAAWAALSSQAFEYARQHLMRQDAKNAHTRVGYQQARQNTSLLIMKIGNKIMVDGCHSYRTHVFDIADPMAPKLFEEGYNCDQIMRASDRRASGASKSHSSIPSWSRWVRDMINADVPWSQQTRPYTKVFRPRTPTRRTTPSRHTPTPRHTDLQPSRREIGASTSGQDIFSSTGAMRPSSATGLSNPTSRPAAPPARVAAAQRVQPETSQPVQTDSGDAASLKQVRFPSLTDRMIAYGPAAAAAVLAYLEAPEKGRTRPALSPKSREGLAWVRAVKGEPPLRLRNALEHLLLNLKTSGVDLDDLFVSFAAPPPISSQPTRSKTVPKKEVAESGGQKFPQLPDNAKGRLDLLRAHADALEDLGMWKRTFDQRKPLAVAVRKLREGSPDLRPKEVAELQMLYEELRRGGKGGQK

SEQ ID NO: 4011 - protein, 1032 aa, Roseobacter sp. MED193
MIQLTYDQDWVTLEFRSRQSLLDRLLSRGTVPDFDHDKRLSFALADLRATAEEAGDQVEIGSDRIQLSHRTLSALSSETADALGLPPLVDLTLRTDVMGQIGSPDFRLTHDWVRAGRKEIAHRTGAILETAGDGADGLRRLPRWMLDALEVADRFRAGSDLEEHWEALARFRRALEPGVRMYRADAEARLGMTDFLSGLEVTLTDRFSISPQGEDQFAIIPFLGERVEAAERDGEQISEAEAELQEGWLRAFQDKAFARGARPAYKLGGQSYLVVDPAATPVLKIMTDMQRADPVTRAAFVRNPRQKVTEAITDHLRSKGKLDGLSPAQEQELIEQTAEPAFVETREYSDRVIGLTVYEKPALEITGSGTTWLPEAFTGAAAEIIEAMAPDQVERLIQQVDAAIANGQPSVNVDGAEIPATQTSRAALEQRLEAIRKREEPENKPVIGEEIDPRIGPIILDTADNLEDLTWAAKISPRTRLASDALPEVVKSALKGHQTESFLWKLEAWAAGLPGILNADEQGLGKTLQAIAFLAWMKENMSRSEAGRAGPVLVVAPTSLLVNWEEEVDKHLRAPGLGNVVRLYGSALGGKKRPGQQGIETDCGNTLLDLRDLEEAIDEGRGHRYWVLTTYTTLTNYQHSLAKIPFSTAVFDEIQAVKNPVSLRAKAALAVNADFRIGLTGTPIENSTVDLWAIMEQLTPGRFGSLKAFREKFGEPAEGNMRELYSLMFEPQSGLPPVALRRLKEDVARDLPEKSRRLHPRLMPEAQAAAYETARGKLASGTRGGALKMLHHIRSVSVHPDASSPTEDETYISMSARLLATMDILRGVQDRGERALVFIEHVKMQHRFIELTKREFGLPRVDLINGSTPIPRRQEIVNRFQRHLARDEGFDLLVLGPKAAGTGLTLTAATHVIHLSRWWNPAVEEQCNDRVHRIGQSKPVTVHVPMAIHPGYQHNSFDCLLHSLMARKRRLATSALWPMGDTEEDASRLQQMLSDGGATRVEDPVTAAMAMVFKRDDTPMGPKNLDGSISYL

SEQ ID NO: 4012 - protein, 706 aa, Vibrio sp. AND4
MTNSLNLSSLWPDLSSLNVMPPQTPEQLSALFVVILWGVALFFLICSVVAFIRAILRVVWLNKSLDYAEKSTPSDARNDLISRAEKKKNSVGHLWLEFDETLLEVKDADDVVRLHNTFDADYFFNSSSLAGGSTENRMIAAVPGFLTALGVIGTFVGLQLGLSDLNIAGNVDVNEMKNGVAGVINGAKIAFMTSVWGVLLSVAFNFIEKILEQVIRKKIKSLQNRIDRMFPRLSAEYQLQSIANNSQQSRESLQGLAEKIGEKMQESLVQATQGIQQGLESSLEKIMAPAINKLVDETSDGNQKALESVLQSFMDGFGQQGEQQRVAMDSASQNVNKTLESMSTSMAAFVNKLEVQQTTSSEREKELISTISVQVSELVTQGNEQKRVLTEFVEKQVSELGEQLTKRESAASEREQKLASSMERTIKDLVENVSAQSQVLTDFVQNQVGQLTQTFSERDGMVSQMEKERNDIFVNQTQAMKAGTDELLAQVKAATESQQTTSNNIIEQGKQLQSSIDSSVSASARATESMQLSANELRAAADSMNVFGSNIKEAGNKLSGAVTEAVNSTKDLAEQNQLGVVKIHTLREQLLEDTSKFSAIAEQINNMLNSAEQSFSTLRTNQNEFLVEQKDNLNELTSEMKRNVKELTEQMAQLLEEYAEQANGQTAEHLKVWANSSTQYAESMNTAVRAISSVVDEIQDKVSQHA

SEQ ID NO: 4013 - protein, 244 aa, Vibrio sp. AND4
MRRGIRSHTPNSVDEENPYWVSFSDLMSALLVIFILAAVALIIELTQKTNDVEAGIEELKQAELARKNIIYDVRDELAKRNVIVEIADNDTVIRIPESTLTFASGKSSIPNDATIQQALKDIGVVLHSAIQKKDRFQYLDTVFIEGHTDSDGIHYRGKGNWGLSTDRAISVWNVWQNELSLTPKLGDLENAYHAKLFSVSGYAATRRANLQESNQQEKSQNRRIDIRFTVKKPSIAELERIVGQ

SEQ ID NO: 4014 - protein, 483 aa, Vibrio sp. AND4
MSLNIKKLKVSLPANPFGLAIKDFARLSNQLEVLSKSAGIENNKFRTAYGEVCNALASKKRVEDVIDSSVHVRALALSLHTDAKKNVSITRRLLNKITEIVKKPSSLVIESFYQHFLSEYDRLADLEATADWLLEAKRLRGNDEQFDENILSTNGPQWLAERAIQNNIDFDHLIVEMKLERYANGRYLTAAKGIYYIKQLNTIPLGQDHPLLNEVQKTAVFDSRYDSESLLGHQILRILIARSIGAHISEPWMNVILAIGGDPRVPSSNPRYIKWWKGLEPNLIQAVRGWLSKLDLKLFLEALEDYSYSSANYELQRMYPSRKSFLEGMFDAGIISNTRLYLSQDAARYLKRNYDPKHLPNFSTVKDGDKSIIYVQMNGAHMVEGSHSCYLWLYKHLDSSVCVFNYDIVRPTYSQLTSGINNQMTRLSSGAVAKITHSPIGYSWQRKALTALKGLGIKLTPKDVLSNEDYIDFKQRYGVREWS

SEQ ID NO: 4015 - protein, 1149 aa, Vibrio sp. AND4
MELTSLISKFFSGLDKTSQFELVCDDSLDFTTSKKTLEKIKAGKADEWITAQYVALKMLEEQGDVSSFPDGFIMPPETAVRLDSDLRILLGFPSVWQGAIDADIQGKASTPTFKIDLSVTTKQGRTTLNYTVDGPFIRFSQSEQYLLTPEQLMVFNAHKAHGKSAQSEYDNLLYLHSLQEAQKSGCKLNLKHFEKLRILTPNKITVEAELNSQGELILTPNMGQSASHEAIQKVLGQLQSDNAVTLKVGDEIVLFSEEKLMAVKEVLSNRVIPQKQVKAFLENPTAYIDASLVDLDLGFSIRVHGATVFKHAYFGETDESGIDWFGASFSSDVINPISKLADRVCDKTTLEDVTKKIEDAQQTGATVLDYEGKSYDISEPVAVEKVLKEIGHKISNPETDLSSEVEAEDTETESERSEIHVVDIDLNDEELSENSPKIEQLISDISWDGELNWENHKRTPFPHQDIGVRWILGVEQKSSSDSKISGALLADDMGLGKTFMALSAIEHIYQRQQISGETKKPVLIVAPLSLLENWKDEVDKTFKRSPFNDVVILQSAAELNDYRVGGVEIRSQSASDDSLEPKYSLKVGKHFGPGRLDLPERLVITTYQTLRDYQFSMCLIDWGIVVFDEAQNIKNPNALQTRAAKGLKADFKLVATGTPVENSLADFWCLMDTACPSHLGSYQEFRARYISPILKAAGDEVEETRARLGRELRIAVGALMLRRIKEDNLKGLPLKHMYAGGEFENWKYLEELKSTMVGYQRDVYEGTISNQLENEESHALTTLMRLRDSSLHPRLSDGGRLDIPKNAKSARVLYGESGKLASLLETLDRVRSKHEKCIIFAVNKRLQSFLSVTLGQIYNLGPLSVINGDAKAVAKRKSVPTRKSMIADFEAKEGFNLIVMSPVAAGVGLTVVGANHVVHLERHWNPAKEAQATDRVYRIGQEKEVHIYIPLLHHPEFESFDVNLHRLLTLKTLLKDAVVTPEDVVPQPAGVGGAVSGELIDKRITAAELDKLSWQQFEALCVELLAKITGSQSTWLTNNGADHGADGVLLSRSGNILVQAKFTQRQYDGYKGIQEIHSAKPIYESAMRSTFERLIFVTNSPSLAKRTHEIATTCGVEILGRAQLLNYLEDYEVTLKEVLTRLGKERLKA

SEQ ID NO: 4016 - protein, 486 aa, Shimia marina
MDFESVGVWVRDFILSAANMIVDEHWPGIISAGLFAAMMLFVIWISLISLSRRQALAAALRDAERASDSSGHGLDAEALRAALKRRKGAADRALSTGFSEYCETLTVVGRGDEARVHNSIRPSAFLNVDDLGFSLKSLRWVPGVFVSLGLLLTFLGLVAVLQQTQGLLNSDNAATVGALRELLGQASAKFTMSLSGLACSIIINFCLRYWSTKVEKGADSFAAVLEKNMAFISLEDLAGKQLRAIEDQTVQQAELNTHLVAKLSEPLNRVVEQSVQNVGTMVDQLGKDITSGIGGSLDSVSERMEAAANALSSIGDDLNLAGKQFDEALSSSTKSLISALSRLEEVSEKLTSASGMVGDLAPTVMETVKEGNAANLRVAEGATEMVHAAKTAISEEKQVVLEAMLSIKGLIEAFESRAAAYDGQLEKAFQTYQVEVSKTIDKLEDHGNGIQERFADALSTLQAVIENAKAFEPESQPKPSVEAIAE

SEQ ID NO: 4017 - protein, 358 aa, Shimia marina
MRHAFRQRLSEEEEESVFVSMTDMTVSFLFIVMILLAFFATQITPGETVPKHMLDEAESIIEQRDLQVRQLLAELESYRSGDPGIIPKLQAEKAQLEARVRALEEDIDAIHAELELADGDTAVARISLLRNELQRLHALLAASSDENLIERYNTVVSLQRAKILHVLRERIVAADPSIDVSISRNQDALQFRGDGLFASNSTTPSRQGRAKMRLIAGILQDVIACFALGEPSTLGSTCNEDIAVIDALQIEGHADSVGSDNHNMDLSARRGAAIYGEMIAANPQLLGFINLRAQPVLSVSGYGEGRPIADEALPGGRDANRRIDIRFIMFSPVDEASIPSGLDDLARIQKLLQGGEFE

SEQ ID NO: 4018 - protein, 436 aa, Shimia marina
MSLADRLVLKPDFSVRVKGGALDKAAERIAETFPGLEKRAPEGVPIILRKVEGAYRAGHWQGVTSGDVGIAVYEHLREKIELPQELRLFLDQEMKVTTNPTLIDAMCRGYFVSWSKRAAKTRALSNLLLEKASVLPTRWKRMFAKHPAFLDIEDGAEKMAARMVEASTPYQWLKSEGLPAPHEEGLMRETHLAFLRQTPMPQTEMAVDKLLGWVTPPNRPKLFDPWAAETVEKILSPWVSADCPQKLRDFNLERLVNRFGDPRTDRPAFWSMVGQPYRRILLKWLARKSMEAIFDIVTRAEGGSEQGHQWANRKRFWMGVYDKGRIEEAWVALGSKAVPHAKELYARTGDPSYMSFGHQGTRSDTCLLMMKIGSKTVVEGSHSFRVHVFPTPSRATPELYLSNYDLDDILLPVGHQDARRHDPPGHWMEWVQRRVL

SEQ ID NO: 4019 - protein, 1071 aa, Shimia marina
MHEFQFDIEENGLRVRISHQKTGLFARFRKREPVDLKTLAGAERTLAIALSRIRALDRDSDHHELSADYLWLDHWMVSRLDDMSASVLGIPQKLSGVVFHAEMRGSLGSESFALQWWWERDKRQIRLNRTGAIVESGGVFMRLPAQIYDAIILSEAFDSGRPLPEHWRALSEFRAALGGLEDDGLTRPERYLEKVEIVACDKVGLAVEPEEPLGFAPLPFVSQQIRQGEMASEVSAALQGDELSAFKEDSNRRGAQPAYRVGENRFLILDKSVVPVVDVISRHARGTDQEKRNFLENADRLVAEAIEQALIDEGRLNELMPSADLVDVVETEFEKAWAETREWTDRVIEIRKWTKPEIEILEGSGTSWLPDDIDAVVGEILGTIPEEDLDTVLKTLLAAQENGDLEVLLEQGVLPVTELVIQAVRRRLELYLNRTSQDQAEEGEVTAILPVTHDNFWELEFRERLHDRPSATEQELPSSLKTSLHAHQRNAFDWQVSAWEAGLPGILNADEQGLGKTVQTLSFLAWLNERMTKGELPTKPFLIVAPTSLLRNWEDETRKHLIPGIFDEPVRLYGRELKAWRVQGERGRDIQDGRAKLDLSSLIDCSEPRLVITTYQTLANYAVTFAQTPFAVAVFDEIQNLKNPSTLRSNAAKAVNADFRIGLTGTPVENATRDIWAIMDQLFPGALGALNDFRIAFDIPKKGNMQELHRAVFSSINGYPALGIRRTKEKAASDLPPKVRVLHPRIMPEIQALRYDEARKPGQSLFGLLHHIRRTSLHPGLLEGEAPETFIHASARIEAAMDVLRAIRVKGEKALVFVENRDVQAWFAELVKIEFGLPRVEIINGSTPVSHRKEITDHFQRHMQHDEGFDVLVLGPRAAGTGLTLTAANHVIHLTRWWNPAVEEQCNDRTHRIGQTRPVTVHIPLAIHPRLQRGSFDCLLQNLMKNKRSLADSVLWPPESDESEVRALYDAIVSAEEEDGLATDEGLVLSGRPDLETQELGENILRVCLKGGGASVVVALDGLNLKPEVLRPETDAAAIVLSDFNNFPEGTHVPMSVLGGSLLWPDFVLPD

SEQ ID NO: 4020 - protein, 844 aa, Paraburkholderia telluris
MYQTFVHAPVIAKLCALSILVLFGYFLFWFVPRAVIRGLALKRVIAGLARLKEGEDPGPLFAKNKDLAHLWSEYDETLFKQERFDSGERGYVFDKNRSTVPAEMFFNTQTTVDSYVGAEFFKHVPGILTGIGIIGTFFGILHGLDAFNVSADAAQVRDSLKGLLGSVSEAFAVSAGAILCAMIITLFEKLLLASLYKKSEALAIEIDKLYKAGAGEEMLQDLVQSSADYLSNSKTLKDALVNDLKAILESVASTQISEHKRIIDDQMTAQAASTRDLGLQIGQEISAGLQTALAEPMKAIGEAVKVVGGEREGAVHKLLSEVIKELNQSLRDLFGDQIAGINTMQQQTIAALQSAVDKIEHLSKTLTTAGTDATGKMGEQLAEAIKNMEASQTRMTTEMAQAVAEMKNLVANSQTATNEGMLAALERVSNNVEALVKQLTEKVETSQSATSEALTKALAEVTERVGGLVTSLTADVTTSQTTTNDALTNALADVADRVGSLVSSLTTDVKTSQTSTNEALTKALSDVTERVSGLVSSLTSDVTTSQSATNEQLQKSVSDVSATVANLVQGLTQSVTSTQEESSKQLTQSVATVGDSVKSLVDDLKQQAEGADVVHEKRQQQFAAEAQAAAAGIKSAVDVLTAEVSRLVSGTGFAVDKMRESVDTMRRVTGDTVTQMNQGASTLHAASTEFGKAGTAVTGSLQQATQLTDKLAAAAGNVGAASETMQRVVNDYSARSGEFQSMLLHLKTIVELAEGSLSHDVLAQIQESNKALTVAQLKVDEFMNGVTDVLQDSSDKFQTNLTDAMERAASKLVETTGRVTGLLNGLIENLAMALRPVVMDEERA

SEQ ID NO: 4021 - protein, 240 aa, Paraburkholderia telluris
MLSSRIVLKRGGKGEAEKPFWISYADLMTALMVLFLVTMSVTLLAVTKQVSEAERQKAERDREIAELLHRVQVAAKNAGISVDMDRNVIDFGDKAHFDKNSSGLKPEQQKLLRAFVPQVLAIARDPLGQKWLKQIVVEGFSSPEGDYLYNLNLSLQRSQRVLCVLLAKPPVGESAMSNDELEQVRDLFLVGGYSFNAAKASYEDSRRVELRLEFLGIGEHRPSTNGPPRGNFGTCALGAA

SEQ ID NO: 4022 - protein, 658 aa, Paraburkholderia telluris
MSYLDDLRKGLTRLQNQPLFLQTPMGELEEQLEKLTEKLVGRTAKAPEEAVVKAVERFQQEPRFRHSHDALLVSLGCDRPIGKMRYRLIEDRVRFPAVLSGVDRFRKHRPIFRDCYKGLLDTYLRYHPEMKGAAKTGRPNWELLRSWLDSGANTLRRPDGLEETWVSELVSHPELFSNAPVDAFARQMLRGDDSAFFEFQQALHIERTSWLMEQVVLAQVRAAAKAGITPYIPKLLPLLEQLATQNPVVFNQGLAEVLSAYCDHTGGPLHGALRDFSLHFWGNPLFLRKENSTGWVAVPREPRDMVKKWFKLHVIQQFFNVLAKQDQREQDDVRLKRERRRDFWEKYADVVGDVKFALGPNARNSDDTRMLEVVKLMEGMTLDLYGAGDGQNNAFIMRFGDWVVAEFGHENNACFVYPASDVPFEHGDTSISAQAIRHHIQASDQLGAESLPHRDRRRVGPVKLHHRDKGGRFWEDIFEDALSGRGITRPVAARASKNSATTWKPEVPAQAAKQTPARAAASSAASRPSTTPSIDRPPEAARPAPRQAQEQPVSSSAWRNPSLFRPASGGASTPPTKASTSGADTPSSGPIVSLPFGAKQEKELLTMCRKLDIYVRDMRERQGNLWIALDSPADNRLTPLLQSYGFKYRPGRGWWYQE

SEQ ID NO: 4023 - protein, 1256 aa, Paraburkholderia telluris
MLKWLKKMTGAEPSQRQIAAVWRAFGAEGLDLGTFESVGARPGATPLATPTVPALITQLYDEGYAVGADESAHLSWESLYNLLEEPAFARSLDQLELPPIGGLTPELQSRNSLIDRDFTIRVSGWRDEDRRPLEAVTRSGALVSTNGRQLLLSRQAWETVEQVARFQARPEDERTETAQRMRWGQIRRAALAANASLDQFLYKSIVVTPDTIDIIPRKTGAGTTRMVEIIPTFEGAPENWLDVFDSYQAVPKHYDISTPEGIVHVLVTPEVNTVLSSIRKMPGRLISGSRAEAFLLNPFATLGEDAKAAIDEEQFERAKVEAGIFFDHFTSIVRRDALGFPETVGLAIETALADRVSAEERLFSDDSELEHFVRGAERAIAAERQLYAWEGYDFELLGNSEEHLVLLKAALDERSKPRILVRHTDVYDLSAYTSRVNGIGLEQPYYSPYIAKKGDEWWPEHLVNVIVYTRDGSTDPVAVPITDDVKDELSAKLKEAETSGKPTIELPGFPQPIPVTEARDILDAFINFGNDVREGYDKPPKSVDSKDKAARQKAKQLLLKPNVDAVDYEDVRKEILTAFTPSPALPSGFRLETKLLPHQEKGVAWLQHLFQHAPNHCRGCVIADDMGLGKTLQLLTFMARAFEDNPELPPALIVAPVSLLENWAEEMDKFFKESTFRPLIAYGDNLASLRVPRSAIDEELRKENLVKFLQPGWVGDANIVLTTYETLRDLEFSFAAVKWSIMACDEAQKIKNPNSMVTRSAKKQNVMFAVACTGTPVENTLVDLWCLFDLVQAGLLGALNEFGRCYRKPIEAETEEEKVRVEELRGLIEPQILRRMKSDVAQLPPKRIMPVLIPMSNLQRTYYTSAINLFKGLKKGDKEAASSPFKNHLGVLQYLRSICTAPHAPGLGRFAPQPLAQARSEAPKLGWLLDTLREIEGKGEKAIVFAEFREAQQMLAYYIKETFGFEPRIINGDVTASAKHVASRQKQIRAFQEKPGFGVIILSPVAVGYGVNVQEANHVIHYTRNWNPAKEDQATDRAYRIGQKREVCVYLPIVRAEDFKTFEVRLDELLKEKRKLAGDMLNGTGTVMPTDWNIQDIVPDGAKDPAFTRALTLDDVLRMEWDFFEAYVAAVWQKKGFKTVYRTPARDGGVDVVAFTGNKGDLVQCKSSGVVNASLNDEGVKDVVSAEAEYRLRHPGVNFSKWVATNQFFNETAREKARRNNVTLATQKEVDAWLEQYPVTNADVQRFLHLYWEQAA

SEQ ID NO: 4024 - protein, 688 aa, Psychrobacter cryohalolentis K5
MDWLKVAQFSQGYYVFPAIIFIFIAYISLRFFLNYLSPAKELNNKISQLADELDKLNDNSNLDKDPLDVKFDGNPSLKQAWTSYKKTFHDTYETVDGEAKVAYSRATVPSEVFFTESIVVDIPLKVDFYKHLPGIITGVGIIVTFLGLLIGLLAFDPAGNPDKVQDSLALLLTGVAEAFMASGLAIAAAMVITWREKSWLRQCYAQLQRLNTAIDNAFTADESGEEYLAKLLKSSQANEVNARQLKDSLVNDLKTMMTNLVEENKRNQAAFASQLSDSYAQTSQSMATQIGDSIKDSLQDPLDKIASSVQQVSGDQGSAVQDLMTDVLTAFMSKLETTFGGQMTGMSEMMTQSVTAMREMQLGFSQLITDMQTNSEVSTKTLETQMAKMMEDIHLKQNEMSIQMNEMVENLSAGSAKIGDQGLYAVEQLNSKVSELVSGLGNSMSGLLSNVAEQRIEQDRQISDNQQKLHEQSSVLIDSLGSEIKELITHSKEAVQTHKENIQKLSQVTTDSITGMNSGAERMGLAAEQFTTAGSSLSTVTGKTSELIAQVNTTSTNMTSASSNLIELIRDYKNSKNSVNLAIETLETLIQQSKSEAGMTSQMLDDMQNMTTALSQVKKEMQEYLAEVSDVLVKSFDSFGTSVESSLNQSLVSFDNTLDQAVKRLATGVEGLGNVVEDLEDLTQRTRR

SEQ ID NO: 4025 - protein, 243 aa, Psychrobacter cryohalolentis K5
MIGNRYAKKTRSKDEGEKPFWISFADLMTALMTLFLVVMAVSLMVVTKKINEATQAEKERSSEILDICTGIKDDPTLKNQLITVDCKENRINFGEAGRFGHNDYRLNAEGIKALSALVPVVLEAANSENGKKWFKQIVIEGFTDTDGSYLYNLNLSLRRSEWVMCSLLDPTFNQELTLTDAQKNQIKQLFLAGGVSFNSAKDSKEASRRVELRMQFYGLKEKDSAEAQPIFVSAPIETCQLAR

SEQ ID NO: 4026 - protein, 473 aa, Psychrobacter cryohalolentis K5
MSIAILKQRLNQSVNNFSDPAQIHNKFAKPTKLIKTLAIIERKFDEMESIQPIEEKIVNSILKLEKHGTDYLTKRDWKNLSWSLSKKLLSYEDKILFTFKGSEFIEQFSKIDPELLKVVYFPLLYSYFAVEQAEINKRPNNWIQLRNILNTNRSTLFQATLKPKKWLTTLTEHPEVLSLDPSKRFIRDFLYNSDDSRVSSQLESLSIAPNSWFWDSLISSSIKSVKTMKEDDYFKVIPRLLLLLEKNPIYTTAILTALLERYASTSKRTLVHEALKHVCLTQWGNPQYDSAAGWRNVNPDTRKMVVQWFVRADLEAFFKLFSHTADVDRFNYWIKFIDKISFSQIFLGPAAVQSRHAEHRKFRELNRGRLKNLVGSTASNNAFLLKIDNIYIVDFSDTGNACYGYSTFPFDINKKNIGVYELKNKPQSIFKSEYGLGMSLSHSGNWEARFDKKLAELGIFSNQSNSPKYKKRY

SEQ ID NO: 4027 - protein, 1075 aa, Psychrobacter cryohalolentis K5
MKLAFWKRNKSVEHASAENSVESIALLPLQYDDMGLKHGYTAVAKTDADFYWESLTDEEVAYQLDDSYILPWEELFQIKQDPDHSDVINLLNLPLSNDLYPIIRSENGLSDSNFQIILDGWCDKNKVKFKGSVKRTGAIISITGKECLLNESTWKLLEKIKEFSRVTDKNKSLNQKYWAQIRSLANKSEANLDEFLRKTIVLAPEELQLNLRKNLVSTESVVEVQPDFKDSPSNWLQTFDKYNQVQDEYTISLPEGGLAHVIIEPQVKSVLNEIKKMPNRRIAGERAQTFLHNPFAQLGEDAIEVISPEGFEQSKEEAEIYSYRLLIDKNYDELSHFSSAQLTLHEISSRAQDPILLELSNLEQAQHFIATYERSSPVFLWAGYSIDRSNYLDNQVDELKSDLEKIQQYDDELQARTVLDLSNYSDRVIGIGEAEKLSSDAIQKDSGESEWLPQNLIDGSADLSQFTSDNTDATTELLEQRIQHAEEEGESFVLHPDSNVSIPLDDAKKLLDDLRDSKTGDPVENDIEQEQPKADETKKKSTLLIANNIDEADFTKKRAETLTFDESNRPQARLPSSFRSQEFSLKTHQEYGIAWLQNLYQYAPNQVSGCLLADDMGLGKTLQLLCFIGEYLETAEDKKPALVVAPVSLLENWEAEINRFFSAKFGKVLSLYGDNLKQRKIPKHLISSQLRNDYGITNLLEDNWLGGADIVLTTYETMRDLEFSLGRVDWSIMICDEAQKIKVPTAMVTKAAKAQKADFKIACTGTPVENSLVDLWCLFDFIQENLMGSLSEFNKEYRRPIEKKDDEDNAIIDELRQLIEPQVLRRMKHDVAELPAKHEINDCKNIEISTLQRTLYKQVSNDYRSLSEQGHKGVMLKALHDMRMICAHPLNFQEQATINDSPKAEWLINTLETIKQKNEKVIIFTEFRAIQVFLKRLLLERFGLNVTTVNGDSNTNSRVGLTRQGIIDKFQETNGFNVIILSTVAVGFGVNIQKANHVIHYTRSWNPAKEDQATDRAYRIGQDKEVYVYYPSIAADDFETFEIKLDKLLSSKRSLADDMLKPNVELTQELIQSIY

SEQ ID NO: 4028 - protein, 549 aa, Sphingobium japonicum BiD32
MEVGHPEALPLRRTWEEFRETIVDPSADVLQNSARPEHFFVNLGDSHRGLNWFANIFIAIGLLITFLGIIAALSTLDFSGGVDAMQERLNELMKVAGAKFWASVGGIVASIVLRSYDYRFGKRINDGLSMLCDKLEHGMAYLPPQRIASDQLEQLKEQTPALRTFSEQLAAALDGALEKQMAPMITHLGSIQQGIDKISGGGGEAVRDAIASSAGAEMAGLADAIGAMTVSMATMSERLEKQTGEADRQIEEAVRRFGQASEEMRTAFGDLNRNFGVIADRMREENEQASALARQRMDELLSSLGTTLDDMKVGLATAASQLGEASSNAANNAARIGQEAMEKSFSEFVERFNGAGTPLVASMKDAGSAISVSADRLSSAQTAIGDHARAIEQVAARSGDLATAFGTVANDVEAAAAPVRQSALSIAEAVKSVEAVVAKNAQSSESARDEMRELAASLNQTATAASSAWSEYRARFEEVDRSLGAALEKITDAAGSHATNLNERVGQIDRTLGEGVAQLAGALEPLTTLRDTVEELAGILANQNREAAE

SEQ ID NO: 4029 - protein, 468 aa, Sphingobium japonicum BiD32
MSVLRAAIDRMDALASAGLAKPPTTQPELQRQLAKLDASIGEAEPVVELKPFLRSAAENGAEALPRFQLNRVLRGAWCDPEFDELGYTALDRAVEEQRRSSDQAMIDGYLTYFPVDRPIMGKLAEAASSAALRHEWAWRERAQHWELFAPSQGPTRVAQDLLARDDDQVFQLMREVGLGANLAASGFGQATFARFCVATAELPPSKAVPAQRSLLRLFDREALAGQIELVVRALLEPWVKEKPEPEHRKAISEFLLDQVGDPRLQRPRWDRIVRSLAESIGEERAITVTQVFKRWLTEVAMREFFRAIAKTTDRPDQWAQREKFWMAYLDDGLVSDAWPALGVRARNQIEYLIRQSGERPEYGIIRGGPASSSSIIMQIGDLRISEWSDNGSCRFWSDSDPNAPKLYAKIYDGGKLRTTAGRTDFEYESHVPASPGWEGKFAGIINRRTSILHPRFGKGRGRNWNDRW

SEQ ID NO: 4030 - protein, 1251 aa, Sphingobium japonicum BiD32
MVSTKFVATQQSDGSEAITLLRERPGGLFKRASSETVPYSEWPKVAPEAGQAALALARSFDQEGQIVEEDGGVVLPPHIAAQLDEADAFALGLPPATPLTLQLNSSGSLAEGSITVNPKWMRRGGAPVRADILGVRVREGGRVSRIPEPVFSVFLAAQAVKAASDADERRAAFAELRELLGDKLGAGIEADGFLERIRIAYAANFSLNAKTDHGRFDFDPVLFSRHVGETTEGDLVDENEASLLTPQDTLHFQRRFRSQEGGRRSYLLSDGTLLFLDPLLGKALDIVRTKQAGSSQEKREFLRSPQRVLREELKLDATGDDEAADRLFIETQQFSERVSGIEVWQKPVLPWIKPKSNSWLPESFGLRIGDPPDARHIALAPGDAEILAGDLETAIKAGDETVAWRDESIPATPATLQATRGIADLERQIAAETGDQSRSEDEREPVDIFFLQVGENFEQLDYARLPRPKSAPEAFQVPALPQGLKSEPKPHQREAFAWLTEAWERRLPGVLLADDMGLGKTFQALMFLLWLRSNSAHPKPVLIVAPTGLLKNWQAELAQHVEAGLIGPVIEAFGTNLRSYRLEAGSDIRGGTSRLDAGEWEDAGIVLTTYETMRDYHMSFARIPFDAIVYDEIQKLKNPASQMTRAAKALNGRLQIAMTGTPVENRLQDLWSIADTVYPGFLGSSREFESSYPANDLAGLEDLQQRLVERDDEFPPFMLRRMKDEILTGLPEKTARKYAVEMPPAQAQAYDLVLARARALRESGEQGAMLKVLHMLRGTSLHPLAPRGVTDIDAYVSQSARLKKTFEILEDVKQRGEKALLFCEDLEMQAFLAMAIQERFDLKHRPMCISGKVAGHKRQEMVNAFQSSASAFDVLILSPKAGGVGLTITAANNVIHLSRWWNPAVEDQATDRAYRIGQTRPVTIHIPMAIHPDEAIGPSSFDQRLDALMERKRSLSRGLLMPPESERDVEDLLADVLDGKRAERQDQSAITPETEPQTAREQASYSIERLAATEPQVSDETPKFAASESLPPAPEEAATPGPTEDRSAPSEDTADEVVSAPLDGPLVRRPILSVRTPVEAAEARASHVQRVVFEQYGQRDWTIFEQHVRDAKIALLEIQDPYCCADGQARGRLISFISRFGQLASQIAAVHVVTFDADSVQTREPESTNDQRKDLEDRWNRMLASVQLHLAQKSRRSVGDLHDRFVKARLANGDSVIWDLGRGIDGVMSARWSCVVNAFYDRASPSSSLMH

SEQ ID NO: 4031 - protein, 454 aa, Psychromonas ingrahamii 37
MLETTINIFSDAINNRLTLCIVALIILLFIGTLFLEYKYYKKSSLDLSNVVSDFELVADKINNNESLTEKESGIKAQYFSTLKAEDTRTLLSNYPEKLLIKPASSGYSFMASVLTTIGVIGTFLGIVIGLSGIQEKLNASSTEMFEGVKTLLGGMDTAFVTSLAGLLFSILLAWGSRHYNKKNVGHFFGIRDDFNKLFRAESIADFLQKMSGGAQDKVVEKQLQAAEKSAQASEALLQMGSSLEKAADNFDADKIGQHLSTSLDKIFTTEMVPVFTEISSELKSLREIKEDNSEKIIQAIMTELRAEVIEPLSNQISETSSLVKDSTSAVTKLHDELGGIATKLAMAVATIQTFQKETLEELKEFSSDLRVILGGFQNDTKVILEGVAEQLEGAVKSSVDVMNKQKVAFKESADQAATTFSGIREELEQSLDTQGKVQKEMLDQTAERVHTIML

SEQ ID NO: 4032 - protein, 220 aa, Psychromonas ingrahamii 37
MNLKQPFVIYRENENNTEGTDWLLISDLMSGLLMIFALLVVVTLFQLKITQEQIQNKRVIVIQALQEQFNANGISAEINPETGDITLLDSVLFDFNKKQLKQEGKDFLIKFIPVYSGVIFSEDGISDEINRVIIEGHTSSDGSLGYNMQLSLGRANSVFQYIHSMPHESNKEAFLQKIQVAGRGPMDANSHHSELEDRKVIFRMQFKSEDAFSKVLKLKK

SEQ ID NO: 4033 - protein, 541 aa, Psychromonas ingrahamii 37
MGELFKINQPKRIKPVAMMEAAFSIDNCSNESIFENLVLPQVPPRDVKQLIQLVMSSQSEKISLLEWFSIFDNENYFKQLSGEALINTQKALWKCILEIPKVTNIALWRMCLYFDKQYHMMPLLIMDAFQKHDRQIRLLDKQRGLVLKALSEQKASKIAYFSLQIGNKPEDFLACLGLPNQISLVVKAQEELENVLVEVWKPELCDNYVKIIKQYSYLQADTAVTKLLSLNKEKALNESPVLLDHLKEKYGPSSASSRWGMLSLQAQHQLRAVIGAGWFAEFKLFIFQLTSQELAKALSLSPKDINQLQKRVTFWSNYQSRFHSFRVFLPLKTATIIKNSSLSLPEHTLIESGWDLKETELCFLEFDNHIVVEYLRGNASGLKLYDKSEISISKLLTNEKLKVSKLAEIEFKKEHDHLFCWQNSCENMLRTEFEILPDDEITSFLIGGKSDVRQNYDHVTGLPRLSREDRSERQRCLGRSKGKRHENKAREFSTEVQLNSKGLDNNWIELEYSEGKNTIRAGAKFPNKKKPILSLRKTKAW

SEQ ID NO: 4034 - protein, 727 aa, Acidovorax sp. KKS102
MTPETSALISSALHWGVGALLAIAVAFFFIQFLLPGWRVGRELRDARQQLERLKATGPVLDLDRVRDEAMVSEALRHCWDEYRDTLHGQKQANGMGVMEVSRWRATSMANAFFTDQGLIEAPLRTEFYKHLPGILTGLGIIGTFSGLIVGLQAFGQVDLGAADAARDGLRALLETVGSAFKVSGVAIFLAMLITTFEKQVINRRYTEREELASLIDSLFDTGAGEEYLQRLVEASETSATQAMQMKESLVTDLKQVLSELTQQQIATMTATSQQLGQSITTSLTEGLADPLTRISHAVQQVGNSQGEAVNKLLTDVLGNFTEQMQSMFGSQMRGMSDMLVQTANTIQAASQQFEQLAGQIQQAGSGAADAMAQRMDQALQQMQARQTEANDQMRLFIDQLKDSVAKGQSESAELTMGMMRELSDSTSALVQGLRYQAHTAQQEHSSQQAATTERLHSFLEQMQAAASRNQSESAEATQRLIGQLSESASGMVRSLQEQAQKAKEEHTSRQSELTAKSGALMEEQSAQIARLTEAVQRASASMQQTVEQLQTRAQASIDSMGQGAEKLYGASARLGDNLDRMKTNSDGLNDMADKLIGSATTLGTALTATQQVLGDQRSVRDALASLVSDLRETIELAKREASMSSGLVDNLQAASLRLTEAQRTTETYLQGVTDVLGEAHGAFAQQMMTTMREGNKAFHEELAHATGLLKGAIQDLGDVLDNLPSAA

SEQ ID NO: 4035 - protein, 255 aa, Acidovorax sp. KKS102
MLGGVRMSAPKRGREEGEKPFWISFSDLMSALMVLFLVAMSVALLAVTKKVSQDEQEDRERKEAIAHLMQQVSKVVSQKEFEGVRVIGNTIDFGPRGRFEREGQNTLSVPQRALVRQFTPKLLSELRDSDAGKHWFKRAVVEGYASQTGKYLFNLNLSLERSERVICELLRAPEPGEAAMSDEDRKLIATKFFVGGASFNSLRATADDSRRIEFKLEFKTRQERREELENPASLVDEAALAQALDPNERCPIFSR

SEQ ID NO: 4036 - protein, 646 aa, Acidovorax sp. KKS102
MPHIQPLNALDHLRDRLRSELDVHRAVHAIEWGNPRVMTEALKRIRHDLGGEGNDQPAADQLQAALLRFARSRQVASFTELKYVCYGSTVPVGHDRWRVIDRRPLFEAMLELVNQHNQQPKQFRRCYQGLLSGYFGFERNLEKPGEADERWIGLRNYLADQLAPLQSASSKRGTMPEWLNTLSEHRNLLTSDPCSRYADALARDDHTELRKVCTGLGIASNSWVWEEALMAYVKRVCQCDDAELKKRMQSVLDLVHGKTSLTLPPILAVRAVALVVARYAQCADHPEHPALRDTCLEWIGNPWLKRTAWDAAVNHEPARLMVNSWLKQRLIKDFFGLLAADGAADLRRLEYWLKWEPQISDMWFVLGSDAQANRTPEFLDLRKRMSGRDRKLVDGNHQNNAFVMRIGQLLVIEFGVTGNACYVFAASDFQTSLDTAVLNLYQLKQKAYAKRLSHTAQWEFKFDYELKKLLQSVPMSKGELKELKEFNPASNTTNAVVHWRAQSTQVTAPRPVAPVTSHQPNSLLPPAIKADEYTGFDSKPAWPSVPPRALQASMSANGAQNTDTVRQKPSVAQLSGQKKRLTDVEFSQLQGLFMKHGVEWEDNRHKGGALWALIPEKNQNPSVAMVLELFRFRFTEGKGYWLKDED

SEQ ID NO: 4037 - protein, 1093 aa, Acidovorax sp. KKS102
MFDALFAKKPAPPQARKGPAVAFDSVGIRYASPAPTTREWLALPFSYTEAADLGARLAQIFMEGFGDRQETEFLLPWKDVYALLRHPELSAYREALLIPPEAAARPRLTSKGALMDPDFAVLLDEWVDCQGRRLQPVPQLVGRVLQAPSGATLLSEPLHQLLEELARFHGTPPSERSQSFKEQAFGRMRKLATSTGCPVSDYVARTIVLTPDRLRLAMERRGEDDGKVVEVIPGFDEAPAHWLNQFDRLPLQDSYDVPDGPSLVRVVVTPEVKAVLAEIKRMPGRRATGPRAEAFVRNPFAVLGESAEQVIDPEQFEKAREEAGIRFEQFTPHVERGEFGEVHRVGLLVEELGNESQASEVLWFANPDDLQRFTSKLGRAFTDGSQCVTWQRRELEIVGDTERHMVDLEQWGREWACPQLWTAAEVLDLSHYSDRVEEIGVEKPFVTPVIARNDHGSGWFEGNVSVGVRVENPSGGSATYVPLTFDDVPTLQQAVKSAEQAGQSSVNLPGLRTAVPIVDARRAVDALAKAQQQLRDHNFQPSGDRPAAEPKKRLVIKRNLEDVDYTEARAESLQMPPGREPLLPQTLRPEIELKPHQRVGVAWLQHLWEASPEHCRGTVLADDMGLGKTLQLLTFITSCFETDPTLPPALVVAPVALLENWRNELDRFFQPGTLPLLMLYGSTLKSMRVGKHELDADLKAQGVTRLLKKGWVGDARLVLTTYETMRDLEFALASQQWSVMICDEAQKIKTPAALVTRSAKKQKVRFRIACTGTPVENTLADLWCLFDFVQPGMLGALSHFSRTYRQPIEAKTPEQIAKVEELRALIQPQILHRRKTEVATELPKPVEDKLCKQLPMSPFQQGLYEGALKTLKEQRVSNPSAQLQALQAIRKICSDPHGYAAKDSHKAPIDKIVNESPKMGWLVDRLKALAADRAGNHKVIIFCEFRELQLQLQRVIAAFFGIAASIVNGDTSADPRTADNRQQLIDAFQQAQGFNVIILSPLAVGFGVNIQAANHVVHFTRTWNPAKEDQATARAYRIGQTRVVNVYYPGVVSDKFPSFDVKLDALLGSKRALATDILNGCSDLKASDFADFG

SEQ ID NO: 4038 - protein, 730 aa, Pseudomonas extremaustralis 14-3 substr. 14-3b
MDFSTLLHLWGAASSEQLIAPKMVVGFVFVLCAWYFVRYFFRSFRLSRQLKRLTKSLQSVKVLAPPLRRSELERLFNGSKLEHSWHEYAETLHDQFEFQEGEQILVRSRATAGAAHFFSPQSVVDTPLGTEFYKHLPGILTGIGIVGTFFGLMLGLQHFDPSTPEQVNASVDKLLKDVLFAFIGSFISIMASIAVTITEKWRLGQCYRLLEAFNETIDGLFDSGVGEEYLAELVRSSAESSVQTRQLKDSLVTDLREMLQNLVDTQVRESLKLADTLSTTYRDSGQLLADQVSSAIENSLKSPLEAIAGAVQAASGDQSGQVQNLLQDVLVAFMNKLEGTFGQQFNGLHELMGQSVAAMQSMQQGFSTLIQDMRSASESSTQNSSTMIAQLLSDMQAGQNAMQAGMNEMLVNLQASVARIGNEGEGAGARMAEQLEKLFAQSEARQQAMAENLQAFVESIKQNIGQGQQETMAKIAGSVEVLGEQLSAVFKQLENGQQQMDQATRAAQADLHQGTRDLVGGLDEQVKALLQTVSEQQKSAQDTVKALSAQTEQHLQSMQLGADKMRAAAERFEMAGQSVARASESTSGLMGTVQGAGTELAQASRELNTVVADYRNNREALAKTLAVIEGVVASAQGEASGRSQYLQDLRVQSERMQALNREVYEYLENISGVLGNGFKEFGDGMDRTLRQTLGSLDAELDKAVKSLAGGVEGVKESLEDFGDIMERIRQ

SEQ ID NO: 4039 - protein, 247 aa, Pseudomonas extremaustralis 14-3 substr. 14-3b
MFGKQMPSAARSKDEGEKPFWISFADLMTAMMILFLVVMVAALSSVTQRINQAEQGEKQRNKDISQICEHLSLKAKTASKTILVDCKDNRISFGDAGRFGHNQYALSNDGQSALQEVVPMILEAANSEVGRKWFKQVVIEGSTDTDGSYLYNLHLSLQRSEWVMCSLLDSRSPLQVGLSSEHQQQIRSMFLAGGVSFNNAKDTKEESRRVELRMQFFGLKEKEENLKPDVPVFNNTDMEKCQLAMNR

SEQ ID NO: 4040 - protein, 542 aa, Pseudomonas extremaustralis 14-3 substr. 14-3b
MTSPIARLSAAINLSLSTHRTGPAPEPLARFPRLGAAGIDLYERFERAEKALPPPQEKRRAAISKFRNVLTLNASEWRLVFAGLSDKSERIGPILDDDQLFDRVHKEIHHRIEKRKLSRRDWLALCFSYFGYEAATPDQNANWCVLRADVQLGFECVRGQQKREKEWINIVQQHQELFSEQAGARLGDQMFKGEISDLSALQTIAQIPDSSWLWRRIFNVLISRIFMLDDAEFSQRLADLVDIGRQHPRYMNDILSACLSRYHGAAYREKPSSLLKQVTLDNWGSPQIRSRQNSWLQYVEKDVCAMVVAWFAKEDLEHFFNLLKGDAEVDQSRLYYWLRFANQMSYTRIVMGVDAWHDRGQDFVHFREKNKGRLSKLVGGPGHNNAVVMQIGDYFFVEFSGTGNACFVYKADDSPFNPDKTQLELTKELKQRHRTIEWMTHSPAPGRPDRIEGWLSKFDDKLGKLGIRVQSKAAASGATKPIAFEDQVRDALKSVKHKVYDQRARGGALQVQLDDNDQAAVAALQRLGFKPVNQQPLRFWSH

SEQ ID NO: 4041 - protein, 1082 aa, Pseudomonas extremaustralis 14-3 substr. 14-3b
MFKRLLKGIGRQTNAAAENTEPVFSIEEQGICYPLSLAETTDSWPLASYLDQLEEEEFVSQLSDRWLLTWDELYRLLVEPEHLTSLPLLGLPPKTALIPQLSSQGSLASDDFKVSVSGWRDPQSNANVQVQRTGAILQYHGKTEILPESCWKLAGAVRQLYLAQQNEPGEVTNQIGWASIRKLARKAGAGMDGFLDKTVVIKPESLRLNPRKSTVGNTPVIELQPSFEGQPANWLESFDGANQVQDRYRVTSDDGSLTHVLIEPEVKSVLDYVRSLPGRRVAGDDALSFVRNPYSALGESAAQVLDAETYEDELAEAGIFFHRFHLEPKLDEAGQNIEQVNLTLEPISPTPQAPIEVEFKAAYDLAPFVHELQLKLAAGMPAGFWQGYELELSDFDSRQMAGISDLLKRWQNEAAGIEFDSVLDLSLYGDRVTGIGDAEKITSPFLVKEATENWLPKDVAALGIDAEILGRWDPSDRAQFEAFEQRLDEARAAGDETVCLPESETPLTIAAAEQLFDAWSKKIAPVETGLVQQQEKIGRAVLQIGHNIDEPTYVQIRQAALRAALDATPELPNLLKPEVVLREHQLQGVAWLQHLFRLSPSDVSGCLLADDMGLGKTIQLLTFLVWYLEQYPEDKPTLIVAPVSLLDNWERELHRFFFADALPVLKLYGSALSAVKFKKEEIPADLKAKGIKNLLRPGWMGGARIVLTTYETLRDQEFSLARQQWSIVVCDEAQKLKNPAALVTQAIKAIPARFRVACTGTPVENTLIDLWCLFDFIQPGFLGGLNQFGREYQRPIEAALERDTVALERLRGLIDPQTLRRTKQDIAKDLPAKIEDTACRSLGMHALQRNLYLSEISAYSQKQQIEEQLDQKTSGMLGLLHKLKLICAHPYSVQPDTRLRDNSPKLQWLMQTLESIKKAGNGDKVIVFTELRDIQRELQHSIQEHFGFRATVINGDTSTSSQSANSRQKLIDQFQEQPSFAVIILSTIAVGFGVNVQAANHVIHFTRCWNPAKEDQATDRAYRIGQEKDVYVYYPTVRDAAMPTFEATLDELLSKRRALARDMLSGASEIQASDFEALLKAR

SEQ ID NO: 4042 - protein, 648 aa, Gallionella capsiferriformans ES-2
MTFTALPQHIYIFAAILGVLLISFVFFSMLPAFIVSRRLSGVIKKLRELDGKPDGSLEKIFQKTGVLEHLWHEYSDSLHQQLDEKQPQAIRFRSTLPASVVFRPDIVVDIPLRSDFFKHLPGLFTGVGIIGTFYGLLIGMQSFVVSENPVVVRASLTRLLHGVSEAFLVSASAITLAMMVTFVEKLVVSSLNAKVEKLIQLLDGLFEGGAGEEYLARLVRASEASAAQSAGLLKGDLKEMLTELSEKQIAANNAGVAALGERISHSIEVGLKGPLSEIALALKATREDEGPSLQTMLSGMFDNFNLQMKTLFSAQANDMNSLQKQTLEALGATVARLEVMAAETGAAGQRSMEAIAEQLGRSNAAAESRQALMNEKLAEFIGQMREATSQTQSESQGQLQQSLNELSVRMGALIDGLGTQVRSATDVSRQNQLEMEQQGKQMVSQFGGQIEAVVEGVAEAVAEMKSAVTAMQATTKDAMTALGSSADTLYLASQDFARAGQLVNATMEKSASVANQLLQAAGTVSGAASGLGDLFTDYKTSRDAMIAQMNALQLLAEQVRRDAAMSGEVFEKIELATGKLVAAQMDADQYLSRISDVIGVAHQSFSDGMTRAVGEANREFHQALSDSVKLLREGIHELESTLDAATNV

SEQ ID NO: 4043 - protein, 238 aa, Gallionella capsiferriformans ES-2
MINKYLLLGRRNKEEGEKPFWISFADLMTALMVMFLLVMSVALLAVTDQVSSADRNKIQREQEIDQLLGKIAKAAEKYPGIFVDKNRAVIDFGDRARFDTGSSTLSAEQAQYLSLFVSEMLVVAKDELGRKWLKRIIAEGYADQRGDYLLNLNLSLQRSQRVLCALLSPPVNQTFILTAEEKERVRDYFLVGGYSFNSAKKSLEESRRIELRLEFFGQDEEHPAMNDITRGNFGSCRI

SEQ ID NO: 4044 - protein, 527 aa, Gallionella capsiferriformans ES-2
MDALEKLQGKLLAINTTSLSRLRPGDSLQMQHELSMMKDWVKGASRREEVPLATIEAALLFYQKNSYLKGLRQARLICYGCTQRLNSYCLIEERDAFNKLLTYVDGYKSRRRTFRKLYRGLLSSYFSYDPDSADMRGGVSRDALSLFLSDHLATFVIGDFTPDWLAALAKYPDLLGENPGQAVESSLLQGDYSMLEEIRERLGVDGGSWLVRRLVMSPFVAIGRMPDAEFKDHLASLLLLLNDYPLYASAALPLLLERYVQCKDRPMHAQMRDYAVGLWGNPWRAQQQWLCSDKARVMLAHWLKRQLLSEFFSLLSNDDKALSRRFNFWDLYSEDLTGMYFALGKDAYVQGNMRLYKFRHLAKGLIAKLTEEKHGVHTCIMQFSHHHVVEFNREKNIAYFYDVRQGTPSFYFAKGWVDIGAISVTAIEKGADIARTSKPLRHEDTKLSTWEACFAAELGETENALRAFCIKYQCEYEDRRGTEGSQCIRPADCERYGIEVWSVLKGWGYDFSAEQKMWYRLTYPKLG

SEQ ID NO: 4045 - protein, 692 aa, Pseudoalteromonas sp. BSi20480
MANEKQIELTWLIPDFSQFTLNPQTGTELSTLFVALLISVTVVFALFFVYKCLVTGAKLNWLSKMLKPLERDDVASKRDSLYQQAKQKDKGIGFLWMEFDETLVEIQNGEQVELRNTLDAGHFFNSYTLARSVTENRLIAAVPGFLTALGVIGTFMGLQLGLADLKLGAGVDVNEMQEGVAGVVNGAKIAFLTSVWGVALSVIFNFFEKFCEQLIRRKIRVIEDRVDWLFPRIRPEEQLQKISENSSESREVLQGLAEQIGEKMQEAMLTATQGIQSSLENSLSEIMAPAINKLVDETSEGNQKALEGLLESFMDGFGQAGNQQRQALDDVSSKVSQSVDAMQTTMNSFVEQLQKTQADSGEREKALIADISNQVSSLSSQSEAIHHKLSSFVENQIGEMSTQMKSREEASARRDEELVTTIKSQVNELVENSRKQGETLSNFVESQLSGLTKSFDEREQRSSQLETERNAKIEQQTQAISTLSNEILQSVEKSVGDQVATVKQLIAQGQTLQNSINSSVDASAQATQAMRESSTELRVSADNMRVLSSHVNDAGNKLSGAIKEAVESTADLANQNQMSAQRMENLREELMKDVSRFSELTTQLNSLIESAGSTFSELKATQKEFIGDLRGEVEQLSSNMTQMLEDYATQANGQTAEHLRIWSQSVTDYSTQMNNAIKALSSVVDEMQVKLG

SEQ ID NO: 4046 - protein, 243 aa, Pseudoalteromonas sp. BSi20480
MDRLFNCRGSKVDEENPYWMSFSDLMSGLLVIFILAAVALIIELTQKSEKIDASIVELKKAEEARRNILIDIQEELAEQNIHVEIVENDTVLRIPESTLSFESAKDTLPEDEQTQEEVRAIGIALHKAITTNERWKYLDTVFVEGHTDSVGIWYRGKGNWGLSADRAVSIWKLWQTEILVEPKLNELQNFNGQLLFSVSGYADTRRVDLTEETEEQRARNRRIDIRFTVKKPKLEDYEKAKDV

SEQ ID NO: 4047 - protein, 476 aa, Pseudoalteromonas sp. BSi20480
MKFFLSDEYYRKNMKVLKGLTAEQRAIAKKAGTDNPKFEAAWSKLFNLLSRNRFDLFRIDNRFDVRALSIALTANQKIRSAINIDRELLSDILVVIPNGSNLFIESLFQHFLSDFDAISEPDDIGDWLCTERKRKGLAKGMEEQVLCADGPTFLAKQAIKRESTFEQHVKHWGLDQYASGDFVKRAQSVYFVEQLQNIPVNQPHELLEEISRETVANSRYDSEDLIGHVALRILIDRAPTQNVHESWQNAVIAIAGDPRVPKNHPRYIKWWSQLNPQQSKKVQSWLSKLDLKLFLEALEDYSKSTRDDDMMRMFPSRKHFLEGMHEAGTIVHTKLYLSKKADKYIRDNYRPEHVPDYSIVEDGDRSIIYAELTRGHMIEGSHNCQIWFYKNLHETAPVLQFGKQRLRYDDLTGRMSRQMYARGCSVFDHFAHVSSDTFKWQQKSVDALKKMGVQIKASDVLSEEDYKKYKRMYGVG

SEQ ID NO: 4048 - protein, 1151 aa, Pseudoalteromonas sp. BSi20480
MKNWISSLFSVKESSAKFDFEISNESVDFYCPEYQFNKIKSGGADEYLTAQFVALQMLTEEGNAEVIPNGFIVPHHVISALDEDVFQLLNLPTRWNGKAAVDIKGTTSGESFKVIVNVESPSGRMTAAYKQNGSILSFGDTQFTLTKAMFEVFTALTEHSKSAKSESDNLLLLHSLQQAQQAGAKLSLSHFDKLEIHVPDKIAVEAELDPQGNLILTPSMGQKTDHDKLQRVLGQLQAKNGRTLKVGNEIILFNEKTAKAAKEIIGHRAIPRSQVQQFLKAPGAFLDASLVDLDVGFALRVKGATRFKHAYFGETDESGIDWFGQNHAAGKILPISAVTKEVKTQEDLFQLQQVINDAKATGATEIVFEGKNYDIGSEADITQTLSKLQDKINNQPEDDGEKEPNSPDAPNDDENVDIDDGPIVIDIALNDDELDSPSKLVEEALNDVLYSEELDWSNHKRTPFPHQLVGVKWILGLEEMARQKELVNGALLADDMGLGKTFMSLSGIDHYYRLCEEAGETCRPTLIVAPLSLLENWKDEVIETFNESPFRDIVILQSDGDLNSFRDGSAETKASNIDEESFEPRYSLKFGEKYGPDRLDLPRRLVITTYQTLRDYQFSLSQIDWGLAVFDEAQNIKNPNALQTRAAKGLKAKFKLLATGTPVENSLADFWCLMDTACPGYLDSYQTFRQTYITPILQAAGDEVDRVRATLGRQLREKVGALMLRRVKEDNLEGLPQKHMLVGIESSDWQYELKLHAIMTAYQQKVYDGSIEAQLEDENSHVLTTLMRLRDSSLHPRLADGGRLDAPTSRREIKTLFDESAKMAKTIEVLNDIKSRNEKCIIFAVNKRLQRFLSIALGSYFGLGPLHVINGDAKAVVKKAGALSRKSMITDFEAKEGFNIIIMSPVAAGVGLTVVGANNVIHFERHWNPAKEAQATDRVFRIGQKKDVNIYVPILHHPSFESFDVNLHSLLSQKSMLKDAVVTPGEVMPNPTGSDKHSLGADSIITFEDMQRLSWKQFEALTLELLSREYQADSAWLTKDGSDFGADGVLTFASEAILIQAKHKQGAYKGHNAVQEISNANAIYGQHLGREITKQVFITNATQLAKSTREIAGKLNVTIIDGNELGELCERHLITFGKVLTRLSKERYVIQ

SEQ ID NO: 4049 - protein, 660 aa, Sphingobium sp. MI1205
MDEMVLFGIPVIPVLVFAVLVSLAYAFVRYFFIPAKRLDASLKQIIENVEAARANGLRDLSKCFEPDRAIAAIFNEYRETLHVQKDLDTQTGEMVERAVRSTVPAEMFLSPHAVVDNRVHAEFFKHLPGIFTGIGIIGTFTGLLTGLSSFQISDDSGVVRNSLTALLHGVSEAFVVSAFAIILAMLTTGLEKFRLNSLYRKVTQLAHEIDATYEAGAGEEYLARLVTSSEDAASQTKILKDALVADLREILTDLADRQINATVQRSNELGTTIAGALTDALKGPLDQIAGAVGQVSQDQSSAVTKLLTDVLASFSDRLENMFGTQLSGIGDMQQRTIDAMQTAVLKLQDLTDNVEAAGTRASDAMSTKLLEVVQAVEAKQAAMSEELRTVIEEIRSSTGEMQEATQTRVQDMLTALGEGMAQAISAIERQAAERSRLQAEEDGRRAEAAAGHVGQMRQSVDAISSNVDGLVAAIREMTAGVQSATRDAFVRLNGGADSLLAAANKLENSGREVVGGFDRIANVTTGLSEAAGSVAGAARGLDSVVSDYRSARDAVATMIQDLRATVENASREASLTADVLSRIEGATQKLASAQYEADGFLDEVADVIGKSHEKFAEGMRGTVIEANRVFHSQLSSATGLLKEAIQELEASLPSTGRQAA

SEQ ID NO: 4050 - protein, 236 aa, Sphingobium sp. MI1205
MFQRVTMGHRGREEGEKPFWISFADLMTALMVLFLLVMSVALLAVTRTISEREQLEAERQAEIVKLLDRIDKAAKKQGIRVDHNRAVIDFGDRARFDSASNALSPEQERLLRSFVPEVLAIARDKGGQRWLKRIVVEGFTDRRGSYLYNLNLSLQRSQRVLCALMARPQAGERPMDRRELEEIRRLFLVGGYSSNSAKASLDASRRIELRLEFFGVDEPAAAPVDAFEGEFGTCAL

SEQ ID NO: 4051 - protein, 560 aa, Sphingobium sp. MI1205
MRPLSPRMTKLQQRLADVGAAAFRDMPEPDLRILKGHVQSLQAMLSGAGAGAGASNDRIQTEILRFRETGRLHDVRSARLVSWGTRLRSVGQPALIEDGERFDPLLSEIDAFRSMPRPYRRCWRGLLDGYVNYDPRNARGAGDRNWRVLREYLNDNLPQLERSGQAPDWLAAIDDHANLLTEDPCTRYGAELLTGEGNPLEVLRHDLSAGDTSWIGQRIFEAQIEAAVRFDDRKFRDVLPRVIGLILEHDVLADHGLSRVLDRYSECSSIEVDPALCETSVGRWGNPWLERNDTLWTLVRPDTRRMVSSWHKLRLIEDFFNLLSADGINDQRRINFWKRHVDQISDMHFALGDAAYRDPRPSFKTLRQMMKGRMLNLTNGGVSSNNAFIMRIAGHVYVEFGEEGNAMFAFDAAKLPFDLSKLQVAGNKTALKHPSNVARIIHKDGVGERWERKADRLIASLSAARSGSQVSHTTPSYGARPSAPPPPITISSNPSPAPRPASADSELFAFFAKHGIKTADSRDKGGSLWAYAPRFGPATNELTRRNFAWAERRGAWYLRS

SEQ ID NO: 4052 - protein, 1074 aa, Sphingobium sp. MI1205
MIWGRKAAKTEVRQVAPRSPVVEDGGILLPSGGEPTPKSKAATALLDQLADEGLAERVEDGHRLNWSQLFVLLEDAEAAEELAILDLPSSTAAVPKIVSRKSLTDRDFSVAIDGWFDTDRRPMSGVRLKGGALEADGGVQLVAPGVWNLIERIRRFARRPEGERNEADQRRAWGEIRQLAVAAGASLDDFLYRTVVLTPDRLQMALRRSDGLGLVEIEPWFEGAPADWLEAFDKSGQVRDRYDLPTPHGIIQVMISPEVGTVLREVKRMPGRRVAGERAQAFLLNPIAALGPDAAAVVDEDQFEEAKQQAGIVFERFAAVTPETNGEGALGLLITSGSGDAIETREIMLEEADVLEFIEGVERNLDRGLQLFAWDEYEFELDGDSRLHCEALRRALGHREDGVITHGQIYDLSGYSERVEGIGQEKSFYSPHIAKRDDGEGWFPENLVPMIGWTDPNTEQPCVLPLTDKLSAELRKGLEMAKAKGATSVSLTGCPTPIPVREAEAIVSTFGQVQDQAAKGTFKPESPVRRGKKPTLILKSNIGQVDYQEERLAALAEKPAPARLPSSLRPGVALKHHQLEGLAWMQHLLALAPDKCRGALLADDMGLGKTLQILSLVARAREEDPGTPPALVVAPLSLLENWKEEAEKFLESGTLKILMAYGEGLAGLRVDRSSVDEQLRREGLVRFLRPDWRGDADLVLTTYETLRDLEFSFAREKWSVMVCDEAQKIKNPNAAMTRAAKKQQAKFRIACTGTPVENSLVDLWCLFDFVQPGLLGALNEFGSTYRRPIEAKSDDDRVKVEQLRGIITPQLLRRMKADVATDLKAKVVDEESRSLDMSPFQRGLYVGAIDTFRRSGAAPGSHLALLHKLRLLCSDPDENAGSAYDPVESYRARSPKLDWLIEVLEVIRDRGEKAIVFCEFKAIQRLIRHYVREAFDVPVDIINGDTTAVASSIDSRQKRIRAFQEQPGFGVIVLSPVAVGFGVNMQAANHVIHFTRTWNPAKEDQATDRAYRIGQTKDVFVYYPTVSAGDFKTFDVKLDELLERKRSLASDMLNGSGEIGLRDFDVDELRPVDP

SEQ ID NO: 4053 - protein, 539 aa, Caldicellulosiruptor hydrothermalis 108
MDTSQMIFDIILSLFFSISTDTWCFFIIVVATGLFVVSNFIFTYKVESHKWIKVNFVCKKLKEITNKITVNANNAELSLDDVDKIIDSCNEDIIISLWKKYRENSKFSPEEKIDKHFNKANLIDALTNRRLAEATPGLLTGLGILGTFVGLGKGLSDINIATGEAMKSSIENLMIGLKLAFYTSIVGIFFSLVWTLADRILLTSRVRIIHQFQQVIKDIVGEENKSYIKEIHDLLETQTSLLKTIATDISTELSKVLTDKINNEILPQLFSYNDELYKSIIEPAINNIASVIENFSNVASQTQVEGISKIVDKFVNEMSGALSYKFQELAATIDNICTWQLTLKQSLDDFIKSVIETTQNQVKISTVFTDILNSLTSNLKVIEEVNNKASENLDFIVKVQDTFEKQLEMLSIELEKIKEEYYKLVEKIENTDEEISMKISNFLDSVNKVENTIKDISASLTYISDAITASSQDFMQRVNDGLKTGLNYIDSELENITNYLFRLLSSMHDMVEDLDRSLKNFYDSFNKTLVAIETLSKKN

SEQ ID NO: 4054 - protein, 241 aa, Caldicellulosiruptor hydrothermalis 108
MQDFEDHEKPHDYWMSYSDMMAALILMFILLLMLLIFSYSEILQAKIKEREKLTENLKKTEQKLESIVGIRKKIVEDLIKEFKNSKLSLKIDPQTGAITFSESVLFEYNSYNLTQNGKKFLQQFIPKYIGILLSPQNKDNISQIIIEGHTDNRGDYLYNLELSQKRAFEVVRYILSNQFPDFPQKQLLKKYITSNGRSFSQLIYKNGKVDQDASRRVEFKFRLKEEEMVRQMEQILKGASK

SEQ ID NO: 4055 - protein, 939 aa, Caldicellulosiruptor hydrothermalis 108
MFFFNLFKKSISTEIDYCKDGIITTIFLNFTNKKRQNISLPFDKNHIITKYLKKLTSDSYQKLIILQQLWNDEIIQPHKENAYIISYDSLYKIENQDRILTNLPRDIKNLKIKIRTEGIFTSVDFRLKYDLYLSSGKKIDKYHIIENVLFFDNKAYLMEKHVYDLISIVNKINQEKSKEMLAEYISLLQSKAKSENVILEDYLKNEEYLYVDEVDYVIKTPNKDEIAIEPVIIHQSEKTQEINHIFHSKDEYLEKVKTIPIGYRRIRIFSSNNAVEKFNTIKRLPKFKGPEIPKLIETPHLFLPDWIDIDEFSKRVKEIGIKVYHIKPIIKLNKDTKTGLFDLVGEIKFESSDNQYSEDVQIDEILPILELSNDEYVKIGDKWVRNNYNDIKNFKTKIEEIKSVYEETGFKIPESEIKFVLEIFDNIAHLEYSETVINFKLQLTKEEVEFIRPKFISENIEIKEFQKEGINWLKTLYKNSIGGILADEMGLGKTFQVIAFLAYLKEIEELKPSLIIVPNTLIKNWSDEIEKFAPLLKNNLYIHHNNNRIRKPEEIAKNDIVITTYDTLVKDQIILGKIDWKVVVCDEAQYIKNPDAYRTKATKALKAKTRVALTGTPLENGLSEFWCIMDFVQPGLLGCYHNFKERFEDPIVNSDSNDSEKLIEGLLSIIKPYYLRRTKDKNLHGLPKKFVISHRIEMTDYQKMLYSKIIADFKKSENKKQILLDTLHKLIYVCDFPEISNDDIHKKNINKVVKECAKVKKLIEILDEIKQKDEKALIFTKFKPVQAMLSSIIQQRYGLFVNILNGEIRDSSRRKQIIDNFNQSAEFNVLILNTQVGGIGLNITSANHVIHYTREWNPAKEDQATDRVYRIGQQKDVNVYYLITTAPDLVKKTIDEHIHDLLQAKKELFKEVIVPNKFEISLEELEEVLDLDSFVEAKC

SEQ ID NO: 4056 - protein, 460 aa, Prevotella amnii CRIS 21A-A
MVGLGLLGTFLGLTLGILGFHSDSSEAIQGSIQSLLGGMGTAFLTSLFGMGFSCYYIFQEKRLMNTFEKYLDNICYILNKKYYLSENDFLAAYLSFKDEQGNNVYLSNAVRDMYAETHKQTGFMGTLVDDLSDALDEKLSDNINEKVIPIIEKFVTTLSDKLDMLKTSIQSPAEDMTHTIVDELKASMNDLMEKFGTELSGSATSNLTSLTENLAKASDSLFDLPAQMKNMSEQLAVAFGGIHTTIEDLESAVKKIVEQSANSNKDLVERAASQYSRMEESHQQISSQTDVLIANFNDMVDTLNTTVKEVQGSMVQIKETKNALVSLVVSLQGVTNNMDKASTRIKNSQESYVSGLKEVQEKSSTTVTNITSALQLSKNTLEDYSNKFGIIQQGLSGIFAHIKTGLDQYSTTVSQSARTVLNGYSSALTDGINKLQQATSHLGDLVSEINDTIEYIKKEK

SEQ ID NO: 4057 - protein, 230 aa, Prevotella amnii CRIS 21A-A
MRKIKLAKSDENDSNPFSQSTGDLMASLLFIFILLLSSLMLQVKKQEDSDRALTKNYAKIKTQLYIDLEHEFKDSLKVWNAVIDSTELAVRFQEPSTLFDYNKTDLKPRFAAILHDFFPRYMALLSKPQYKDNIEEIRIEGHTDSSGGYIYNMELSQDRTRSVLAFCLNQITRKDFEWAKYAITANGLSSSHPIIGKDGKEDADRSRRVEFKIRTNAEKQLEEIAIKREK

SEQ ID NO: 4058 - protein, 459 aa, Prevotella amnii CRIS 21A-A
MDNINDLLDFHFKADTFAKMGMNVINTNLIDRVENEISKLKKISNKIDAIGSDVDKSIDINPILAYINKKESLPELSMKNEKKVLRALCYYLSEIKSNNAIAYILQSLDRKWQNSFYWGLIDYIFQFWNPVSQNFCKIRTFLRNKLNSYNGTNPKYIFIRDNIKYFENNGPIMLGVKLKSDKKPILSCTEVLGMSEQKITYRYFSDVIYSYYKYKFDECISYDELDKVLNLHNNSLTDKSVIPLFIARKKNLTTSWKEALESLSKQRIGDCENDAKWSLPVEVETERHDLLKEAQNLIRIWTNEKYISIYFEKCVYDPRRKIFWLKYIKDIEKIRIAGSRVTKQTMSTDMRLMQLLHGKFILGTNNTKSDTSAIIMQIRGKIYIEFSEKGNALYVYQEHNLPIIKLFSCFAIQSINSLKKTNMNQLIDTSYWTGYDNDYGRMVHIGEWEYRLSNYISRH

SEQ ID NO: 4059 - protein, 1090 aa, Prevotella amnii CRIS 21A-A
MGVSIVKLYIQTLKATNMYSFDEARQIVRFFNEQNVAIKDWDILQKSVLMELCDNGLATYTENSVEVTPENIYQLDEIERKILGLPNEYPYDMYVEANGSTLTQGDFNYKISFYSFFPGGCILPYEVKGCFVVVDGATYLLSKEQFALYNAIHKFNSLDISEKDKSNNFIRFFNIKGLSKLAAAKLDSYLTDTDVCVPNKIKVLLDYNNNEMHLSASIDSEDSYQFTERFNKKEQVKGTYQLKKIGGKRVYVVFDHDKVVQLETIKKYEKTADRDTINKIMESPESFFDTNLVDIHEFYSDRVIEKGLYQPKYYSFICPYKSEWVPGIKVNDNVNGSKNLFFPKKEDIEKFESKVQEALKEGKMSVEWENTLLNVNEVLPQITKLKENCYNQKDTAKFNSPKGTKKISENEVLIIEENAEELGYSEQSVNMPCTVEHYNFHECTNLNSFVKLKQHQIEGVAWLQFLYLNKYKGCLLADDMGLGKTLQILYFIEWHRMQNVGNIHKPYLIVAPISLLENWQREYQKFFVGTLMQVSIVMSNDLKKKFAPKDVSWLQSLDLILTNYESVRNRQFNFCAVDYAFVVLDEAQKAKTPGSLVTNSMKALKADFKIAMTGTPVENTLVDLWCIMDFSIPGLLGNAREFAKLYQNPLKDKDTDIEQLGKKLRSKLGRFFERRLKSDVAKDLPPKHTYKKKQEMSDLQKRLYRDELNAVVATRQSRKTPQGMMFKVITAFRQICDSPYLSVVDYSQIDIDKLINSSSKLSVTINILDKIRKNNEKVIIFTDHKDTQRLLRNVVFRRYDLDISIINGETPATAKVQSQKLSRQQTVDNFQNAEGFNIIIMSPLAAGMGLNITGANNVIHYSRFWNPAKEQQATDRAYRIGQKKDVNVYYPMSVSKDFRTFDVIIDALLAKKAELADATLFPTVRTEIKQQELYESLIGESAEKSQNNYLEAESVDIMNDYRFEAFIAALYKKMGYKTILTSECGDKGIDVLALNGNTNYAIQVKHSKNPIGIQGVQEAKSGCEYYSNKYGFQFIPMLLSNSSFTTSAIDLANGTGVKLIGRDVLFDMLLSNKVANEDIISCELHRLDRA

SEQ ID NO: 4060 - protein, 230 aa, Prevotella amnii
MKKIKLAKSDENDSNPFSQSTGDLMASLLFIFILLLSSLMLQVKKQEDSDRALTKNYAKIKTQLYIDLEHEFKDSLKVWNAVIDSTELAVRFQEPSTLFDYNKTDLKPRFAAILHDFFPRYMALLSKPQYKDNIEEIRIEGHTDSSGGYIYNMELSQDRTRSVLAFCLNQITRKDFEWAKYAITANGLSSSHPIIGKDGKEDADRSRRVEFKIRTNAEKQLEEIAIKREK

SEQ ID NO: 4061 - protein, 459 aa, Prevotella amnii
MDNINDLLDFHFKADTFAKMGMNVINTNLIDRVENEISKLKKISNKIDAIGSDVDKSIDINPILAYINKKESLPELSMKNEKKVLRALCYYLSEIKSNNAIAYILQSLDRKWQNSFYWGLIDYIFQFWNPVSQNFCKIRTFLRNKLNSYNGTNPKYIFIRDNIKYFENNGPIMLGVKLKSDKKPILSCTEVLGMSEQKITYRYFSDVIYSYYKYKFDECISYDELDKVLNLHNNSLTDKSVIPLFIARKKNLTTSWKEALESLSKQRIGDCENDAKWSLPVEVETERHDLLKEAQNLIRIWTNEKYISIYFEKCVYDPRRKIFWLKYIKDIEKIRIAGSRVTKQTMSTDMRLMQLLHGKFILGTNNTKSDTSAIIMQIRGKIYIEFSEKGNALYVYQEHNLPISKLFSCFAIQSINSLKKTNMNQLIDTSYWTGYDNEYGRMVHIGEWEYRLSNYISRH

SEQ ID NO: 4062 - protein, 255 aa, Prevotella amnii
MGVSIVKLYIQTLKATNMYSFDEARQIVRFFNEQNVAIKYWDILQKSVLMELCDNGLATYTENSVEVSPENIYQLDEIERKILGLPNEYPYDMYVEANGSTLTQGDFNYKISFYSFFPGGCILPYEVKGCFVVVDGATYLLSKEQFALYNAIHKFNSLDISEKYKSNNFIRFFNIKGLSKLAAAKLDSYLTDTDVCVPNKIKVLLDYNNNEMHLSASIDSEDSYQFTERFNKKEQVKGTYQLKKIGGKRVYVVHP

SEQ ID NO: 4063 - protein, 669 aa, Sphingobium chinhatense IP26
MSGSHSRAWHASTVHKWEPELCGHEGDCVEITEWLGHGLIFFFTQIPLIGDAMAAFLAVALIGTAFAISYRYKREHHQPLAAAIEARVRLIDEVTGGSMADADAALIAFARRFNDVDEQMMEANHPEVLPLRRTWEEYRETIVDPGADVLQNTGRPEHFFVNIGEHHRGLNWFANIFIAIGLLITFLGIIAALSTLDFSGGVDAMQERLNELMKVAGAKFWASVGGIVASIILRSYDYRFGKRITDGLSALCDALEHGMAYLPPQRIAADQLEQLKEQTPALRTFSEQLAAALDGALEKQMAPMISHLGSIQQGIDKISGGGGDAVRDAIVSGAGAEMAGLAEAIGAMTASMATMADRFEKQTGEADKQIEEAVRRFGQASEEMRAAFGDLNKNFGVVADRMREENEQTSAMARQRMDELLSNLATALDEMKAGLAAAAGKMGEASTDAANKAARIGQEVLETSFSNFVEKFNATGAPLVASMKGAGDAIASSADRLASAQGAIGDHARAIEQVAARSSDLATAFGTVANDVEAASAPVRQSALAIAEAVKSVETVVVKNAQSSESAREEMRKLAASLNQTASAASSAWSEYRARFEEVDRALGDAIQKISDAAGNHASNLNDRVGQIDKALGEGVAQLAGALEPLTTLRDTVEELAGILANQSREAAE

SEQ ID NO: 4064 - protein, 242 aa, Sphingobium chinhatense IP26
MDGVVRRKHAEEGESYFMSMTDMMVGLLLIFIILLAYFALQLQSKTAELTGANLTRAEILNDLQQSLKDKGLQVEIDTKTGVLRLPDDVLFDKGQWELTDRGQAAISKVASAMVEVLPCFTTSNLCKGARSPHLIDAVFVEGHTDSDAMVGAMNNYGLSVRRAETTFSMLQRHQPDLQEFRNKPDGEPGSAPILGLSGYGPDRPIAPGDSEAAKKRNRRIDLRFLMTTPSVGLDQDILRQKK

SEQ ID NO: 4065 - protein, 466 aa, Sphingobium chinhatense IP26
MSFLRTAIARMEALAAAGLAKPPTTQPALQRQFAKLGAAGIGESEPIIELKPFLREAAHTGAKQLPRYQLNRVLRGAWCDPEFDVLGSAAIDRVVGEPRRSSDQAVIDGYLTYFPYDRPIMGKLASAASSAAQRHDWAWRDRARRWDMFAPQQGPSKMAFDFVSCDAGGMGQLMRETGLGANLAASGFGQATFAQTCVATATLPPNQALGSQRNLLALFDRDALAGQLELVVRALLEPWVSAKPEPQHRKAISAFLLDQVGDPRLQRTRWDRIVRALSESIGEARAREVAQVFKRWLTEVAMREFFRAIAKTTDRPDQWAQREKFWMAYLDEGLVSDAWPALGIRARNQIEHLIRQSGERPEFGIIQGGPAASSSIIMQIGDLRISEWSDNGSCRFWRDDDPGAPALYAKVYDGGKLRTTRGRTDFEYESHVPASPGWENKFAGLIHRRTAIAHPRFGRGRTRDWN

SEQ ID NO: 4066 - protein, 441 aa, Sphingobium chinhatense IP26
MALARSFDSEGQIREEADGIVLPAHIVARLDEADAFALGLPPATPLTLQLNSSGSLAAGSIQVNAKWVRRGGLPVRADIAGARVREGGRVGRIPEPIFSVFQAAIAVNATTDPDERRATFAQLRAQLGDEIGSGIEADGFLERVRIAYAANFSLNARTDHGRFDFDPVLFSRNAAETLDGDLVDEEAASLLTPDDCQHFHRKFKGQEGGRRSYLLSDGTLLFLDPMLGKALDVVRTKQASSSQEKREFLRSPQRILREELKLDAGDDDEAADRLFVETQQFSERVSGIEVWQKPVLPWIKPKPNSWLPEGFGLRIGDPPNARHLELAAGEAENLADTVEKAIDAGTETVAWRGEDIPATPATLQSARALADLEKQVAANAGHPPADETVPEALETYFLQVGENFEQLDYARLPRSQAASEPFSVPGTPQGLKSEPKPHQRE

SEQ ID NO: 4067 - protein, 907 aa, Methylobacterium platani JCM 14648
MSLVYGSWWVLSRVTPFSDVHVLRSVVQDALAGSYDRLSSRDFAFALASLVVQAAGALAVAFLIAHVVLVRLAIAVARRQVRRLRGVSDFAVGYSDLTRMLERNAVIGHAWGEFAETLVPDERAVRNTVRPQSFINIGAAREQFAGLKMMNAIPGYFVGLGLLFTFIGLVFALNKAAASTGAGSAEAMTHSLNELLSAATFKFGTSIAGLGSSLVLSLLFKVYTITIEAGFDGLCRDLEARLVFYPPQAIAAETKVILETQRDQLKEINSERFFSRLGESVAPGIQSAMTTAFQPMAEQLSEAVGQLSQTSQTGMDDMLQRFQNGLQDGAGAELRQLAGTLGAMQGALEGVQRNLAGSGEHFSKQLSDAAHNLERLVAQAGANLGASADSTRTVLEEVAQQLRATFEMANRQVGETLAHSASGAAGLVEDAMAKVLTRLEAQTTAFGDTIAALHQATASQAEGQARTTREAGEMAAAAASQAARDAAQTMHGTIGAVASSVTGAAAQAETAMVQMATRLDTQMSTIVGALAGLQQSMASQAQESSRVARDAGEAAATSASRAARDAAEAMQSTIGSVTGSVSGAASRAEEVMAQMTAQLGAQMASFGEAAGVLQRNLAEQAESSAKATREATAGAAASASQAAQQAAAQAGEAMDRVTGRLDAQVATFATALEAMQRSVAAQAEDSIRAAREAGSAATASTVQAAQQAAEAMRTTIAAMTAEMRGAIDAFSGSLRTVETAFAGQTRQVEAVSLRSRETAEVFGQVARTIQVASQPLLQTSERIAAATETMAGSVRDSAGALQAGQSAASGLADRLDALLQQARDSVVAYEQRFANVDAELGRAMERFGEQVRQQQDRVGNFVVDVDKQLSVTLDRLERVMTDLSASNEELGAALTRSLQTGRLEAAE

SEQ ID NO: 4068 - protein, 260 aa, Methylobacterium platani JCM 14648
MMVGVLFIFIIMLMAFALNFQKQTDRQEDKILVAEEVGRRLDELETQVTNRLGEIRAASTARNALLRDLRDQLRQEGLVVQVDEANGVLRLSEDAIRFPVNGADLIGRARENVGKVGRVLGRVLPAYAACPAGAAACGTDGRAFLETVFIEGHTDSTGIEDRNWGLSTERAVNTFRELKATAPDLRRVLNRRGEEVLSVSGYASTRQIDPDRSAAAYEKNRRIDLRFVMEVDTGAGLREIQGLVSGMKAEIGKLVTPKGR

SEQ ID NO: 4069 - protein, 465 aa, Methylobacterium platani JCM 14648
MSSFRSALHSLTLGAPRPLPAEPRLTALARRGDAAGAQAVRRPAVDLDEVAARLIAALDAGEEPSPLDWRHAPWCLWRAEPPLATHDRALTRLLSEIMRSERRGPYRRLASVYLIDYAPERPRIGEIGRALAARAAAAGAPWHDLQRDYRLFEGPEGVRGLTEAALAGRETVPALLGRRGLTAIMAGSGLAEASHLDGLSLLAGRPAASATLHLDQVRGWCLAADNSLLYQAHRAAMVNALVMPFRGMMPSAADRDALGGFLLARFGDPRVKPGNWIGMDEAAAILKRWLTEQSLRQFFDVVDRIAPDGMWKYRRSFWSAYHARDLILNAWVVFGQDGASEARRAFGRDIQFGKFAKGGRKPVMAGHAVLLLDLGRCIVADWSHNGYCNIWSADDPERPRFMNALSYTTDDVRREIPSERTEAVLRKHNIFAHSGSDNYVWQSRVAACIYAMTGHRLSLGEFTVR

SEQ ID NO: 4070 - protein, 968 aa, Methylobacterium platani JCM 14648
MLGRTRTVPLAEGSRVPEIRSALRVLNGLVAEDRAQREGEVIRLSHAEAAALPPDVLKGIGLPELARVSLDLAFEDRVDSEKGWLRLRWRNERQAEIRPERVGLVLRAQGLEGRLSPALLALVEAAEGYNASRGQPLEARVAAWMPVQQALRDALGPEVGADAYTRNLTFYQAGAFALDVREAPHGVDFTPVLMAREQAASREDDAPDPIVEEGEADPLLPPEDHRTFLSKALNSPTRDAYVVGPNRFVLIDPHLKPLLEVVRAKRRASPEVRRAFIRNPRAALADGLGDTIEDGRTSLFVETAHYSDRVIALGIWERPKLPWLTKRAHTWLPESGWTDARGEAVAAPDLSEPERQDLAVAIAQARDAGAAEVTIKGVVVPLAAAEAFLHASGVPEPERAPSGEETHPETEDAQEDQREDPPPDDQHVLLIKTNYEDIEYEQTLQPRKALIAPAPPADRMGASRFKEHQEKGFGWLVAGWRAGWPGMLLADDMGLGKTFQALAFMAWIRSNQEEAKRTRDRAVERGPILVVAPTALLKNWEQECSRHLSPIGLGERVDAYGAALRHLKRPPDQRTDPGETLDVGRLRAADWILTTYETLTDHEQAFARIRYALVLFDEMQKVKAPDTLNTKAAKALNADFVLGLTGTPIENRLEDLWCIMDRLTPGYLGDLKGFSGVYGEEDPDRLRDLKRKLDEPVGPAPAIMLRRMKSDVLEGLPTKTEERYEVPMPRAQAEAYGRIVMAAHQADGTRKPGDMLRIIHELRGVSLHPDDPESVRLGDARAFEAYAARSARLHQSVEILRKIRAKGEKAILFIESLAMQRAVAAGLTELFDLPAPPGIINGGTPGEQRQRIVDAFQASPPGFGLLVLSPKAAGIGLTITAANHVIHLSRWWNPAVEDQCNDRAYRIGQVRPVTIHLPMAIFPDHRDSSFDLTLDGLLRNKRQLSREMLAAPVSARDTQAIFEQTIGA

SEQ ID NO: 4071 - protein, 641 aa, Sphingobium lucknowense F2
MEITEWLGHGLIFFFTQIPLIGDAMAAFLAVALIGTAFAISYRYKREHHQPLAAAIEARVRLIDEVTGGSMADADAALIAFARRFNDVDEQMMEANHPEVLPLRRTWEEYRETIVDPGADVLQNTGRPEHFFVNIGEHHRGLNWFANIFIAIGLLITFLGIIAALSTLDFSGGVDAMQERLNELMKVAGAKFWASVGGIVASIILRSYDYRFGKRITDGLSALCDALEHGMAYLPPQRIAADQLEQLKEQTPALRTFSEQLAAALDGALEKQMAPMISHLGSIQQGIDKISGGGGDAVRDAIVSGAGAEMAGLAEAIGAMTASMATMADRFEKQTGEADKQIEEAVRRFGQASEEMRAAFGDLNKNFGVVADRMREENEQTSAMARQRMDELLSNLATALDEMKAGLAAAAGKMGEASTDAANKAARIGQEVLETSFSNFVEKFNATGAPLVASMKGAGDAIASSADRLASAQGAIGDHARAIEQVAARSSDLATAFGTVANDVEAASAPVRQSALAIAEAVKSVETVVVKNAQSSESAREEMRKLAASLNQTASAASSAWSEYRARFEEVDRALGDAIQKISDAAGNHASNLNDRVGQIDKALGEGVAQLAGALEPLTTLRDTVEELAGILANQSREAAE

SEQ ID NO: 4072 - protein, 242 aa, Sphingobium lucknowense F2; identical to SEQ ID NO: 4064

SEQ ID NO: 4073 - protein, 466 aa, Sphingobium lucknowense F2; identical to SEQ ID NO: 4065

SEQ ID NO: 4074 - protein, 666 aa, Geobacter sp. M21
MDVLAFCSHYLPPIACGGTLCWLAWKSNKEFIQPSKILKRELTEAIKNLKELRHGASGQPVTDLAVIADKVMTGEVLRHLWSEYQETLHPQKGIDTDGFERIVRYRSTALSETFFTDQALVDTPLKTAFFKHLPGILTGIGIIGTFFGLITGLKSFEVSANADLVRKSLSGLLSSVGDAFTVSLMAIASAMIFTFIEKTAVTQCYGHVEELTQLIDSLFDAGAGEEYLSRLVAASETSATQATQLKDALVSEFKQIMAEVTELQVSAAAKHSSAMSSAIVESFTESISEPMERISRAVDNVGTNQGDAVNRLLTDVLANFSSQMEGIFGGQLRGINELLIQTTETMQGVSSRFETVAAGVQTAGESAADAMAEKLSQAISSIEARQEIMNAQMGEFVVQIKNLVHESQTETSQKMQGILADLGEKVSGMVTQLEEQSRESTKLHQTSQIQFAETTNATVDGIGGMVQALAEEVQSASDAMRQSVSSLSQSSRESIDKLNSGAEVLYMASSEFAKAGKGVTDTVRESGRAVETITGATNLLGAIVKDVRSILSENERAKDTFGAMVNDLRSLVENAKREASMSEEVIASIRHAAEQLSSAGQQAEDYLRGVTEVLGNAHVEFARNIERTLNHGNTTFQKELSMGVGLLNIAIKELGDTIDEFPRGNA

SEQ ID NO: 4075 - protein, 239 aa, Geobacter sp. M21
MIGLRTPGGKKASDEAEKPFWISYSDMMTALMVLFLVVMTVAILAVTNEASETDKQKTQRESEIAQLLAEIKASTKDFPGIIVHGNTIDFGELVRFETDSHQLTREQEIMLRRYIPGVLNAARSPLGEKWVRRVVVEGFADRRGTYLHNLNLSLQRSQRVLCTLLAKSTPDEKPLTSDDRLLIRNIFLVGGSSFNSLKESLEESRRIEVKLEFLDIGEKRPKSPNHKMDEVQACPLDCE

SEQ ID NO: 4076 - protein, 556 aa, Geobacter sp. M21
MIQLLRDRITATVAISFQQGSLGSTDHMSKTLAAVRRNFDNLGGPPVQGRTIADAVSSFRATGKLLSFSNAKYVCIGVSHELPDGWRLIEDEGIFSTLIDEVRLTALRPRLFLRCYQGLLYNYFNVYTKSSSESCAGNWLALNNFLKTDLKQVQQTAIPPTWLKMLTANENLLEDNPCRKYGNILAEGGQKEFRGICEAVGILSGSWLLEEAVFSQVEAICTYDDSPFAEKLDEMLLLLVGQGNVSYSKRLIVRCLAALAIRYSRCREHPDHSILRDTLIKHIGNPWLDKTAWDVSVNDEPARIMVDSWLKRHLIHAFFTLLSEDGATDQRRLDYWLRYYERINDLWFVLGRDARKNSSSDFVKIRALARDHLLYLDGGGASNNAFIMKIGDKYAVEFGLTGNACYIFNEDRLPFDPTRMQRTYNVTDLKSKSHGKQMIHSDGHQRWESIFDDYLSPRIGWRPGTPVQQPSHTRAHASYDRLSNQHVQPPKVNGPLSAEGYREVWQMAADRFYGMTDKRSSGGGLWVDAPNNIAFVSSILTKHGFNFRQDKGWYRE

SEQ ID NO: 4077 - protein, 1248 aa, Geobacter sp. M21
MGFFPSNRKMAPREPTTAAPQDLSVSFDGEGACYHFRAQGSEWQDLHGLSSIGQDTVALLSQIVEEGFAASSDTGVILPWPKLYQLLASDCYEGCGPLLRLPPILATRPVLKSQNSLTDRCFSVNLAGWIDTSSNPLPDNFRLNGAIISFGLGSHLLPQAAWELTIALRDFFQRSEELRDFAGNTQGWSRIRECAVRARASMSDFLQKTIVVTPQMLDLQLRSIAFGDSRTVEVLPSFQGAPERWIETFDKLPIADHYRVSEGELLTHVIVTDEVRAVLTEIKRMPGRRVSCERAEAFIRNPFSVLGPEATRVIDPEKFDQAREDAGLHFSRFTARVQTDSIGFPSEVALFVEEMVHEEIRSEEVRFQDDADLERFICKLEGRIERGAQCCLWKGFELELLGDVGDQLDILKAALRARRCEDKFSSAELFDLALYSDRIEAIGVEKPYYSPFIARKSVGDPWVPENTDFGICFIPEGETEPVALSLDKERQKQFRDAIDLAKTEGAATVKVPWLPRELTVDLAEDLIGTIEAAQGDVAKGEFKEDRITNRVAVPRKGLVVKPNIETLSYLQQRGLLEMPPKAKPVLPAGLKPKTNLKEHQEYGVAWLQNLWQLAPCHCRGALLADDMGLGKTLQLLTFIASCFEADPELAPVLVVAPLTLLENWQEETDKFFQPGTFPLLTLYGPALTAKRTSRADIGADLLADGITRLLKRDWIGNAKMVLTTYETMRDFELSLSAQKWSIMVMDEAQKAKNPNAMMTRAAKKQNVKFKIACTGTPVENTLTDLWCLFDFIQPGLLGALNEFGGNYRKPIEAETDEEKQKVEELRGIIAPQILRREKKDVARDLPRKVFVEECKTLPLSSLQRQLYGQAVANYKAGKSGDPGATKMNHLGLLQYIRQVCTDPRPLGQATSEHESFEVAASRSPKLAWLYGVLKEIQGKGEKAIVFTELRGLQRMLKIYIAERLGVVPEIINGDTSTATANAQSRQKKIKEYQERPGFGVIILSPLAVGFGVNIQAANHVIHYTRMWNPAKEDQATDRAYRIGQTKDVYVYTPVVVSPEFTTFDAKLDALLEWKRGISADMLNGAGDIGSAAFGDIEDVDGSHAFEHALITMDDVLSMQPAAFESFCTLLWAKQGFSKTYRTSLSGDGGVDVVAIKGRTGALLQCKTSGTDGIRLGWQAVKEVTAGTAAYTARHPHVEFRRVAITNQYFNDAAKYQAKVNDVDLVERDNLEALVTQYPVKQIELEQIL

SEQ ID NO: 4078 - protein, 667 aa, Parabacteroides sp. 2_1_7; identical to SEQ ID NO: 3622

SEQ ID NO: 4079 - protein, 231 aa, Parabacteroides sp. 2_1_7; identical to SEQ ID NO: 3623

SEQ ID NO: 4080 - protein, 616 aa, Parabacteroides sp. 2_1_7; identical to SEQ ID NO: 3624

SEQ ID NO: 4081 - protein, 916 aa, Parabacteroides sp. 2_1_7
MLTQVVNKIGILFIVNFNGHDLHFQEWKATDDSIYYMPLSTLVDNGYAYASKDGCLVPYENIYLLDEEDKLLLGVPQPYNMAMRLIGTSMLNASDFEYKVEFLSHVPDGELLSYEQCGNILIVNKKKYLLSEAQYELINRIHEFNSSPEEEKTTDFNLRNFGEIKALAEQAGCELDSYLANENVYVPERIKIEVGRDEDGFTIDPAIDIDENKKFQQYFDRMRKVQGQYPIQRENGERVRVVLNEEQKENLRHLKSQGGRHKTREEIQKIIEEPTEFFDPDAFDLSELYSDRVIEIGVYKPKFYPFICPYKSCWIAGATIESPQNGTSQVTISSETELENLRKEINKAKENGKSIIEYKNAQIDMEDALFLADCAAQQLKAPSKPFNAESVDNKKVLIIEENAEELGFAVKERVIERGEKYTLFTNPYLQECYSLKEHQKEGVAWLQHLYKSKASGCLMADDMGLGKTLQILYFIDWHSRKYADHKPYLIVAPVSLLENWKNEYERFFKQPRMTINMLTSKDVPRKFDKDIVNRIQKMDIVLTNYESLRISQLNFCAVEFDIVALDEAQKIKSPGTLVTNAAKALKCNFRIAMTGTPVENTLLDLWCIMDFCVPGLLGNAKAFAAQYQSPLKKDDTDIVALGNEIHEKLGIYFMRRLKKDAAKDLPLKHELKEKIAMPSVQKKTYTSVINAYMNGIQPNMLVTIMNLREVSEHPYLYDSALTTHDINELVSTSARLQATIKFLDSIKEKEEKVIIFVERKETQKMLQKLSNERYGIICKIINGDTPSIIKRHSFDRQTRQASINEFQAVDGFNVIIMSPVAAGMGLNVTAANHVIHYSRQWNPAKESQATDRAYRIGQTKDVYVYYPMAVTSDIKTFDEILDDLLSRKTSLATSTIFPSERIEVKQEEFGQILFGI

SEQ ID NO: 4082 - protein, 322 aa, Pannonibacter indicus
MRASSRRTHQEEEEESAFVSMTDMTVSFLFIVILLLAFFASQYSNTDKVPRSELVAERELRQAAERTAEDLRQQIEQKDARIRELEETVEAQTQEIAEMKAELERLRKNFEVKNPLEAYLADAALERRRILERLREQVKMDFPDLKVEVSEQSDALRFQGDGLFDTNSSELRPNRRPIVTSVARRLGELLPCYTLGPSTRWTSTCNPGGVVIEALQIEGHTDSTGNSNSNLTLSTNRANSTFTVMTESVPGLMDFQNLRGQPVLSVAGYGQMRPVADNSTKAGRDTNRRVDLRIIMYTPSRSEEIGRIRKSLEAGSRNGGNP

SEQ ID NO: 4083 - protein, 437 aa, Pannonibacter indicus
MSLEQKLSRPLRLATAALPALNRLVSTTSRIIERWPDGAGDPPEKDREKLVQEMRARVETGNWEGTKLFLVTSAARALFDMERRSRPDLEPLRNFYFDEIKASTRPGFLSAMFSVYMTSYEPGAAHTRRLAEALTSAGGRIGARWYRLLMTEPRVLDPDNAHEHISTLMRPMTSPWIGLKELGFHKPHDTGLMAHAHLAYVKKVKSELQTRNGMERMIGWLKPDRQEAKILGASEAITALLEHWTNSSPAEDDRSYLTQSLVLLYGDPRLNKGGAWSGVPDNLMAVLFRWLTGENIRFFLDVVSAVEDSPMWEPRRKFWLGLFRAGQIDAAWVAFSEKGAEEARRRIAGNHVEGKPGYGRQIAGGGRNNTSLLILQIGRRIVVEGSHSYKVHIFQSSDARSPKLYQPSYDCEEIRLTPGANAKSHHSGWEDWVLRNI

SEQ ID NO: 4084 - protein, 1032 aa, Pannonibacter indicus
MKFKYSFDDREVVVSAEPEAAGLLARLRGKGNTPDLQALKPEELDLAFALADLRALAATLRLELSVSSNEIRLPHRLVASLDSSTAAVLGLPRLTDLLLRTDAEGLLGSSGFKLRYEWFRQGQRVFPNRSGSILSMGGQHYRIPLWMMEALDVADGFQPGLGDAHDWEALARFRQALEPGVSMAHGEVSARSSMTDFLSGLEVRLADSFSISTSGTDDFEVVPFSRQRIRGDDGELEAGSVSEDQSELAGQELQRFQSQVRSRGALAAYRLSPGNYLVIDRAAAPALDVMARMQKADLSERRAFIQNPQRLISEAIERQLRESGKLDGLSDSGQQEAIEAAAGPLFIETAEFSERVTGIIAYQKPDQEITGSGTTWLPEEFVQILKEAIAPLGHKELTSLRDQVIEGIATGEKHVNFDAIELPARPETVALLNGKIAEKELAGSEDLEQLPPSKGAPLVLDTKDNFEDLKWQTGLKPRQSVISSTVPPAILTPLKEHQRASFEWQAEAWRAGLPGVLNADEQGLGKTLQTITFLAWLKDNMTQSQAMPRGPLLIVAPTSLLENWQMEVRNHMQEPGLGHVIRLFGSGISSQKKSGYSGKDTDDGIAKLDLSALHEAIEDNRAHRYWVLTTYTTLTNYQHSLGRIRFAATVFDEIQALKNPFSLRAKAARSVNTDFCIGLTGTPIENTTVDLWAIMDRIAPGALGTLKDFREQYADPTPESMRELYQRTFEPSGGKPALAIRRIKDMVARDLPEKTRRLHPRLMPTVQATAYDDAKLKLASGGLGAQLKMLHHIRSVSVHPNMGAVTDNTTFITESARLSAVMSILRSIAEKRERALVFIEHRQMQYRFVELVKTEFGLKHIDLINGDTPIQKRQAIVNRFQRHLEVDGGFDLLVLGPKAAGTGLTLTAATHVIHLSRWWNPAVEEQCNDRVHRLGQTRPVSVHLPMAIHPEYREQTFDCLLQSLMNRKRRLAAAALWPMGDTQSDISELQRLLSDGSTRQAGDAIAGSMHAMFERDGLPPPDMQPDGSIRLP

SEQ ID NO: 4085 - protein, 700 aa, Nitrosococcus watsonii C-113
MNPEEEKFNWAGLLPDFRTLGYPDTPEKLSALFVAVLFAVVFLFLCFSGYRLFKAWYRTSRISKFLKNETSKSVLMNRQDLREKASRVNDEVEHLWKEFDETLVETRVGDDVHLHSIYEASHFFNGSTLARGITESRMLAAVPGFLTALGVIGTFMGLQLGLSELNIGNEAAVKDMKAGLAHVISGAKIAFLTSVWGVMLSVFFNFVEKLLECWALSGIHRLQVRIDQLFPRFSAEVQLQKIADDGSQARESLQGMAERIGDKMQESLLEATSGIQQGLEASLEKIMAPAINKLVNETTDGSQKALEKLVEGFLDRFGEQGEIQRQAMDTASKGVEDALAAMNQTLEGFIRGLDQNQVAAADREQRLIKHISDQVDELVEKNTEHGQRLATAAEQQIGKIAETLQHSQQAQEEREIRLGEKLSEVAAGMDQTIAQLIKHISERVDELVEKNAEHGQRLATAAEQQIGKIAETLQHSQQAQEEREIQLGKKFSRVVADMDQTIAQYTTASNALMEQGKQLQQQVAASQSNFERVAHGINAGAAELRSAASQLKDYGEGVKQSSIQLSGALNEAARSTAKLADENKKSSVTVGQVHQEMSHSIEKLQAVAAQLESVVQAADSTFKYMEVHQKSYLDSLKRNVQELSEQGAKLLSDYAGQANAQTKEHLNIWAGHTTNYAEQMNGAARALSSVVDEIEDKLSH

SEQ ID NO: 4086 - protein, 250 aa, Nitrosococcus watsonii C-113
MHALIRPKPRRVDEENPYWISFSDLMSALLVIFILAAVALIIELTQTQKKIEQDIDQLKNAEQARRDILHEIRDELAKRNIKILIADNDTVLRIPESTLAFASNSYALPADEKVRSSVVAIGQVLHAAINRSFKPGVSEKRRFDYLDTVFIEGHTDSRPTKRIKGNWGLSTFRAISLWEYWDDVLDVSPVLTDMSNAFGDKLFSVSGYAATRRVNEAEITREDRRENRRIDIRFTVKRPRISELEDIVEQ

SEQ ID NO: 4087 - protein, 477 aa, Nitrosococcus watsonii C-113
MRLPLNKLHFSLSDESLLSYKERIDAAAQEIKQLARGSGTGSAAFKQAYERVLKALSEDRDLNEVLRTPTDLRAFAVSFNTGWVSKIRLTEPVLQKINQIRQKPTALLVDAIYAHYLTDYDALPDRVAVESWLRVAKGRRGRLSEEVSAILGGNGPKWLAEDARRQGVDFDEQVGRVGLDRFRSGRFMTVAKNIYYLDVLRKLEPNQDHPLLDEMQKRPVYNSRYDERHLLGHQILGILIEKAPVNAVGEAWLNAVLAIGGDPRVPTCHPNHQKWWSQLDPQLKNKVQGWLSKLDLRLFLESLEDFSCQPGKEDLKRMYPARKRFIEGLLNEQLVTGTRLYLSPSAESYLKKAYRAEHLPHYSVVTDHGGRSLIHIQLGGIHLIEGSHNCQLWIYETLDSSAIVFDYSKNRVTYHSLTQGLSLIMRKKGLPPKANISHCTGWQHKAIVALKEMEVPIEAKDVLTPEDYRQYKRLYGA

SEQ ID NO: 4088 - protein, 1145 aa, Nitrosococcus watsonii C-113
MSLKEWITGLVGAKATGCAWNYDSEGINFIFTEKQEAQIHGGGASDLLIHQYIALSMLVEQGRAEELPNGVLVPSDVVVQLDENTRLLLGLPDRWKGVLNANIKGKTGSASFQVELAAADAGGGFTHGFAVEGPVIRFSAEKRYVLSPAHLLIFEAYEKHAHSAKMEYDDLRLVLSLQKAQELGASISLGHFGKLNIRAPASITVAAELDEHGRLVLTPRMGQAASHERIQRVLGQLRAEHATSLRVDGEIILFDEEKLAAVREILRNRVIPKDKVSAFLKNPTAFINASFVDLDLGFSARVKGATKFRHAYFGETDESGIDWFGKKFSPTEVFAPAKLVDVISDGDQLDDVRQKLANVAETGAQEMEFGGRIFDVSNPKLVNSILEKLERKLIEEKRENVSAVEADSASKKEQAEPTVVDIGLNDVDLETPSASLNRAINDVLIAESALDWGTFKRLPFPHQVLGTRWILGLALDRDGRGGGLLADDMGLGKTFMSLAAMEHLYKSYRDRKLTEKPCLVVAPLSLLQNWKDEVGQTFKESPFNDIVILQSDGRLSEFRAGGVETKNQNITEDETAPIRYSLKIGSGFAQERLDLPKRLVITTYQMLRDYQFSLCSIDWGIAVFDEAQNIKNPNALQTRAAKGVKADFRLIATGTPVENSLTDFWCLMDTACPGLLDSYQAFRSAYITPILRAAGDEIEHVRGIVGRRLREHVGPWMLRRVKEDNLEGLPDKSVFVGMKDDVWAYCPALHSTLEGGQFESYNTILMRASSSDSNAALAALQKLRDVSLHPRLVFGGGLDTPRPLADLVNLTDESGKIRSLLPILDQIRDRGEKCIIFVINKKLQAFLALTLAKIYLLPPVSVINGDAKAVAKRAASPTRQSMIRAFEERDGFNVIIMSPIAAGVGLTVVGANNVIHLERHWNPAKEAQATDRVYRIGQKRKVNVFIPLIHHPEYQSFDVNLHQLLSRKGQLKDAVVTPVQVMPSPEGLPQESRSSSQRISFDELRNLSWQQFEALCAELLYKEYQADNCWLTHSGADFGADVVLTKDGIGLLIQCKHTSGSAYDGYKAILEVHSATVKYEAELGKRIDSWILATNAVCLGSATQKAAKQYSVEILDGKTLSRLLGRHAVTYADVLNRLEKKRLRV

SEQ ID NO: 4089 - protein, 236 aa, Sphingobium sp. YBL2; identical to SEQ ID NO: 4050

SEQ ID NO: 4090 - protein, 560 aa, Sphingobium sp. YBL2; identical to SEQ ID NO: 4051

SEQ ID NO: 4091 - protein, 1074 aa, Sphingobium sp. YBL2; identical to SEQ ID NO: 4052

SEQ ID NO: 4092 - protein, 657 aa, Sphingobium sp. YBL2
MTLFGIPVIPVLVFVVLVALAIAFFRYFFIPANRLDANLKQIIANVEAARAKGLNDLSKCFEPDRAIAAIFNEYRETLHVQKDLDVQTGEMVERAIRSTVPAEMFLSPHAVVDNRVHAEFFKHLPGIFTGIGIIGTFTGLLTGLSSFQISDDSGVVRNSLTALLHGVSEAFIVSAFAIILAMFTTGLEKFRLNSLYRKVTQLAHEIDATYEAGAGEEYLARLVTSSEDSASQTKILKDALVADLREILTELSDRQINATVQRSNELGTTIAGALTDALKGPLDQIAGAVGQVSQDQSSAVTKLLTDVLASFSDRLENMFGTQLSGIGDMQQRTIDAMQTAVSKLQDLTDNVEAAGTRASDAMSTKLLEVVQAVEAKQAAMSEELRTVIDEIRSSTGEMQEATQTRVQGMLTALGEGMAQAISAIERQAAERSRLQAEEDGKRAEAAAGHVGQMRESVGAISSNVDGLVEAIREMTAGVQTATRDAFVRLNGGADTLLAAANKLENSGREVVGGFDRIANVTTGLSEAAGSVAGAARGLDSVISDYRSARDAVATMVQDLRGTVENASREASLTADVLGRIEGATQKLVAAQSEADGFLDEVADVIGQSHEKFSEGMRGVVVEANREFHTQLSRATGMLKEAIQELEASLPSTGRQAA

SEQ ID NO: 4093 - protein, 236 aa, Sphingobium sp. YBL2
MFQRVTMGHRGREEGEKPFWISFADLMTALMVLFLLVMSVALLAVTRTISEREQLEAERQAEIVKLLDRIDRAAKKQGIRVDRNRAVIDFGDRARFDSASNALSLEQEQLLRSFVPEVLAIARDKGGQRWLKRIVVEGFTDRRGSYLYNLNLSLQRSQRVLCALMARPQAGERPMDRRELEEIRRLFLVGGYSSNSAKASLDASRRIELRLEFFGVDEPAATPVDAFEGEFGTCAL

SEQ ID NO: 4094 - protein, 557 aa, Sphingobium sp. YBL2
MRPLSPRMARLQQRLTDVGAAAFRDMPEPDLRALKGHVQSLQAMLSGAGAGAGASNDRIQTELVRFRETGKLHDVRSARLVSWGTRLRSVGQPALIEDGERFDPLLSEIDSFRSMPRPYRRCWRGLLDGYVNYDPGSARGAGDRNWRVLREYLNDNLPQLERSGQAPDWLAAIDDHANLLTEDPCTRYGAEILTGEGDPLEILRRDLSAGDTSWIGQRIFEAQIEAAVRFDDRRFRDVLPRVIGLIEEHDVLADEGLSRVLDRYAECASIEVDPALCETSVTRWGNPWLERNDTLWTLVRPDTRRMVSSWHKLRLIEDFFNLLSADGINDQRRIKFWKRHVDQISDMHFALGDAAYRDPRPSFKALRQMMKGRMMSLTSGGVSSNNAFIMRIAGHVYVEFGEEGNAMFAFDAAKLPFDLTKMQVAGNKTALKHPSHVARIVHNNGAGERWERRADRLIASLSTARGGPQVSHTTPSYGARPSASPPPSARSSSTGSSVGKDAELFAFLAKHGIKTADSRDKGGSLWAYAPRSGPAANELTRRNFAWAERRGAWYLRS

SEQ ID NO: 4095 - protein, 1073 aa, Sphingobium sp. YBL2
MIWGRKKAKPEVRQATTPSLVVEEGGILLPAGSEPTPRSKAAAALLDQLADEGLAERVDGGHLLQWTQLFVLLEDEEAAAELEILQLPPSTMAVPKIVSRNSLTDRDFSVAIDGWFNADRGPVSGARLRGGALEADAGLQLVSPRVWSLLERVRRFARRPEEERNEADQRRAWGEIRQLAVAAGASLDDFLYRTVVLTPERLQMALRRSEGLGLVEVEPWFEGAPADWLEAFDRSGQVRDRYDLPTPDGIIQVMISPEVSTVLREVKRMPGRRVAGERAEAFLLNPIAALGPDAAAVVDEEQFEEAKQQAGIVFERFAAVTPETHGEGALGLLITSGAGEAIETREVMLEEADVIEFVAGVERNLDRGLQLFAWDEYEFELDGDSRLHCEALRRALGHSEDGVITHGQVYDLSGYSERVEGIGQEKSFYSPHIAKRDDGEGWFPENLVPMIGWTDPETDQPCILPLTDELSAELREGLETAKATGATSVPLTGCPTPIPVREAEAIVSTFGQVRDQAAKGTFKPETPARRGKKPTLILKSNIGQVDYREERLAALAEKPAPARLPSNLRPGVALKHHQLEGLAWMQHLLALAPDKCRGALLADDMGLGKTLQILSLVARAREENPETPPALVVAPLSLLENWKEESEKFLEPGTLKILTAYGEGLTGLRVDRASVDEQLRREGLVRFLRPDWRGDADLVLTTYETLRDLEFSFAREKWSVMVCDEAQKIKNPNAAMTRAAKKQQAQFRIACTGTPVENSLVDLWCLFDFVQPGLLGALNEFGATYRRPIEAKSDDDRAKVEELRGVITPQLLRRMKAEVATDLKAKVVDESSRSLDMSPFQRGLYVGAIDAFRRAGAAPGSHLALLHKLRLLCSDPDESAGSAYDPVDSYRARSPKLDWLIEVLKAIRDRGEKAIVFCEFKAIQRLIKHYVQEEFGVPVKIINGDTTALASAIDSRQKMIRSFQEQPGFGVIVLSPVAVGFGVNMQAANHVIHFTRTWNPAKEDQATDRAYRIGQTKDVFVYYPSVSAGDFKTFDVKLDELLERKRSLASDMLNGSGEIGLGDFDVDELRPVE

SEQ ID NO: 4096 - protein, 584 aa, Dialister succinatiphilus YIT 11850
MRTFWLFVGPIVTGIWYYLLFVAAWVLWYLKFKKNYNIKKKQIKELSTLLDGYEEKSLNDMGVFENFKASMKESSFASLWKQYETSLIYLGPDTEGKFKIYSTDNADCYFNSETLSHGLMLGFWKNLAGIFTAIGILGTFLGLTAGLYGININSKDLEVLSSGIQNLFQGLSTAFLTSVVGIICAIIYNICYSRLMRDYNQMINEVASKLDSIFTHKNTEQILADSLIESKQQTEQMKLFSTQLVTAISESLDTSFQEQLVPVFDELRKSIDKLNSSGADALAGSIDEKTGKQLASFAATLDKLQQSMNLAFEKSAKQNEDNARQLNEAVKALTDASNTANRSILEHAGQAANTMGNALTGAAASISKTGNELSTVSSSMKKSLEETLSMVHDDMERHEAALKTMVESLQTTISRNKELINSAGDAASKFADASRPMAQVSEQIGQSLDKAIDVQQSISKELNRQAGTIQTASVANANAVKEVNDALKHIETSWKAYENNFKGVSDGLQKTFEILNKGINGYNDATNRALIKNLSAFDSSINTALSGIQDLNQDLAESVEDLNKFINSNFAGKNPLHPLKVQAL

SEQ ID NO: 4097 - protein, 222 aa, Dialister succinatiphilus YIT 11850
MKRFRMKSSQEADGDAFSTSLSDLMAGLLGVFVLALAYFMLNVGDIQNQYTGNTEKRNAMLKEIKAEMKQYDVDIQIVEDQGIIRIPAGVLFESGEADINGEGAEHINELSQVLYRVLQEDTYKNSVDTIFIEGHTDSDPIENHPRYRSNWDLSTERAINTLTKLEEDNESLKQLKNAVGNPIFSCSGYADTRPVTTDEERKAENRRIDLRFTMMPPKESSR

SEQ ID NO: 4098 - protein, 452 aa, Dialister succinatiphilus YIT 11850
METLLETLSKLKESGIILSDYTRLSTKEMFVQPIAINRLIRRLGDISGKPVAGIDVNKLYGKVTAAVKGKNKTIEFSHKEARCFPVLLSMAKDNNEVIRFLLDHIDFQKSASFRRAVNAYFNIYADNNMAVSSLGKKIRAALAKNHDLIHAVPYLRGHENFLSEKGPYYLADYITEGVLAFFKDNPLFPNFFPWTLFTKKSIILASIKNSQNDTQEMNLFREIAHTDSYKNLVPRLAENAIFAVDKGNDIHYRNELLFELNKAMGDPRDDNQAYHWADVNPKAVEIYLYWRKRTDLDLFFNIISQTTVRDVSADKMWIYRKRFWEKYLRDMKYTRVVLGPEAEKIANRLYRSKIPSYARLERCSPLQSLFLCSIGNYVFLEVSHNGSVRVYRMGEAPIPFFEKAGYRRTYSYTDVTQANYVYKKAHLHSETDSWQSALRRWIFEHCRANGMY

SEQ ID NO: 4099 - protein, 1088 aa, Dialister succinatiphilus YIT 11850
MNTSWKVTESGYSFQKTDSVDKEKWEWLTGELEMLYSEGKALYLDSCYVIPHDTASSFSEGKRHLLGLPPVFPYDIYVTSNGRIGTSGFSFTITYRDKNNEPIINPVIIGSYIEIHKVGTGMSFMFNHAQYDLVREVIHFNKMVEEETDSKELVPLGLEIMAKVKSYIQVADATAEPYIKSTKIMAPDALSVKVESNGDGTYRVMPVLLKKNMSGEYEVNGDSFSRAYNRKFTAQRHYLGEDKVQYVFTKKQKEGLAKVKKLGKVNQETAEIIRKQPQSIFTEDVFNFDINLYSDRVQCIGDYIRKTNPFMLNGLHGHWLPDESVQLEDGEELSDTDELEITRDNVSEIHDSILEAINNQKDSFSYHGTKYLITEKLIDTVDAVFEHANKYANDSKNVPENPGDTIKSTKNILIIKDNTDALEYVNNQGKSKDSDQMTKLLFAGLRPEIRLFPHQIEGVRHLANCWLEGHHGALLADDMGLGKTLQAYSFISGMKKSLKHMESVLIVAPVSLLKNWEDEYQKFVKPDVFDGLCLLYGEHLSNYKKVERIANSEEPILTLDLAGLTENHIILTTYETLRMYQLTFGKMKWSVMIIDEAQKIKNPQSLVSMAVRGMNYDFGIALTGTPVENTWIDLWTIMDFVAPGKMHSQKEFTSHYVKSLQNIIKTGGNADAIEGLGMELRRDLDPLFIRRMKKDVAKSLPQKAVFKVKEIMPPVQKQAYESIIARARLAKRTKGKINPLQIINDLRTSSLFPNLDRMNEGLFLNLSAEDFFMSSARLKRMLYILYAIKRRNEKVIIFVTLRLMQQKLRRELSKLFQIYIPVAINGTVEAESRQKIVDEFNSAQGFQILILSPEAAGVGLNITGANNVIHLSRSWNPAKEDQATDRVYRIGQKRDVNVYIPIAYDSALGEGECFDEKLDKLLDFKRSLSDVALFPSVETQKDQEYLLGCVFNHEDGPQSISSAESWDMDELDRVNEKTFKSISAKLLRNLGYDVSVANRRGVDLKADRSNGEVLLVRCAQCIYPDKLNIEDIIGIADAVKRKSDIGALVITNSTSIDQHITNYARKMDVQIWNRQTLENLLNMHPVLK

SEQ ID NO: 4100 - protein, 674 aa, Burkholderia diffusa
MNIQSLLAGVPMPALITGAFLAILVVIVVVFFFGPAIRHLLRLRAIQRRIGSFESGDFSSQFEAVFASDRRLAHLWNEYAESLHVQREERDGQMVVCAVRATAPAEVYFNSQVVVDSRLRTEFFKHVPGIFTGIGIIGTFSGLIEGLHAFQVSENAATVRGSLESLMHSVGEAFLVSASAIAAAMLTTLFEKFLLASLYRRTEEIAHAIDASFEAGAGEEYLARLVKASEESASQSKILKDALVKEMGELLRELTSAQIEASKEQHALAAEAGRQNNVALGQVIAESIQQGLKGPLDEIAATVKTASGDQSASAGRMLQDVMTSFSQRLNDLFGGQISGLTELNQQTAQSIQQAVSTLHTLVANIEASSQRSTDAMAQRMAEAIEKIELRQEAMNAQSAAFVEQLRQLVATSQSETNQKLQATLETLSTHVGEMLTTLSGAQKEVFENNRAREHAMSERASGVVTAMSESMDAVVKELGVATTQMAHSVNALTQSTTSSVDRMNAGAEALGTASRNFAAAGERVAGVMGQTADVSTKLAATAGNLTSGAGAIQELLSDYRAHRDSIGQLVTELRATVDAARREAALTGDILNRIEKSTSHLGAAQKQADEYLAGVSQVLAEAHGAFATEVKRTLEKANAEFHTKLTSAVGLLSSAVGELEVTLASMSTLTPARN

SEQ ID NO: 4101 - protein, 236 aa, Burkholderia diffusa
MFGTQIVVKRGSRDEAEKPFWISFADLMTALMVLFLVVMGVALLAVTKNVTEKEKREEQHRKDIELILDRFQTAAKRYDGIKIDRNRHVIDFGDRARFAFGKSNLSPEQEAVLRQFVPEILTLANDDLGKRVLKRVVVEGYTDRTGTYLSNLNLSLQRSERVLCSMFATTGTSVLDEAQKLDVRNLFLVGGYSFNDSKETDEESRRVEMRLEFLGVGEDRSPAPAQSGNFGDCALR

SEQ ID NO: 4102 - protein, 475 aa, Burkholderia diffusa
MEDRPRLQHILDSVDGYITKTASYRRCYQGLAKSYFSFDIDACGVASSGRKNWLTLRDYLHDRNPKIRDSGSSPSWVDTAIENRQLFDESPCTRYVGELLEGDTSRIDHICEQLQIGKESWFLRQLVLTQVEGATKLDDDEFVRLLPRLLGLLAHNEVLRDRGTILVLDRYAEVSGTPLHPRLRDHAVAWWGNPWLPSNATRWGGVEPAARAMVSDWLKLEFIETFFTKLAEDGLADRRRMEFWKRYVKSIDDIEFALGSTARNSREPDLVALRKRMKGLTRELDASGANNAFIMTMGKLVAVEFSGLGNAFYGYDASRSLPFNTSETLRLGKNERNSLKQSKSMLWLKHGDGIHGWNRWEEMFEATLRESFQILPSAETLRASGRATATNEPTKSTSNVSSRENVGSSQNRTAAHESYSHVALKRFAATYGLQIEDRTALGGNLWVRGGEGDERVGRVLMEWGFRVKPGKGWWK

SEQ ID NO: 4103 - protein, 1250 aa, Burkholderia diffusa
MFKLFKQAKARDVITWKRHWSDKGIVLTRRTQSPGATVDGDLVGGYLTQLTDDGLVSPVEDEFLLDWQSLYDILEQPDYGQLRDVLRIPPFTEFRQHLRSNHSLTDHEFSIAIDGWRIDGGREFRGTITGPVMLEGAVEMLMRPAQWKLFNAVIAFSRRGDEDHSDLANRQGWGRIRKLAVDAEARLDDFLYRSVVLSPEKLNIGLRRSVAVVDDHVVEIEPSFDGAPDDWLDTFDRAREVRDRYDITTQDGIVQVLVTPKVKTVLREIRRLPGRRVAGSRAQAFLLNPFAALGADAIDVIEESQFERAREDAGLDYERFVPTFERNAAGYPVRIGLLIESAVASGPTSSKTHWLDDDELSTFVSALSRSLALGHQLLAWQGYDLALQGDSEQQLKELSAALAQRRHPPTLVSYAQVHDLGGYSARIESIGVEKPYHSPYIAKKDEGEGWFPDNLLPVIVYQSKDGGEPVAVPTNKLAIEKLKNDVQVADAKGMVQLDVPWLKDPISLADAKEIISTFESVFSDLESGKQFDPENARKRPSESVTKKQLVLRANIQALEYEELRREALQAVPARPKLPKSIRPEFSLLPHQQAGLAWMQHLFSLQTDYQVRGAILADDMGLGKTFQLLALMAWLLERDPTMNPMLVVAPVSLLENWAEEADKFFQPGALPLLTAYGDSLAAFRVPRSQIDQRLQTEDGLVKFLKPNWIGDAKVVLTTYETLRDLEFSFAAQKWSLMVCDEAQRIKNPAAMVTRAAKKQNVAFRIACTGTPVENTLADMWCLFDYVQPGLLGALNDFGERYRKPIEAKTDEEKARVEELRARISPQILRRLKTEVDTGLPPKIVVEDCRRLSISGVQRNLYAKAVDGFKRRQEPNHTTPFKNHLGLLHYLRLVCTDPRVHGLSVFKPEPLGDYRAKSPKLNWLLGQLSEIRAKGEKAIVFCEFREIQRLLQHYIEAEFGYRPDIINGDTSASSSHVASRQKRIKAFQDTPGFGVLVLSPVAVGFGVNIQAANHVIHYSRTWNPAKEDQATDRAYRINQTKPVYVYYPTVWADDFMTFDVKLDQLLAHKRGLSEDMLNGAGDVAPSDFNLTDVVPHSQSDGLDERITLDMAQRMGWQHFECLVGALWSKRGYSCYRTPGTNDNGVDIVAIDGNRGQLIQAKSSGIDGTKLGWDAVKEVVAGEAFYRRRHPNVSFEKVCVTNQFFNAQAKENAHLNSVELVDQKHLGDLLQAHETTMLEVERMLFVEWQSADV

SEQ ID NO: 4104 - protein, 648 aa, Geobacillus sp. G11MC16
MYTFFESFFSLINKVGNKGFTDLFLYFQLALFLAMAIWQFVRIQREIAVMNQLKPKLLELNRSANGTAYEIDQAINELFVQVKKSKYKELWERYYNRVSQKNEDERINVEPFFGFDVMHHHMGYRTLMDMGAGIHVSLGVLGTFVGLSVGLSELHINDTEALRSGIGSLLDGMKVAFYTSVWGVLLSLMWTMFDRWISSTLDRNIDWHSERLDFLLSTDDEELFLNRLEKLSRNQADHLKTLLTDALEKAMQPIALSLQQSHGNLQQAFSQLHDQFAQLHEGMETQAKLLESQIELTKNTSADVTSRLVDEITGGTQQSIGRFSEFVQQSQVWQTEMIKTIEVFVSRFAHTEERQAMTLERTEKMFAQFEKMAVELELMKESYQKTSGMMNRLGETFQRLQELTKDQLPVQQEVMRSNQLLAQKYDDLSERFTRFNAQIETQYSQLLEQLVHATSSLSASFQTMANRFDESLRIQKESLHDSQQLLGDVQSAVAALSPLVSELRETFDHVRELKEQLLEMQEAQKQLLPELVQLRTQTKESVEETLRTTKVYMQEMTEQIGMLQENWTTTKEQLTKITEALHLSMKDFAENIDSGLSKTYQHFDETLTKAVQEVSGLVYQFSEVQSDFIDNLEDLVDHFDKWKAGASS

SEQ ID NO: 4105 - protein, 223 aa, Geobacillus sp. G11MC16; identical to SEQ ID NO: 3684

SEQ ID NO: 4106 - protein, 426 aa, Geobacillus sp. G11MC16; identical to SEQ ID NO: 3685

SEQ ID NO: 4107 - protein, 874 aa, Geobacillus sp. G11MC16; identical to SEQ ID NO: 3686

SEQ ID NO: 4108 - protein, 656 aa, Halomonas chromatireducens
MSDWFWLGMMAIMIIAIISLSHYYIKYRKSVRLVESLIKDQTREELAWKRQEILEKAQSSRVKAGKLWEEFDESLVYSPDRDKLYNTLDADHFFNGRTLAYGLTSSRLLAATPTFLTAIGVLGTFIGLTIGLRGLQVDADDVDTLRVGIASMINGAAIAFLTSVWGIGLSLLLNVIEKLVERSALRRINKLQHTIDFLYQRMPAEHSLIHIAESSQASKEALQELHERIGDRLQETVSGMSEAMQEAISDSLNNVMAPAIQALVDNASNQSNEVLEKLVSNFMEGMKTAGSEQTKALGTAAEEVNQAVSSMSTRMDELFTKLTEQQQKSGEHVETTSRELSEHLGRQRETAMDQQSALAEKFESFMERMTESMDTQFHQASERDEQRKRAHEESLQKISEDQAAALERQVASAEERDQVRAAQFDEQQKAIEERFSGLVEKLVNEQQELMRQVGEASRSANQHLTGISSQYEKLSTSLSEVASSAERSSQNMTNSSTQLGTLSANLHKATVLLDERVSAVTESLEQVSTRNSEVLSGISEHARTLANMQEAISDAARQLDSAAKFANEGFSELGSRNDEFIRKLREEFTRLGDSLSEQVENIEKQAEEWLKAYSQEVREQVSERMEAWNTNTISFADQMKRTVTAISGVVDDLERR

SEQ ID NO: 4109 - protein, 254 aa, Halomonas chromatireducens
MSFHRRGKSQVDEENPYWMSFADIMSVLLIIFILASVVLIVQLMEIREQLEEQQQEFTEEIQMLRQAEEVRRTILHEAAEELQRRGIRVSVSENDTVLSIPNDILGFETAEFDLGPQYQDTATQIGNVLAGVILQDDRVDYLDTVFVEGHTDNRPYQGMMGKGNWGLSAFRAISLWQHWLEVLPEGRRLDSLINQDGHPIFSVSGYAETRPVTEFQDTDAELRANRRIDIRFTIRRPTVEDYRAVQDAFAGDSQ

SEQ ID NO: 4110 - protein, 570 aa, Halomonas chromatireducens
MAEGKLLDVVRSRNFGVLPALLQKRVAVRALTQLWLDDSDVLKRLMSPRLLEIMVDAQQPRLGRVPLLNMLQLYFQEFDRLDRYSSENDDSLREVFEGLLVDQIQKVEIQGEELTADDLISVVKQKGDWILKIDGPAQLVKLAIKNGMTLEDALFKFGLKGFDSGRYADVCRAHYYIEKLHEIDEQEWSPVFDELLHHDVSKAPYGNHGKRIGHAALEVLIDRVMEASEAWQDFMLSLAGDPRVSSRVKSYREWWAPLGEQRVEKVRGWFAKQDLRLFLQALEQYGETTDNAELKRMFPARKTFLEGLFRLKMIKNTRLMLGSKAEYSVRKILKNELKVNYIKLDGQLSDKAVIYLDCGDFYLIEGSHSFKLWVYLAPPSHKHLSYEVASLSHFDLTNMVPKAYKKENPSLEYTSIVHSPSTWQNKVFEFLAENGISLDVEALLSKEDYRRYVARFGLPVVRPAKRHVVRPSREASSDAGADRKESHSNDSRAHNVLSPLAIQILLYLHRHPDSKARDISRHLGLPLKAINHVLYLDLKGYCMQVSNFNWINSGEGERVLKNSGVMGDEE

SEQ ID NO: 4111 - protein, 745 aa, Alishewanella jeotgali KCTC 22429
MSMDSKIDTTNYSLIKLWPEFSRLWAGDFTSAEGLSAAFVAALFALAIIFSVMSLVNYIRASRHLSFYKRLLKGLTVEQLLDKRRELINTALQNQTYGRLWREFDESLVHIPQKQRLCNTLDAAHFFNTHTISRGLTENRLLAAVPGFLTAIGVIGTFAGLQLGLGPLGALDPANAKVDDLTHGIFGMIGGASIAFMTSVWGVLISVLFNFFEKCLERNIRSAISSFQNEVDYLYPRITAEQSLSNIEDFTRQSNESLAALDEKIGHKMQEAMKEASNVISASVADSLNTILGPAIERLVNNAHSGSEKALESLLDRFLQGIGSAGNSQKAMMEQAAKDIAAASTGMTEGLNQFTAKLDGQVNNLMQRNAEVLNQVNSSVQQQLEAQTKQEQQRQQQLNTNLNEFMQSMKMQLSALAEQNATTLKSVQAAFSEQMAEQQGREAARQQLLQQQQVAQQEQEKQRQEQLTVNLANFMGSMKAQLAELAEQNASTLKNVQGELSGQVEAQQNRDAVRQKQLQDQLSVFQAAQERVTQGIDNVLAVQQQQNTELLSGLRAVIDRFEALSGSHQNATSAMQMVSSELKAGSNQLGLLSSNLKAAIDTFGQQLSAALEHADEVTKNNVESAEMFKDVVAGLNRAGDQITQASSTLNEASGKAENGLTAVDKHFNALSQSLQTHLAEVQRQVADLLTSYSDRVKDQTVARLNVWNEHTAAYIGAMTNAVSALNSVVDEIDGKVSRRHEGTAV

SEQ ID NO: 4112 - protein, 263 aa, Alishewanella jeotgali KCTC 22429
MRGLNSRGSSHQVDEENPYWISFSDIMAGLLVIFVLAAVALILELTQKSEQWDEAIREIAKAEQVRKDLLREIEQELNAMNIPVKISDNDTVLRIPEDVLTFAQGRFDIPDDARSQQNALDIGRVLFNSITKEERWKYLDTIFVEGHTDPVPFRNNAIKGNWGLSTFRAISVWNYWNEAMAENYRLDALTNHVGKPLFSVSGFAETRPIPCSLGSTEVADSSICPDGVMTAEESHSKNRRIDIRFTVRRPALEEYQAVKQVIN

SEQ ID NO: 4113 - protein, 495 aa, Alishewanella jeotgali KCTC 22429
MRLPDLTFELPDWKASDFTRIHDAEKKVKQIGRKAGTGSDSFHKACLKLLNIVLQKQPEKLVSNITSSVDVRAFTFLLGVSEEFIRQFSLTRAQLDVLIAPRDPISKLSLLQLIRAYFVRYDSIANTQVLADWRALICSQLSQLKLSAALSDLASYVKHAAVLFSASGPAQVVAFARNKQSDLDGVLRELGLNAFSHGRFLTLCRYQYYLETLKTIPVGAEHDILSEVVKSEVINAPIDDSHLLGHAVLEILIDRAAGSPISPAWQSVILSIAGDPRVPTSSPNYQKWWVLLGEQRIGLMRGWLSRFDLALFLKVLEQSARDGSIGDMERMFEPRKQFMEGLLEQGLVSQSRLFLSRHAEHYLRKSFKKEELPEYALVDSPETSMIYLNLAGKVHMIEGSHSFKLKLLDTLPSQFKLLDYSKRLYFDYEFRSKIVRIYTEEFGKRRGIAELTHDVHLNWQHNAIQFLSEQGISVSAYELIGAARYREYKSKFGVS

SEQ ID NO: 4114 - protein, 986 aa, Alishewanella jeotgali KCTC 22429
MLHWRIDPVEGVDFIIERKALADEEGYAIRNPYFGMQLAYLKGMLEQNKAVRNADGFTILSQDIVGLGEDFITLFDFPDFYPGSFNTRFEGNTGKAAFNVALELMLPGGDSVPRFTVFGPLLKLADNEMYMLQPAEWRALQALKFHQGLAADKRGEYENNWLVFQLQLAKRAGMKINLAHFENLEVFQPEKVGVAVDTLPNGDLILTPSFGSGVNIDDIHNRLGQVGSDDKQCILRVKNKFVLLDEQRLEATKEILTNRRIPKAQVASFLKSPTAYLNAALIDLDTGFSLRVHGAEKFCQRYFGDVEKSGVNWFGNTDDIVEPVEKLTTIIDDQQKLDEVRALFSDAQKTGADMIDVDGCTIDVSDKPKVQSTLDDIQLAIDEGRLTPKPAEQGLTDEEIVTTTERAVVAIDSNDDSIEYSKDSRVTGLDLSQITFTSENLQRLPFPHQDEGVRWLLAHLEQIKSTGEPSGAMLADDMGLGKTYMTLVAIAEWYRRCNQLNEPQKPVLIVAPLSLIENWQAEVAVTFNQSPFSDIVVLQAGGDLSRFRLEGAGRETLQEFVDDDLIQDADSIRYALKIGKVYGSDRLDLPRRLVLTTYQTLRDYQFSLSRVDWSIAAFDEAQNLKNPNALSTRAAKGLKADFKLLATGTPVENTLKDFWCLFDTAVPGLLGAWQAFRKDFIAPILSASTEQVNQVRVDVGRELRKKVGDYMLRRTKAEKLKGLPEKRIFSGDAGADEGSYLPVLSAVMSGPQLAYYDDIIASVKSCKPEEKRMVILPSLRKLKVASIHHEIDAKAAIPKVSNELLKQAQLSVKLQSLVAILKEIEKRAEKVLVFAETKAVQAYICALVTSIFKVQVEIINGDTQAVATKYETHTRKAIIDRFQTAAGFGVIVMSPVAAGVGLTVVGANNVIHVERHWNPAKEAQATDRVYRIGQTRDVNVYIPMALHPKLRSFDQHLNGLLANKVDLSDAVVANPTIEPSDLAGCF

SEQ ID NO: 4115 - protein, 729 aa, Brenneria sp. EniD312
MSWLNSLLVTLTSVEPHWVPVTVIGLVSFAVVCFIYFYLIRAIRIVNGLKKYTQSIISIENNAPEAQLEHLKNLFQRPGLRHAWNEFEESLHPQRELSNGEEKILRIRATAPSASFFSEQQLIDIPLNTEFFKHLPGILTGVGIIGTFYGLMIGLNHFDPSTPEQVTSSVNNLLHDVLYAFLGSAFAIFASILVTWLEKLCIAKCYKYLEKFTAALDSLYDSGVGEEYLASLVKSSNESATQARHLKESLVTDLRDMLLQLTENQKAENERLANTLSTTYRESGAQFAEQVSGAIENSLKSPLDKIAGAVQTASGDQSGMVQNMLQDVLTAFMAKLDTTFGQQFTNLNEMMGQTVGAIQTMQNGFATLLQDMRQVSDDSRQGSAQLIEQLLSEMKSGQQAMQAGMNDMLTSLQASVAKIGAEGEGAGERMARQLEKMFADSEAREKAQAEHMAAFIEAIQNSVQQGQSATMEKMAASVEALGEQLGSLFGQIDKGQQQISANQQANQQSLHEQTQRVMSEVDDQIKQLIETVASQHQGTTETLRLFAEQTNRQIQDMQNGADKMRVAAERFEHAGDRVSEANHLTADVLNKAQSAGSSLSLATSELTSVVADYRNNREVVSKSIAMLELLAANTQSEQTTRNQFIADLKQHGERLQSYNREAQAFMENVSDVLGKGFEDFSEGVSRSLDKTLGKLDVEMAKASNLLAGSVEQIGESVSELDDVLSRVRA

SEQ ID NO: 4116 - protein, 246 aa, Brenneria sp. EniD312
MFGNAFGVKKRRSDEAEKPFWISYADLMTAMMVLFLVVMVASLSSVTQRIQRVEQGEKTRGQDISKLCERLELHARNVNKTIVVDCHDNRISFGEAGRFDHNRFFLNAEGQKALQDVVPLVLEAADSEEGKKWFKQIVIEGFTDTDGSYLYNLHLSLQRSEWVMCSLLDSRSPLQKGLSAEQQIQIRKLFLAGGVSFNNAKESKEASRRVELRMQFFGLKDKRDKADEVDFPLVVNKEVCQLVMPQ

SEQ ID NO: 4117 - protein, 560 aa, Brenneria sp. EniD312
MTPALNSLSQRIAARLSSSQRDDHYLRNDFHKLASAALDMEKRFDKAERIPLPPQEMRLAALRRLRLAEELTEREWRMVFYGLADNDPSYPDQPILLEDDVFFPEVDNAIKTRLESNALKRKDWAALCSSYFAYQHESPETNPHWCVLRGHIAQGYFVVKAAIRREKSWMKTIEFYHDIFTPQAGGVISTQLLSGERNSLSALEKIAQIPDSSWLWKRIFTVLLAQLDTLDDPLFLDKLSWLLGLAAQWVRFRDDIMTATLTRYYHSIYRDQAHSALKQAALEYWDNPQLKSQQNKWHQYVAEPVAAMVRGWLAKQDLTHFFELLRGNGDVDQARLHYWLRFANQMGFTRIVMGTDAWQDRGSDFVKFRDENKGRLSYLRGGRSFDNAMIMQINDYLFVEFSGTGNAMYAYRIGHAPFNPESRTLDINIHLKDQGRCVLRMPHAPRAKGYNKVRITGWMLKYDDELRKLGIRWMAEEPVKFVDKKTAPPASLSAIKIINPLRDTAIQRLVEGTSCVVSDNRQKGGVLAVQLNTPDDTIERELLRLGFAPVAKEPHRYWIK

SEQ ID NO: 4118 - protein, 1083 aa, Brenneria sp. EniD312
MLKRLLSKLTGNRQQIERHLKNKYQVEENGLSFPLSLVDDSQLWALASWLEQLAEEDYLISLTDRWLLSWDALYRLLEDEEHASSLPLIGVPEILPLRASLSSRGALSDRDFRVWIAEWVTLPARKPIRFSRTGAILTHENQQHLVSRENWALLQATEQLSAQQNQIPGETTNQLGWAAIRKCAKQAAAKFDDYLEKTHVVKPTSLSLRLRKSTVADTAVIEIEPHFEDQPANWLDSFDKNSQVHDSYRIPGENGELSHVIIPPEVKEVLNSIHSIPGRRVAGSEALSFVRNPYTFLGEDAANVIAPEEHEQALFDARIFFHHFRLIPQQNAENKIEEVTLVLEPVSPVPQPEVTFVFSAPWELEKFIQQLGISVAAQMPAGSWQGYELELSQFTEQQWLDCQALLTRWQQEIEGKEFSDVLDIEKYGDRVIGIGEFEKISSPWLTKAQSENWLPDDIDFSAFSVETLAGWQPENLHHFGELQESIAQAEAAGETHITTPWNDSELPLDAAKTFSKNWEKQQSAENESQDKVVDKAARAVLKIEQNIEEAAYIKQRRDSLLNARHAEPEIPLSLKEHIRLKDHQREGVAWLQQLFLSSPEETAGCLLADDMGLGKTLQILSFLVWFIEKFPQEPPSLIVAPVSLLDNWERELDNFFYTAGIPVLKLYGETIKAVKYPKQAIPAHLQFQGIKNLLKPGWQGEAKIILTTYETLRDQEFSLARQPWSIMVCDEAQKIKNPAALITHAANAVQARFKVACTGTPVENTLVDLWSLFDFAQPGLLGSLNEFGKHYVRPIENDAGRDTERLERLRALIEPQTLRRTKEEVARDLPQKIEVESCKQLTLSGVQKQLYLSSVANWQQQQALSEGMQQAGAGMLGLLHRLKLICAHPAVVNPEPRFRDNSPKLNWLLKILEEIKHTTQDKVIIFTELRDLQRELQHAIYQKFGFRPVIINGDTSTKSSSQNSRQRLIDDFQSQSGFGVIILSTVAVGFGVNVQKANHVIHFTRCWNPAKEDQATDRAYRIGQTKDVYVYYPTVRDTEITTFEETLDDLLQRRRALARDMLCATPDLSGADFEVLLKGGVDV

SEQ ID NO: 4119 - protein, 660 aa, Thiocapsa sp. KS1
MTVDLDLLLEAPPALLGTGSVLVFLVVVFVLFFLLPGLGLRFRLSSVLGRLRRKKPTTLSDLQTVFSVNKKLTHLWNEFRDTLHAQHEEQDGQLVTVALRATAPAESFFNGQYIVDSRLRTEFFKHLPGILTGIGIIGTFLGLITGLQAFKVSEDAGQVRESLEFLLGGVFEAFLVSASAITLAMVVTLLEKLLLASLYRCTEEIAQYLDSVFVAGAGEEYLARLVAASEDTASQSKILKDALVGDLKVILQEMTERQIAAATANSESMGRQIAGSIENSLQGPLQQIGGVVAKASGDQSAVAADLLKDIMASFSQRLNDLFGGQISGIQELNQKSAESMQEAVASINQLVAKLADNSQRSGDAMAERMAAAVEDMERRQADINQQTQSFVEAIREMVASSQTETNAQLNASVSELSRQVTDMVGALQAQAVKSHEEQQRREQSLSERTSGMVTALGDSIGEVVKQMATSTSQMQQSVASLERTTATSIDKLNAGARTLEQGAIAFATAGDKVTGALDQASTVANKMTEVSGALTSSALALQSILADYGANRDATNTMLVELRAVVDAARREASMTQRVLDDIQTAATKLAGAQKDTELYLEGVSNILAQAQSTFNDGLTRTLDRANSDFHNKLSSAVGLLSSSIEELEASLAGATGSRR

SEQ ID NO: 4120 - protein, 242 aa, Thiocapsa sp. KS1
MFSMRSTARARPRDEAEKPFWISYADLMTALMVLFLVVMSVALLAVTKTVTEREQEEENHRQDIEELLDRFEAVTNQEQFAGITIDRESNVIDFGSRAQFPFARSTLTTEQQTLLRAFVPAILEKANDELGRRVLKEIVVDGFTDKTGTYLANLDLSLQRSQRVLCALFARPTPEERPMSPEELEQVRRLFVVGGYSFNAAKDTDEQSRRVEMRLRFLGVRETRTPAIDVAPGNFGTCALGG

SEQ ID NO: 4121 - protein, 576 aa, Thiocapsa sp. KS1
MMKALERLRFSLETGSAPALSRPWAIEHDLDNHIARLEKHLKEGASTHIPRDLQLEAVQHFWTSQRVETLKDARLVSFGIALPVGPRRLRVIEDEERFPALLDGVDRYLPAPRQYRRCYQGLLSGYFTYDPHGNDVPRTGRKNWDSLREYLNNRSKRVVDGERNPQWVDSLQQHTAIFSDTPCARYGAALLAGNKSEVDELREVLNISDSSWFMRELFLAQVEAAVQRNDPDFLEILYRVLDLLKENEIIRDDGLALVLNRFARLMPPPLALPLRDAAVNWWGNPWLQSNSMRWGRATSDARAMVTEWLKLEFIEAFFTLLAEEKSGDSRRLAFWKRYVHAIEDIHFGLGSDARNSKASDFVALRKKMNGLIVPLNDPIGSNNAFIMRMGRVVIVEFSGYSNACYGYDATESLPFKYDRPVVMPVNAKNSLKHSTRKLWLTHKDGRHGRKWEEKFEETLANDYKIRPLSASVQREVLGGRSEHVVEHVPRPPAQPPTDRDGRLDPVAEVASWKTVKYTRETLSRFARAFDLGIDDLTDKNGNLWVRADDAHIGVNEVLLAWGFEFKNAQKGWWKAR

SEQ ID NO: 4122 - protein, 1249 aa, Thiocapsa sp. KS1
MLRVFKKNRKHSEVAWYLRETEEGIDIGGHPEPDSRPLKSALLGSWLDQLEEEGHALPGVDGRLFIPWDTLYTLLEHHEHAEAVPMLELPSVGTVHVAISSKASLEDASFSLAIGDWRVESKPVRNASLRGAVLEHADGRVLLPAATWAVVRDVRAFARRPDTERNGHFHRHAWGRIRRLAGAASANLDSFLHKTVILTPEKLALGIRKARTDDDTVIEVQPTFDGAPPNWLERFDRQSIVQERYDIPTEAGIVQVIVSPKVRTVLEEIKRLDNRRVAGARAQAFILNPYAALGEDANDVIDEKQFEDARAKAGLNYERFLPQIKRDELGYPLQVGLLIETTSAGGAIASESVWLDDSELAAFIQALKSALAKSYQLLGWNGYDLELQGDAAEHLDQLETALAERRHPHVLITYEQVYDLTHYASRVQGIGFEKPYYSPYIAKKKEEEGWFPENIVNIISWVPEGETDPVAMPIGPDAMAEMRQKIAVAKAAGKSEIHLPGCPKPMPVAEAERIALTFDEVYADAQAKELDPEQPKTPRSGNQIKRKSPVVFSNIQGIDYAEERRAALSANGREPELPSSLRSDCTLLAHQRQGVAWLQTLFEAHRNYNCRGAVLADDMGLGKTLQLLTLMAWAIEKDPTVDPMLVVAPVSLLENWKDEAKKFFESGALPILTAYGEDLAALRVPRESIDERLRNEDGLWKFLKPGWLGNARIVMTTYETLRDLEFSFASQRWSVMICDEAQKIKNPSAMVTRAAKKQNVAFKIACTGTPVENTLADVWCLFDYVQPGLLGALNAFGQRYRRPIEARTDEERTRVEELRTLIAPQILRRTKAEVATDLPKKITVNSCRRLPLSSDQRDLYGSAIELFKRRNDPGAIVPFKNHLGLLHYLRLICTDPRRHGLGVFKPEILEEYRKRAPKLDWLLNELKDIRKKDEKVIIFCEFRNIQRLLQHYIAEACGVRPDIINGDTSPSASHAQSRQKRIRTFQEKRGFGVIILSPGAVGFGVNIQAANHVVHYTRTWNPAKEDQATDRAYRIGQTKDVYVYYPVVHADDFVTFDEKLDRLLEEKRLLAGDMLNGSGELHPGAFDLEDVAPPDAHLNEEPVTLDTAMAMKWEYFEALAVVLYAKRGYDAYRTPGTKDNGVDVVALPRTQTSGKLVQAKTSGIEGKALAWDAVKEVVAGHAFYAKQYPAFNFELICLTNQYFDQQAHLNAKLNNVELVERPQLAEMLSQTPVTMMDVERMLFTDWTQT

SEQ ID NO: 4123 - protein, 706 aa, Phascolarctobacterium succinatutens YIT 12067
MIKSFLSAVGLSLNSFTIILTIGIVVVMLVVMYRYWKNFYKKQDLIIISINDTLEKIGKLEIKNASDNYEDIKNIFIKSDLLKSAWLGYKKNHFFMKDINGKTVVFTTDDADNYFNYNNLTSQYNAMFWQNLGGVFTGLGILGTFVGLSVGLGTINLEHITNEEIGNLVSGMSTAFITSLCGIVFALFYNWIHKHITDKLSQAITNLSNELESLFVARNGEQLLAMSYANSLEQATQFKAFSTNLAVSIGNALEEKLSSSSFADNIKNMDSTLAQVNSFMSEELPSVISDAIGEQIKENLVPVFVSLQNAIETLSSSGQSAIADGIKSGASKELTAFADTLQQMNTNLQAVMAQMQETSGSVNSDLTSAINRVVDRLESQGENLQGVGNQVAKDLQDTVAALVNEMGKQQSGMINTSEKINDDLKASISTMVESIQISIASMVEETKKQQGNMQNSANSITSNLEAKVSAMLAGFEKQLAAIEQQTHNQSNTLSETSTQLSNSFAGSMNSVKMDIKGIMDDYAAKNKAENEETINFIRQVKAGLAEQQSLLAKITTQVDMLMTRAANTADKFTQAAGPINDAGKELGKHMDAVLNATNNYNQVVKQCVSELHATAQQNTSNMRDISQEIARVKETLAQTSNQYSGVNNELNKILGTVSDNLMKYNQSVRQQYIDSLNAYSDKLASAYGQLARLIEELQEAIDDFKN

SEQ ID NO: 4124 - protein, 244 aa, Phascolarctobacterium succinatutens YIT 12067
MKNKKGLSPATSDTFNLSISDLMAGLLAIFILILSWQILTYTNMKSDFADKSYERVALLNEIHKELNNRGIMVEINKTHDVLRLHDKALKFLPGRAKPEAGEENVQQISEVLYTVLNKDRGDKPKYKELVETIFIEGHTDSDLPSFRSDYPDNWMLSTARAVRTWEMMSAFRPDGATQTLGEIKNHNGFPIFSCSGYADTRRIVENETSKEEKSINRRIDIRFVMVPPKGDSSIKKEVKDLLSK

SEQ ID NO: 4125 - protein, 461 aa, Phascolarctobacterium succinatutens YIT 12067
MSNILDTARQLNAIKADFEMVLKLNLPEPLHLNRLLKKLNAAEAEHNDEKIEGIAELWKTVLSAFKAGRVITMALRDKKKFPFLLGLAANRNSQLYGLLLEEIKSVNSAILLKREIFVYFNEYSNIKHITDLRVDIVKKLRAYKKNDTFLLCMKRNSFIFNPTSIDFVQKKCISEGVFEYFDSLHFSRSLMYSNYVTQVIKGLFGMSNTTVSLKGKLDLFTKIYGRLENAFVELLPIIFASLITQIEAHNGSEREHYKEIIRPKALAFMGDPRLGIGYFGRWSIAGEKATDIFITWLSQYDLDAFFKVIGDSLTDYTARNMWMYRERFWKSYKKHIQMVWVCYGTSAKHLAKRANMTSGNYSAFGQGNKSCILIVIGDYIFVERSHNGTLKVWKRNLSPFKIGEPNISEAKLNNSTGITHLENGIPKDGWVHSSSDTYNWQKKVGSFIAQYMHVIKTVKDW

SEQ ID NO: 4126 - protein, 1109 aa, Phascolarctobacterium succinatutens YIT 12067
MFWEVKDDGFEFNCSEGEAAQVSKIEEMFSEGKASIIGEDCYIVSHEHIAALSTNERALLDLPEIFPYRLRISANGALVDRSLRYIVDFVKPNGNSFINPTVTGAHIRISADLQYTFNIGQYLVVKKVEESNKKLASTDEVEDLTRYNFLNFADIKEVAEEIDAELDSYLKQNKVVVPKRLSILPHFEKNGDVIIAPIIMGENGEEIPFNGDFQKSFDARDNVKTVYNGTGVFYVIKPEVEEALKEIKAKHRIPKKKAKDFLKSPGSVFFSPVFDFNLADYSDRVIEIGEYKYKTESNGKSGIDWLPPEGTAFNSGNEVKNLEITLENVDEIAALVYDARNENIDFIVYQGEKYIITAKLISEIENYLEIKAKNKAGDDESKGVNHPEGDDGKDTTGDGSEKKSGANTATGSNGSDGDDAGTKVKPKKNGKRVLLIKDNFSHISYNAEIDTVEEIDIAEVDNCLNNGITLLNHQKQGLEWLVNCYANYKGALLADDMGLGKTLQTLAFIALTRKHLAKDKNHSVLIVAPVSLLANWQEEYSKFLKADTFEGVVMLDSETIKEYRKGESYSLKSIAKDHLVLTSYETLRIHQFAFGKIDWGVMVLDEAQKIKNPTALITLASKAMKYNFGLCLTGTPVENTWVDLWSIMDFAAPGYNLGSLSEFKQNYVNKIKKDNSDKELIKELGHKLNDALNPLFMRRLKSKLSKEGYLPELPQKIIIRKPEIMPVQQKLAYESIVASAMDKSVTTNTALEIIAKLRDISLFPDIGTIDERSISKEDAIKIFNSSARLKVTFSELVNTYYNNEKILIFIESKKMQRILRTVIQDFFKIKVPIPINGDMRGEIRQSIVDTFNESKGFGVLLLSPLAAGMGLNIASANHVIHLSRHWNPAKEDQATDRAYRIGQTKDVQVVIPMALHPVLRLDSFDNKLDELLEFKRQLSEEALFPTADSAEDGKNIFEGITKTFGGINVQTITYDIHAVDAVDGITFEKIIEALYKKAGMLSVRTSESNDNGADVTVFSGSKQPNLLIQCKKTKNYQSNIGKDGVQEIKTALSYYEDIHSCSFKPVVITNAKGFTSGAIDLANANGVQLICRAELTKMLELYPVEKIYI

SEQ ID NO: 4127 - protein, 667 aa, Parabacteroides sp. D25; identical to SEQ ID NO: 3622

SEQ ID NO: 4128 - protein, 231 aa, Parabacteroides sp. D25; identical to SEQ ID NO: 3623

SEQ ID NO: 4129 - protein, 616 aa, Parabacteroides sp. D25; identical to SEQ ID NO: 3624

SEQ ID NO: 4130 - protein, 916 aa, Parabacteroides sp. D25; identical to SEQ ID NO: 4081

SEQ ID NO: 4131 - protein, 671 aa, Prosthecomicrobium hirschii
MFWVIVAAAQFGLSQVMPFSDWQHVADELMRVAAAPDGPGRFDGVSNAHFAFALASGIMQFAVALAVAFFVCHVLFVLLWLRSARKLLGQSADPKIFADGIEAISARLARNGLVGDAWLKFRDTTYERDGVVHSTVRPQVFINVADARERLFGLKMMPAIPGFFVGTGLLLTFIGLLLALHKAAGATDARSAAEMTGSLNALLKAATFKFATSIAGLGASLLLSLIFRAYQIWIEQAFHAFCHAVETRLTYYPAQKAALETIEILKEQRNELKEINSDRFFTRLGETAGNNIGTAIGVAMEPITTRLDNAMAQVVDTSRGGVDELLGRFTESLRGGAGAELGEMARTLGETRAALESIRHDLTGSGSDFARRLNEAAENMARVVAQASQDLGGSASGAAGSVEATMAAVTDRLQGQMTGVAEALAAIQTSMIEQGQAGARRAAEAADAAAEISRQASVEAAAITSEAARETVEAIRSGVGAVIGSLREDIARLSDTLRSVGTAFASQTAEINGVAGRSREAAEAFGRVASDVRTASQPLLAQGERIATSTERMAGAVTASATTLTTTTEAARAVADALTAHFARIDLTWKDYEARFKGVDEDFGRAADRFHEEVSRHQEAMRSFIGDVDQHTKSIAASLGGATDRLAETFEALHETLEDFLERTAQRPAAK

SEQ ID NO: 4132 - protein, 288 aa, Prosthecomicrobium hirschii
MAVEETESSEGENYFVSMTDMMVGMLFIFIILLMSFALVFRDQTDTQQTTTAEQQAKIDQATRLAETLQEIQHKIEVNLEELRQANQLRLKLLREVADLLRRENIVVELTKAGDVLRLTENAIRFDPDKSVLRPDALNNIGKISVVLAQVLPRYAPCAAGALPPSCRGPTEAAIETVFVEGHTDETGNDERNWTLSAERAANTYRELTTRAPGLRDIANRRSEQILSISGYSATRRLDSSGTRDAWAKNRRIDLRFVMDTDPTAGLEEIKALVVQMKLRIDTFKGGEP

SEQ ID NO: 4133 - protein, 467 aa, Prosthecomicrobium hirschii
MSLRQSLAQWRFEARPLRQQSLTADYDLARGSQMASLDKRPREDLSVVAARFLAAIESGRKPAVRDWNRAAWCLWTTMPAIAEDSTGLGAVLERVTGSRRPRPYRQLASVYLAEFAPDRPQLDRIAKSLRNGAEAAGEPWRKLQGRLGVFDGAQAAGRVARVALQSGTSVAAVLRDTGAATLDARAGFVEAGYRAGLQEIASQRPTGAKAWIDRVRTFALDDGGQLAFPQHRAEVARALVMPLASQGLSEADTGLLCGVVLDLFGDPRIRRGDWIGMDDIAAVVKRWLVKASLRQFLDVVDKILEEEQEETQQRQWRYRRAFWYSVYNAGLIDDAYVAFESHGVDIAERAFKDSPFGRLKRGDGQLLRGHSVLLMRIGRSLVADWSHTGTCNIWDDLNASDAPNLHKKEYFANDVRKDRIGNSRKIDLEMNGVYSHDSTINYSWQKRVAEHLFRITGVRIPPEDYKV

SEQ ID NO: 4134 - protein, 1004 aa, Prosthecomicrobium hirschii
MAIRFEARVEPDAVEIRLLKSFLGFGPKPVPRAEWPNAGAPRAVCRALDALLDRGEATATADAVRLPIAAAAALTAEIADAVGLPPLAELGLAVALEGRVETPDGHLRLRWTDKSAREIKPARNGLVLHWGEKSARLSAPLLAVVEAAEAYNKTRGADFEARVAAWMPMQHALARTTGGEVGRDGFLETFTLYQAGAFALEINEGDDFTPLLMARSQALSLDDDAPADDVGPGLRDGGGETDAPAPVGSAGSLLSADDYRAFLGAFAMSGSTRNAYRLHGRNRFVLVDPTLKRALDVVQAKRRASPDERRAFLRNPRAALAEALRGTDETAPTATLFVETEGYSDRVAGLGLWEPPSIPWMTRQPNGWLPESGWTQDGAPVDPRPLSTEELADLERAYEAAEARGDSHMVIRGQSIPIDAAPAVLKSERERTEAANREAGAADGDRPPPSPADPEQAERLVLVIAKTNFEGLDYELLLKPRAACIALVPPGELMGPAPLKAHQVEGFRWLVEAWRTGWPGVLLADDMGLGKTFQALAFMAWRRRNADFALRRGTAAVAQGPVLVVAPTALLRNWEKECAERLTPEALGRLVKAYGRDLADLKLAADRRSDPGETLDRSRLREADWILTTYETLTDHERAFGPIAFSLVLFDEMQKVKAPATLNTKAAKALNADFVVGLTGTPIENRMEDLWCLFDRLTPGYLGDLKSFSKNYSEGDPEKLVALKSLLDQPAGAVPPVMKRRMKADILLGSDALPPKVERVYKTPMPEEQRQAYGDLIAEARRQPDRSPGFMLGVLHGMRGLSLHPQDATSVNVTSADRFEAFARRSARLSKTVEILRDIRARGEKVLVFVEFLAMQDALADGLAALFDLPRRPSIVNGTTPGERRLRIVDDFAATGPGFGVLILSPKAAGVGLNITAANHVVHLSRWWNPAVEDQCNDRCYRIGQTKPVTIHIPLAVHPDHPDAAFDERLHDLLQRKRELSRTMLAPPTSEGDVGELFGATLGR

SEQ ID NO: 4135 - protein, 688 aa, Rhodoplanes sp. Z2-YC6860
MHSVASVISQPAAIYGVVSVLGLWAFISGWSLFVGTSKLAAALARAADLIQRTKDPLEFAVNYEAISMQLGSDAILGSRWREYRDSLLTPSQPNRPVRATSRAGAWFDFGLFRVPGIQVDLRYHAALPNLLVGAGLLFTFIGLAAALGTAGGIVSGVDQSGRNTALQTLLDAASFKFITSLVGLFLSIAYALFRKRRLRTVERALDGFVSTLENRIPLLTPTSLQFEANEHLKRQSTQLETFSTDLAVNLASVFDKAFDDRLGQHIGPLTEAMQRLAGAQGSRNEEAMQSMTDSFLERLHGGAGDHMQGVVTSLRELGVRLESLQTGLGDSAVRMAQSADAMATRMGEGAETALSRVTDQMGGLVETLHMMAERSQSAASEAGSQMALRIEAAAAGFEEAARSVASVLSGAASNLETRMGQHAQVSSARLSEQFQAMIDELRGLAEMSRATGAQAFAALAEKVGSAAAGFETTANRVSETLQGAANKTGSTLEQGAEDVVQRLAAAADGLGSRVSSLTAAADSIAVRIAELNRSAGDAAKPLVTTAEHLRFAGQAAQNAAEPLNQAAGTISRSLDQVAGVAQRLNSAQAASERLIESLNAAVQRFEGVDQELARTLQGLQTGLQGFAREVATVVSQTDQNLAKAATQLGSLVNSLQTSLEDFAMTTTSSTALGKADGDPAVLLTNQRP

SEQ ID NO: 4136 - protein, 481 aa, Rhodoplanes sp. Z2-YC6860
MYTRQALAALQATSRSLSPAKHLPARLASAEAVQLLGATQSAPAEPAEAVLELLRRKLVARFSNAAYDVQISRRDLSNAPWLLWHHQQPLANISGLLEAVYAQSIRSNSTRRNFIEAWVHDFSTEGPAIGKAGAAIRLLLTSTRDPRLEHWRIGDRVASVFDPKAGPCQFANWLLNGPQTVDEIFEMTGFADPFRSVGGFMRVVQQELLKLAEPKLGGEAGEQALARLVACFAPGNQLRFQESQSRGEIARGLLAPWIESEQEPTESVRRGVQAFLLKYVGDPRIHPARWSDAGDQATSLMRRWLTRASLSAFFELIRDHALDSHWRYREAFWTACLDKDETADAWLVFGRNIHASARAIRELNGSYGRLEGSGVSGDHAVMLLKIKNLIFCEWSHNGKLRVWSGDWKDAPRLNLPSYTRADLTANGLPFPPNSRFGSKGAGDGGGLSHIGSDRSYWQGSAAELLARRARISLGPADWLPR

SEQ ID NO: 4137 - protein, 960 aa, Rhodoplanes sp. Z2-YC6860
MTHQFSFAVTPAATEVKLIGPEGPVPTDLWPIETPDPLLRGVDLVQRLIAAGSAIAEGDTLLIEHRAISGLSVNEAASLQLPALTNAVAHVRTSGLITRPEFNAELNWRRPTGQEIVGATRTGAWLKIGDEWQRIPDTLFDITESVDRLNNTSGDDFAARLTSIAALREALPPAAASNNVDTAGLLGEMTIAIADAFSLDLKGEGANAKLVPVLHRAGGDPEEPLLPADKQFAFAEDQFNRFNTARPVYTLGSGWYVVLAPPLRRALAEVRRVQDAPWATKRALIASPRSFLRQVSDAVVEDILLETVFRETTAYADRVVGLGLWSARVLPWIKLGGSDWFGPEAESESEQQRRGSGRESSGGIIVGDQTIPLTIEEAELLRERVESAMGAGRTTVPLNHHETMVQVPATYDTLAALQALEISRTSTRNKSPKDASALPEVLVIRPNEELVEVEGAFNARASIPFAKPDGLATALKQHQVDGLLWLQKAWAIGRPGILLADDMGLGKTIQSLAFLSWLRAGMIAGRIPHAPILIVAPTGLLQNWRAEHDRHLVAPGLGRCIEAYGRSLSAMKSTGSDERPGLSTDSLKSADWVLTTYETLRDYDRDFGRIRFAVILFDEAQKIKTPSVRITDAAKAMNADFRIALTGTPIENRLADLWCITDTIHPAYLGDLKRFSAQYEKTPDLDRLAALKASLDRWQGGRPPILLRRLKEDQLPDLPTRNEQVRELVMPATQFSAYEATIAEARRDRRPGAVLEALLRLRSLSLHPDGQMKCSDEEFISGSARMILGFETLDMIAGRAERALIFLDDLDMQARLVGIIQRRYGLSTTPMVINGRVDGISRQARVDKFQSNTEKFDVMVLSPRAGGVGLTLTSANHVIHLSRWWNPAVEDQCTSRVHRIGQGRSVYVHVPIAKLPDARASFDQNLHALLQRKRKLMKEALMPPAATETDRNDLWQATVA

SEQ ID NO: 4138 - protein, 605 aa, Photobacterium swingsii
MGTNLHDVMNFITSTLFIYVYCGLIVVIAIWCSGSFWFRFSPVKRSLKNALEKTQSTPRNKLEFPEYYYELRDWMHADQYLKDSWREFEETLLLPGEDFDDDKEVIMNTHLPSVYFNQKNLLLPNINMRFYNALPNILTGLGIVGTFIGLTVGISLAAPGLNSNNINDAKEALNILLDGASLAFITSIVGLLTSLLFSTYEKKYIHLFNSSCQKLNSELDARVEYFSAERLASKNLAESQKQSTALQSFANDLAVSLGQVIEQHVTQPMIKAIDELRNDQKSASDETVTKVMGEFADKIAGAAGDEMKAFASTIKTMSDSLESQVESLTKGQEDMQKAAQNAVTNMSDAMSEGSKKINAGIDQAVDALLESVEKSIDNVTLQLDIASQKLADNLKDGLQEFEGILGKLKETATQYQTMTEANRTLYGEISQSIEIIGELSEKANQTNLDFQQTATTFQNYIQSLNRTSTQLSESTTSVDSTLKTLQEVQEEMSDIWKDYEERFSGLDTTLENVFKNVSTGLERYATQTDEYILGLDKHASDVVQSLAAATQEISEAVESLGEALDSRTEIFESSINTIANSAEAKLKGFEVDLRAMARTSFQPEQ

SEQ ID NO: 4139 - protein, 261 aa, Photobacterium swingsii
MSEHHELLEDEGAGYLISVSDMMSGLLLVFIITLVAFIINFQDAIQKQNEVTETRKEVVRKLTNTEQIRNELLQDLKDRLKKEKIDVEIDTRHGVLRLTEKAVLFKTAADTLSERYRNNLRTIGIVLNEVIPCYAENPPSNIACSNLDQTKGKIDAVFIEGHTDNVPMKSSRIKDNWELSANRAIAAYRLVVPNSVLDNLRNISGQPIFSVSGYGEGRPVDGHNHSVPTPDGVNRRIDLRFIMTPPALTEPQRALIAWGAK

SEQ ID NO: 4140 - protein, 468 aa, Photobacterium swingsii
MSLKELLDDFKTIDSRKAPDLSESLFVSEVLKIKNRHGFVTTTKPSQTDIETVYRKLYKFLQYQSPSVSLTRKEWKLVPWAFMLTVNGNPPLFENEEFIPPLFDQIKRKSKFDTVSPFIQVFLQEYPLNSKQFDRLREELHDLISGSNHTKVNTIKQWVNSTGILDERSHELCSQKIIDSGFQSTFSNYRLSKGLEYGGFALASLSRLLKQLESDLGVFDASLQSKITSSCIHFFLTQDDSLKYPSLRINLAEGLLTSFSQHQTNPQIKKILIDFFLHQYGDPRTSKALWLGVNTVAINVMKSWMVENTMHDFFNLLSHVAKTDSMADKHWKYRKRFWNAYLKNGHIQEAWVALGPRAYAEANNFLQGGRNTYAKLSGAQSRHSALIMVVNGVLITEWSHSGSFRLWDSSNKRPKLYQKSYHRESLVNWADHTGAHSGSESGTWQRKLSYLIYSLTGISVSNREYMND

SEQ ID NO: 4141 - protein, 927 aa, Photobacterium swingsii
MTSSAQFTWQKTDTGFLFQVKLDNEILHPNQWSKFRLMAGDTPVVIDPLFRTVNEIIAPSITDSGIACSEGFIAALTELEIQKLCLPPVSHARVKIVAKGLISQPGFQLSYRLMTPEGRPMMGSKVSGISLKVRGQTELILEPLYSIINKLEQFNNVDTSDRDEKFVRWGEIKELLPEESIVDGQLRDITICRADRVTLDIKEHGVFNPLLIKPNTTKDWDVQGQADVEYAIPKARHTQFEDQFKTWSTARSNYAIGNGVYVVLPQRVQKVLGVIKDYQTRDSQERLAFVSNPHKVINEKLNQEDHPEELEAIFVETPDFISQRIDTIGIWSPKLCAYVAKREGDWVPDDDERLFFPIDDLLVNFTIDEMKRLLDEVNKALDAEVPEITFEGQRVPVSLETKNLLIKMLKPFDEPEGPPDTPLDVVAPILKDNIEEVEFEVIKHEARPKITRLPDSLKTKTLYEHQKYGVDWLANHWESGSIGALLADDMGLGKTMQALAFLASVKELMNNNHYPTKPFLIVAPSGLLKNWRDEAKLHVEEDGLGDVFEAFGAQIREIKNYTVIERNSIISGSGWVLTTYETLRDKIKYFLSIEWGVTIFDEAQKIKNPVSRMTEMAKSLSSDFTLILTGTPVENELKDLWCIVDTAQPGLFGSLSQFHNEYAKPAESDPAEAKRLKSLLVEKSTPPLMLRRLKEEHLDGLPQKFIHQVAKMMPEQQAAEYENIVRDAQLKRGMAGGVLETIQKIRRASLIAEEFDGNGITDGVVKRSARLTALIEILDKVKESGEKVLIFCEAIDVQEYLSGYLQHRYQLPSRPRRINGSVDGYTRKQFVDEFQNGTEGEFDVMLLSPKAGGVGLTITAANHVIHLTRWWNPAVEDQSTDRAFRIGQKKDVNVYLPMAIHPKYKDGSFDANLNRLLTKKRHLSYNA

SEQ ID NO: 4142 - protein, 612 aa, Novosphingobium sp. PP1Y
MDGLLENVLAGVGAPIHWASQALLFFLRYDASVFVLCALGAFWCWRFINRNKKLHYDEAMAALQSREEALSKISTAQDPVEAQVWFSEDFDNIAEVMARPDRRELALAWEQFRETFIDESEPTIRTTARAESYFLHLADDTRVLAWGANIAVAIGLTATFLGLIAALTSAMGTLSGATNGTETTQALQGLLQITAAKFWTSVTGIICSIVLRRTDRSWHEKLQHRLENICQLLDRATLYTPPQRIAVDQLREMKRQTEAFQVLGTDLATAIDNALNNRMSPVVQVLGDISTNIEQFRSGGFDRISQDLGSALREHAGQEMQALAQSLTGMTSKFETLSSGLASVPQSLETSLRDIRQSFETEQEETRRRQREAGEQMAGQLEQVAAKLEGVTGQFSEDLAGKLKNTIETAADTSGAALSGAFAKFGEQMSQSADELVNRLALLANNAGPLSEAMARAADSTNQQAQRLEIAGRSTEEAGTKLSAAITELNAALAPVASATRSVSEAATSISSALKSHESATEELTGQLIATASSAEKAWENYEGRFAGVDDALGKTLDGLVSATAEHATAVNQQIGELDSELAKAVSNLRDALEPLEELADEISALLEKLKS

SEQ ID NO: 4143 - protein, 258 aa, Novosphingobium sp. PP1Y
MSDTSFRRRQGEPEEESYFISMSDMLVGLLFVFIILLVYFAVTFKQKEDYLVGAGEARRRLLEQLEKDIEQKLPGVDISINTETGILRLPEEVLFNSNEFELSDRGREAVSLVAQVLAMRLPCYTRSTNSALIRCNGREEEHKIDTLLVEGHTDRDPIRGDTTGLGNLDLSARRATRTYLALTQAQPGLAILTNGDDVYPTPVLGVAGYGPYRPVLGAGGRPLPETEKARHRRIDLRFIMVTPKSDAAQEAAQMLRSK

SEQ ID NO: 4144 - protein, 433 aa, Novosphingobium sp. PP1Y
MGTDERVDAEPWHQFVLRVNPYKPSELARRDLRRLASEIWDHPDLEDCVPDLLRHCSAIAKRTLDRRLARAYWNRFKVGVPLFVELGLYCKSRQKQLGSPWSELSRSIPIWDSELGPPGLGDRLLRAEDREAFLAMANLRVQDLSGGFVDAAFGALLQSLAAKQNVPQSRSVGQVEGEDILSLGASLGESTIKANAELLAYVLLKPWIAMDPDDAYRDKVMALLLDRLGDPRTSQNNWDTLAEKLSRIQGLRDAAEVLRVLHQWITEKTVRLFFDLIARTTDRPDQWKERRAFWEAYLDNKFVERAWFALGQDARGLAQIAKSSHGLLFGRVGGSGAASSQSVLLMKIGDLIVAEWSDNGRARFWVDAAENSRFLPKFNSKYYEGQTLRSMSGGTGFEAIAHQGKWYRKFADHIATTTRIPYKGPRPVSLWGW

SEQ ID NO: 4145 - protein, 1170 aa, Novosphingobium sp. PP1Y
MVGFSSKAVPEGELLTLIGQTGETVPFDDWTLKAPAHARGIAADLLDRWANDARGVDGAPLITPTDDGSVLLHGSVVAAFSEQEAAALALPPAIRIQLEIETSGVFGRPGFRLETRWVRPGGLAARVTPVAGRLRFNAQDWRLAEPLWSTLEAVRAVNGATDDAGQQFAMSQLRETLSAAEGDILHPNGFLKRLRISYAAGFSLDLKTDGRHFDFDPILFSRARRNAAQEGEMPDGEDDGLLPPSLQQRFVEKFRGSDRALNAYRLDDCTIVYLDPELKGALEIVRRAQGLDEESRRKFALSPRRYISEAMPDGALADGSVDALFIETQQYSERVNGIDIWRKPVLPWIKPKANSWLPESFGLYIGDPPEGEQVDIAAEQLDEAINALEKAVVEGQDSVQIGNATVPATAQALDSLRALRDRITPVAASSSPDSEPTDQACPLFLTVSENFEQVEYEESALGAVQTFTSPQFPNAVSSEPKDHQRTGFNWLAEAWANRMPGVLLADDMGLGKTYQLLSFLAWLRHDQRVTEPFLIIAPTGLLENWRQEMQLHLVEGALGEILPAFGTNLGLLRQGRGRDTQSGSAQLSASAFEGYGVVLTTYETLRDYHMSFARQRFAVAVCDEAQKIKNATSQIRRAATTVNARFRIALTGTPVENRLQDLWTIMDWSWPKLLGASRDFERRYTEDDAAALGELRGQLVDRQDGRPPVMLRRMKSEVLDGLPQKRIVKHQIYMPPAQADRYSRAIEQAVALRGSGQRGLMLKVLHELRSTSLYPGSPDGAEFDPAHSARLQAVFTALEQIKMAGEKALVFCEDLAMQARLAAEIRHRFDISHPVARIHGGVGPQMRQQIVNAFQTRPAGFDVLILSPKAGGVGLTLTAANHVIHASRWWNPAVEDQATDRVYRIGQTRDVTVHLPLAVHPDPSLRDASFDFKLDQLMERKRGLSAQLLMPGETNGDLDNLFESLFEPAATDQPDQTASDAVVHAVPANLAPEAPEQRPTLSVRHQPVEHSHKAPRMVRYNQGDDRAWDIFADNLGKRAIEHLIIRDPYALAGRRNRLLTADFASHLARKVPGVSRVTVIAWDAESARNDNFETTQRTVDDMEREWDRRFMGRVPLLLELKSRGEDRRFHDRWIEAYLDDGDRLAWNLTSGVDGFMNTDSECTVTLWDDV

SEQ ID NO: 4146 - protein, 641 aa, Novosphingobium sp. PP1Y
MEITESLGHGLIYFFTKIPLIGDAMAAFLAIVLIGTALAIAYRYKRQYHAPLAEAIEARVRLLDEITGGSTADVDQARLEFARRFNDIDAQMMEANDAEALPLRRTWEEYRETIVDPSADVLQNSARPEHFFVNLGDRHRGLNWFANIFIAIGLLITFLGIIAALSTLDFSGGVDAMQERLNDLMKVAGAKFWASVGGIVASIVLRSYDYLFGKRINDGLSMLCDKLEHGMAYLPPQRIASDQLAQLKEQTPALRTFSEQLAAALDGALEKQMAPMITHLGSIQQGIDKISGGGGEAVRDAIASSAGAEMAGLADAIGAMTVSMATMSERIEKQTGEADRQIEEAVRRFGQASEEMRSAFGELNRNFGVVADRMREENEQASELARQRMDELLSSLGNTLDDMKSGLASAASQMGEASARAANDAARIGQEAMEKSFSEFVERFNQTGGPLVGSMKDAGDAISTSAERLSTAQSAIGDHARAIEQVAARSSDLATAFGTVANDVEAATAPVRQSAVSIAEAVKSVETIVSRNAQSSESARDEMRQLAAALSETASAASSAWSEYRARFEDVDRALGDAIEKISDAAGNHASNLNERVGQIDKALGDGVAQLAGALEPLTTLRDTVEELAGILANQNREAAE

SEQ ID NO: 4147 - protein, 242 aa, Novosphingobium sp. PP1Y; identical to SEQ ID NO: 3914

SEQ ID NO: 4148 - protein, 458 aa, Novosphingobium sp. PP1Y
MEALASAGLAKPPTTQPELQRQLAKLDACVGEAEPVIELKPFLRGVADTGANGLPRFQLNRVLRGAWCDPEFDDLGVAALERADVDHRRSSDQAVIDGYLTYFPTGRSIMPMLAEAASRAAGRHDWAWRERGARWDLFKPQMGPAKVARDFVARDADGISFLMRETGLGANLAASGFGQATFAETCKATAELQPAEAVVPQRSILRMFDTEAQAGQLELVVRALLEPWIRTKPEPEHRKAVSEFLLDQVGDPRLQRTRWDRIVRSLAESIGEERAREVTQVFKRWLTEVAMREFFRAIAKTTDRPDQWKQREAFWIAYLDEGLVTDAWPALGSRAKYQIDSLIRQSGERPEYGQIRGGPSQSSSIIMQIGDLRISEWSDNGSCRFWSDTDPGAPKLYAKVYDGGKLRTTSGRTDFEYESHVPASPGWEGKFAGIIHRRTSIAHPRFGRGRGRNWNDRW

SEQ ID NO: 4149 - protein, 1271 aa, Novosphingobium sp. PP1Y
MVTTKFIATQNEGGGETIALLCEQPGGLFRRASSEIVPVSEWPRVAPEAGQAALALARALDDDSQISEEAEGIILPPQIVARLDEADAFALGLPPATSMTLQLNSGGSLAEGTIKVDTKWVRRGGLPVRADIAGARLREGGRVGRIPEPIYSAFQSALAVNAADDPDQRRAAFAELRSTLGDDIGAGIEADGFLERVRIAYAANFSLNAKTDHGRFDFDPVLFSRNVSESAEGDLVDEEEASLLTPQDNQHFQRRFRGQDGGRRSYLLSDGTLLFLDPMLGKALDIVRAKQVGTSQEKREFLRSPQRILREELKLDAADDDEAADRLFIETQQFSERVSGIEVWQKPVLPWIKPKPNSWLPEGFGLRIGDPPDARHVELGPGEAETIASEVETAIDTGQETIAWRDESIPATPATLQAARAIADLEREIADEIEGRASDRTERESVDIFFLQVGENFEQLDYARLPRPDAEVQDFDAPGLPKGLRSEPKPHQVEAFAWFAEAWERRMPGVLLADDMGLGKTFQALMFLLWLRSRTPHQKPVLIVAPTGLLRNWQAELSQHIEADLMGPVVEAFGSNLRNFRLEAGSDIRGGTSRLDVSEWNDAGIVLTTYETMRDYHMSFARIPFAAIVYDEIQKLKNPASQMTRAAKALNGTIQIAMTGTPVENRLQDLWSIADTVYPGFLGSSREFESSFPANDLERLGDLQHRLIERDKELPPFMLRRMKDEILTGLPEKKARKYPVEMPAAQAQAYDLVLARARALRESGEQGAMLKVLHMLRGTSLHPSLPRGISNIDEYIGQSARLKKTFEILEEVKQRGEKALLFCEDLEMQAFLAMAIQERFALARRPMCISGKVAGHKRQEMVTVFQSSPASFDVLILSPKAGGVGLTITAANNVIHLSRWWNPAVEDQATDRAYRIGQTRPVTVHIPMAVHPDEAIGPSSFDQRLDALMERKRSLSRGLLMPPESDRDVEDLLSDVLDGCPAENRDRSSAYAAAGQVDKDIQDTDYSASIRQAEPPAPPVAQPEIEEPTGDEESARSRGPASDNTASSANLDPAAEHAAELGLEEAARSQSHSDPGETASSNAERKNRRPILSVRTPVEAAEARVPFVQRVVFEQYGQRDWTIFEQYARDARIERLEIQDPYCCADEQARGRLINFIGRFEQLASEIAAVQIVTFDADSVQTRDPESTRDQRQDLEDRWNRMLASVPLHLAQKSRRSGGDLHDRFVRAKLENGDTVIWDLGRGIDGVMNARWSCVVNAFYEGSISTSRAMH

SEQ ID NO: 4150 - protein, 656 aa, Candidatus Puniceispirillum marinum IMCC1322
MNQIGKWFEAVLGPLIGYLKIEGFGPFLAFAILVVGAIVIALILYHFSVFYRRLNNAISALQNCENEEEFYKNFESINGYFNNNSGLGVCWREFTETIIHPHVARPGGTDPIIRNTSRPGDFFDAEAAGFVTPTLRIMPNIFVGVGLFLTFAGLIAALSTATTAMSGGADQMQVALRDLLYTISAKFYTSLIALGVSIFLTIIFRILETKRSVLFKKLNDKIERGMHFVSVEEIAYSQLEEMKEQKIQLQQFNTDLAMKLGDHIETAVTSAMSPVVDKLSSMGENMGQSNIKAMQEIGDAIAKNVQGAAGESLGHLSDRLDNLTTVLGDMSSNLSKSTSEFENDIANALTSMKSGLEAMASDLQSNAAQTSDILSEKLEGLADSLSNAAENIKVSLEAGAGEVSGELERAIERLTEATDRSADKMGSAVDGINDAVKGIASSLEDASGQAGELAKARMEEAGASAANTFSEAGQKMSDALEVGMEELSTAMAGFEQSLGQASENMLKMNDELGNTSKVVSKTSSDLDSSVKALKEASGSVSGAISPALNAVESIQSAVRQMDEKVSSAASRVSEAVERLETEMRLSGESWEEHSKKFDGVNENLGAVFSKVNSQIEESQSRMRDFVIGVDGAFRNALAGLQEAVEELADERKAGRD

SEQ ID NO: 4151 - protein, 270 aa, Candidatus Puniceispirillum marinum IMCC1322
MGGARRNRKSRNEADESYFVSMTDIMIGMLFVFILIIMYFSYQLKIQSEAQDDYAQSATDHRTQILDELKDYLEGNGQIKIEIDAEQGILRVPEGVLFDSGVADILEGSNADFFSAKLAAAFAAVIRCSVLNEGLKVFDGSEKCRSKNVNRAFIESIFIEGHTDNSPIRGGLRGNVKINSNLRLSARRATNTYENMIAKKPVLEAFKSPKNEPVFAVSAYGKTRPIDTNSTSSGKANNRRIDIRLLMYIPENSAALFDYRKRLETFYELN

SEQ ID NO: 4152 - protein, 462 aa, Candidatus Puniceispirillum marinum IMCC1322
MSSTDISEIDVSFKLHLPTFSARSESTAKAEKIIKKYGSIVPNVPENIEHIIQKAKEYFSSSNAEKLTEKELRAVAFESLSRDEGDRFFFNLLKAVDEAKSRRVFSALFSSYIMNFNKHDERIAQAAKLLKKHQKTLSKSWVRRLENFDLLAFKTIETSLAKKIMEEGNDHSVFDRAGLTGAFSASRLVQSSLIELANQVAKRIKGGNTDALYDFLKIVCVGDKIKQHAGAAAMIASLKPFIDSSPPVHLKGLLQKVFIGSFSDPRITLNQWPEIPAHLGGTNLRTSCIGLIKKWLNFEAIELFFKVIAEHAPDEQFEPRRNLWKSYFDQEFVVDAHIILGQSAALTAKRLKRTDDAAHGLIWGNLSGANPDQSVLLMQIGDLTVAEWSHNGKFRAWDPDSPKKPRFYRNSYSASELRLGSNKIRNKNGSYGDGIVHLGDWVPRAKAYVNQATGIRLSRKIR

SEQ ID NO: 4153 - protein, 1130 aa, Candidatus Puniceispirillum marinum IMCC1322
MKQFHSSIQSDCVELRLKTVSKKILRKDSESIENVSEWIGLSRFDQVEALGTLFAAMEENSGSFERLDSDEGYRVSFDFVSTLNEAQALALGLPKSFPYSIRIKSISNIGSKNYSLDWIAYGNGRQLNVSRVGCFLYQGNEVFKLNADIWKIIECIDEFNSSGLDDFDSKTSFVSELRSLLPETPDGRVYFDGELAEVSLQHAVAFSLQITGDKNSINFNPVLFNKITKDRASETDTLIEEDEQVLTPNDARTFSAAFKKSGKVSASYLLGKGKYVFIDKSLRPALGAVKTAIASPKDARVEFAKAPQKFIKNILERDFEGLPDVDIEIASANIDRIFIETRQFSDRVTGIGLWEAPDLPWLEIEPQDWRADSYSFYVQGKTISIPTPDLEKEVEKLRLAVQTGTTQVEIGGQIVRPDQSFLNFLMGLLPVKPEDPPEPEDPPGPEEPPEPVKEKGTFVLLTKENFESVRYNSRLASRSGALSAEPPSCKSPKIVLKAHQTSGLNWLVESYNRGYPGVLMADDMGLGKTLQALMFLAIMVETGKTETGEPILIVAPVGLLKNWEEEHSKHLSGEGLGSFARLYGNSLKGFKVAKGRDIESGNASLNTDKIRGHDWLLTTYETLRDYQASFGQIRFSCVVFDEIQKAKNPRGLIYNGAKGLNRDFVLGLTGTPVENSLSDLWTIMDVISPGRLGDLKTFMSSYPEPRSENAQEALENLKQLSVQLLEPSANGPAPVIRRMKSDLSDAGLPEKILVPSLETTVLMPRIQDDEYIARSNKLNSGQTSMIEALHAFKSISLHPISPVQFEQFSIDEYIKASARLSKTFEILERIHKQNEKVLIFLESRKFQVVLASLVREKFKMDHSPLIINGLISGEARQERVNTFQSNPIGFDVMIISPKAGGVGLTLTAANNVIHLERWWNPAVEDQCTDRAYRIGQTKTVNVYTPIAKNGSFGEKSFDCILDRLLNEKRSIAKGLFVPTSVTGDEFGGAFKEGVRGRELSLEEIDCFERGEEFENYIISQLNSVGLKASKTQSSYDYGADVIVKNEKTGRSAIVQCKHRSSGSKSVSQDAVDEVLKAVSYYDLGAPKLFVVTNAGSATSGCRSVANENGVTLVLRDDLLTVQGVLGSKLN

SEQ ID NO: 4154 - protein, 648 aa, Geobacillus sp. WSUCF1
MYTVFETLFSLINKIGNEGFTDLFLYFQFSLFLVMAVWQFVRIHREIAVMNQLKPKLLELNRPLDGSVYEIDQAIHNLFAQVKKSKYKELWERYYNRVSQKNEDERINVEPFFGFDVMYHHMGYRTLMDMGAGIHVSLGVLGTFVGLSVGLAQLHVSDTEMLRSGIDSLINGMKVAFYTSVWGVLLSLIWTMFDRWISGVLERNIDWHSERLDFLLSTDDEELFLNRLEKLSRHQADHLKTLLTDALERAMQPIALSLQQSHGSLQQAFGQLHDQFAQLHEGMETQAKLLESQIELTKSTSADVTSRLVDEITGGTQQSIGKFSEFVQQSQVLHSEMMKTIESFTSRFAYTEERQAMTLERTEKMFAQFEKMAAELELMKESYQKTAGMMNGLGETFYQLQQLTKDQLPVQQEVMRSNQLLAQKYDHLAEQFTRFNAEVETQYSQLLERLVHASSSLSGSFQTMANKFEESLRIQKESLHDSQQLLGDVQSAVAALSPLVSELRETFNRVRELKEQLLKMQEAQKQLLPELVQLRTQTNETVEEALQTTKVYMHEMTEQIATLQQNWAMTKEQLAKITEALHLSMKDFAENIDSGLSKTYQHFDETLTKAVQEVSGLVYQFSEVQNDFIENMEDLVDHLDKWKAGAST

SEQ ID NO: 4155 - protein, 230 aa, Geobacillus sp. WSUCF1
MESRGFNMKYRRRTEVNYWMSYADLMSAMLMVFALLLMFVILDYRELLEEKEKQIEEVVSVKTEIIRALTEAFKKSNMAIEVDQQTGAIRFPGSILFESNSAEISPEGKAFLQQFIPKYMGILLQDRFKDEISSIIIEGHTDRNGTYMYNMSLSQRRAYAVLEYIYSKEFPNFKERELSKKYITANGRSFSNPLTDENGKYDPDRSRRVEFLFRLKDDEAIKAIEKLVNE

SEQ ID NO: 4156 - protein, 426 aa, Geobacillus sp. WSUCF1
MKYEYEPVLLKRWLREVRPPLLEKTMENSNEKYRGLLERLSDQFAGLVDAPSSAFEQWVKQLSRREKLLLPNLYKKELPEEMKKAMIDVIQQHVRHERRLFRVLVDVVYETCDLDEIWKLLRYAYASHIEKIEKRMEKEKSEKWRRYLSSKDPIVYLATTAYESEKGILEELETFYLTKNFPLFKLVLMEIFQLADESFFLKEQELYRDMFVSSTNEQQQKMANALIKKCKLNHVKPLGRLIFEKLQTYHRKPMLWRYVGEEEKQRFAQWIMRLELKDFFGGVNKNHERFQYWEKFIPKLEDVVVTDERTTLIMYFHDVVIMEVLGTGAVYIYRADVFRRHFQPKIDRMLAEREQFANKAWRKVREVKRTELMDRDLTIPGGWLRHNGGWQWKFDEWLRRELGWEVRRDVLLQKETENDEGSFDAE

SEQ ID NO: 4157 - protein, 666 aa, Geobacillus sp. WSUCF1
MHRHDHIELVVKGRNEEETRHLQRLQRVSSIKKGHGRSRFVSTEQVHADMMHLQQKRHITGEEVPLFLENPAAVLPEHDYLFDLDQFSERVRGLIPIERVRPFFHERTGMQWFDEESGHTVPYDETLLRELMEKYPDQQYVEYNGKWIYLDPLLRRKLLQLPKDADEALKRRYILDIKDNEEQLEYKMDSAQGAPCRRYPVPSGLQAELFPHQIEGFEWLCHLAEQERGGLLADDMGLGKTIQVIAFLLHQKANGRLKPTLIVLPIALIENWVAEIEKFAPSLLDGLYIHKGRGRLASSQLISQFDIVLTSYDTLKMDQLLLGKIEFQAIICDEAQNIKSHTSQRSRAIRAMQGRFRLAMTGTPVENSLDELWAIMDFVQPGALGSLKEFRFRYAETSDYDALLVALQPYYLRRTKQQILDGRLPKKHLVPPIYVEASPIQKEIARSMLATKEMGQVAILNMITRLRQLYGHPGAVIPKYEQLSYQEVPKLKETMHIIETIRQKGEKVLIFTEFRKLHSLLKRIFMETYGISVPVIDGDAKNRQLIVRRFNEMQGFGIMILSPKAAGVGLTITSANHVIHYTRWWNPAVENQATDRAYRIGQQKDVYVYHIITRDSSHFPQGTVEELMHELLESKRHLAENVIIPFNMSEIQQAVAEKAVGRRQLV

SEQ ID NO: 4158 - protein, 657 aa, Sphingobium sp. 22B; identical to SEQ ID NO: 4092

SEQ ID NO: 4159 - protein, 236 aa, Sphingobium sp. 22B; identical to SEQ ID NO: 4093

SEQ ID NO: 4160 - protein, 557 aa, Sphingobium sp. 22B; identical to SEQ ID NO: 4094

SEQ ID NO: 4161 - protein, 1073 aa, Sphingobium sp. 22B; identical to SEQ ID NO: 4095

SEQ ID NO: 4162 - protein, 650 aa, Granulicella tundricola MP5ACTX9
MPIFLHIVHSLSPFLRGFAALIVALWIAFLVRMIWQAMKVHKANRAILAVLDSVPAASSEERIDGLPLDRINLLRSAFQSSNEHAKDWWNSIEGSLLPLNSPLSEDRWFVSDAARDLFSSEELFEDYADVSHQAVPGILTALGLLGTFSALLLGLADLRYTDKAVLGLSDLINALSGKFFTSVLALGSSLIFVLAERFLFATRFERLYSKVCGRFDRVFPRLTQERVLIDIRKEALSQSVSLSNISSDLVGQLTGAFQQTILPSLSFDLAEQLTKQLLPAIQKMEGALERLESQKQDSVVGEFRSLVTTLETSITNALSDMGSRFHEQLTGSAHSEFAAVQETLSGTSQMLLQMNAQFELTRSALSNLVDAANTSSDHQAKASQDQAEALRQLMHGLIEEMGKNASSNLQNIAGALTNVIADLSRKVEDVSETMIRTVSNAAQGSQSSADALIAKSGAWTEATSQQLTTLLESIEARSGEFKAAGQSLLEAKSLLADVLDRNATALKSMESAARQVEGYTTALTVVARNSDDTQRRQAEVVALSRQIVEELKQTSAGNQGILDQYNRSLNEAKTVFGTLDTQIETLLTKINTGMREYVQTVESNFSVIVKHSNDYLPEISRVLQSQIQELERQLEELTSVFSKALQAGAE

SEQ ID NO: 4163 - protein, 227 aa, Granulicella tundricola MP5ACTX9
MRSREKHDHLSSSFTDLMSSLVVIFILLFLAFVHEQEERQESVKDKLLSELQQQLKEANLDQQNIKKDGDAVVIIVPEGLMNFETGKSDLKDGGKAFLAKYIPPISKMLVSDFRNDVDSLIVEGYTDRQRAAGSSEEQGEAQNLILSQERSMKVVEESLRDLSGPDHIPEREFFLDRLSASGRGEQQAIHQGGPENNPNLRRVIFRIRVRSNAMQDAAQEIKADLHK

SEQ ID NO: 4164 - protein, 445 aa, Granulicella tundricola MP5ACTX9
MRLLEALQGLAALPRDISLTSLSKNCDPVFELRPLDAAVTKMKAQAASTRPPDPARIEKLIARFHAEKQNLDRFEPREIRLLAWNNQMLLNARFRSQLAERVRSRAVKPNLLILSQVYFGSWGTHAEHELFEQMLRILADQQAGFTPLLQRYKEKATSIFSASADVFLSRQISVEQASLTETLALWGVPTTTPLASAVLTAYVNHILTEISSGRVGQLDDLLATLQLPLVQMSTFQAGAGTLILSPHADKNDSFRKRIEAFVLDSPRLGDPRLPHNLPKWNGVDAAALRKFRTWRATKDLVFFFRSVLPEGRDPHGRKDFWLRYVDQVVDSVVALCPTDLQRLHTSLSLERVHHCRIQENQSISCFLMRFKGANEDFIVAEFSNVGKARIFYYGRFLERIGDINRSEFRLRELKSEEGLAISFSHMNNWQSKVRSTLAQIGIRAS

SEQ ID NO: 4165 - protein, 571 aa, Desulfovibrio sp. X2
MIAAIAQFMTSSWGSCLWCGSIAMWCALSWIAFARKMNPKIRLLKEAVAHIKEQPDQHGFAAVYQEFMEWASAHGLIGHSWKEFSETLVMPGPTEPSPYICNTDEACCHFNESTVVNGEINLHYYKALPNYFTGLGILGTFAGLVCGIYLAGKGLASDDPTLLKHALQQLLEGASLAFWTSIVGIITSIAFSIYEKRTMQKLHRFIATWNTELDKRIVRLTPESLASRQLEQLGKQTEHLETFVTEVAVNIADALDQRMSGSLVPVLERLAQSVEAMRSERSDSTEALLRDVVESFKTTMTGSAGREMEALSGTLAGLKETLLPLLDGMRSAQAEMQQTAGRMAAQVGESYEKSSRQFAAGVAEATSSLGDTVREAGQLLHGDLTAAFGQAAERMQAAVSAMEGTLDRVRESGQASGDAADKTRGLLGELNGILDRLQHFQQAASSAVDSIRQTAGSLTTSNGALVQAAGRTEASADALRQASEQIRGTQELLERQWGGYAQRFEAVDESLATVFGKLQDGLKGFAEATGQYMSSLDGQAEKVTGRLASAVSELDGAITDLTDALGSARRS

SEQ ID NO: 4166 - protein, 255 aa, Desulfovibrio sp. X2
MARRGNNESGTVVGEEGSYLVSVSDMMSGLLFIFIITLMVFVINFNMQRIDAKKEQENLQEKYTELTDAREARAVLLRDLKRSLDTAGVEVSIDEDKGLLHIPEDVLFASGSAALPAQGARSLDVLSDRLSEVLPCYSGARDAPAPVSCGGAYRPGRLEAVFVEGHTDNVPMSSRGGIQDNWDLSTKRAVVTYRHMLERTPDLARFVNQDGAPLFGVSGYADTRPRIPHDTPVADAKNRRIDLRFLLAAPRADVH

SEQ ID NO: 4167 - protein, 454 aa, Desulfovibrio sp. X2
MALRNALLGWSPPPFRCPATPVAMGRAEREVAKKLQGGGSTPPKPFELEEIYRELSRALDSHGTVRAAGRRALRLAPWVLFSYPTNRPGYLAAMPGVAQEYAAWLAPQSTCRPLLALLHALLLHYPRTLATFTDWLALLNERLASSDSPKLHLWQARRRDFGLLANDGPERVWRRLAADAAPVSELLDAMGLNGDLGTGRFAEQAFLGLLAHVARMMDDGRADAPLERLFAFAAPIGTGSEELLRFPLAREVAEGLLMPFARRRVPLSYKDRVRDFLLKRLGDPRMVSRGWQGVPEEAKAVIKGWLVENSLEDFFRILTATADPIWTYRRDFWRTYLQKGVITEAWVALGSKARSLAKRAFDGEYGELVGALGTQSVLLMRIGGLTIAEWSHSGACRIWLTPTGVTPDFYKLTYGAASLRGTPDEKIIHNGSERYRWQNRVARYIRNSTGITWP

SEQ ID NO: 4168 - protein, 962 aa, Desulfovibrio sp. X2
MGIRLEWRREGEAVRFFCSEEDAPLPLAAWWRASAELPNGRAAALGTLLGLVDEERATTDDGGTSVVVPDAALAVLEPWQLAGLGLPGPAPVRLAVVARGTLSSPSFSLEYGFVYDNGIPASGAIRDGVFLRHGAREHLLPEPLYTIVQRIDAYRRDPIRDMDERFLWWSRLADMLPSDVGLEGFLRQVHAVRPEAFSLDFVAAPGGLSVLPRFVRAVESEDGNAAHEDVLPAVVGASFQERFARQQEPGGRYVLGQGWFVVLPPAVRTALEVVHRVNGESEERKREFLRNPRAAIRSRLEDVYGEVTDEVVASIFQETPLFLSERVRYLGVWLPKAELYVKPPAGQWLPDEAPPQSLLMPIGPAGTLIEVAPADLDDLAVRIDDARDAGKTTVTFKGQEVAASAQSARVVSKALRMFGSGGEPEPEPDEPSPRQDVPIIFDHIEELGIHLEAGGLRPEAEAQPSLHDGVRLHEHQQQGLAWLQEHWRHASPGALLADDMGLGKTLQTLAFLSWIRNQQQAGMAEARPFLIVAPTGLLRNWEEEIAKFLIPGALGQLIRAHGSELRGLVGRGARAAAFELGHGGVVLTTYETLRDKIITFTGVHWGAAVFDEAQKIKNPRAMSTDMAKSIKAEFTLTLTGTPVENTLVDVWCIMDAAHPGRLDSLRTFMRQYMPEGGPDERALRDLQAELARPAAFPSLLRRNKETHWAERPEKRQEIERIPMPPEQAAAYQNVIVSAMQHADGPGAVLKALHSIRTVSLHPYMSSWDGAAPDAFVNASARLQGMFRLLSRIKEQGEKALIFIESKEMQQVLVELLRLRLGCGPVLVINGEVSGALRQQRVHEFQARKGFDAILLSPRAAGVGLNLTAATHVIHLSRWWNPAVEDQCTDRAYRIGQHRAVTVHYPMAIHPELGEASFDVKLHELLERKRRLSHGLLGSPLATADDLAGLLHAVVEPDGEPTA

SEQ ID NO: 4169 - protein, 629 aa, Bacillus sp. 17376; identical to SEQ ID NO: 4005

SEQ ID NO: 4170 - protein, 223 aa, Bacillus sp. 17376; identical to SEQ ID NO: 4006

SEQ ID NO: 4171 - protein, 886 aa, Bacillus sp. 17376
MVRIFQRFQTKKLEMSFHSNGTDIFFRLFLVRGKERDEIQMPIPPDEYGAYFGIQGSTEYVIYEGLSETQYFEGGRLTVQSYFDILHDRVTIQDDLEQEIFAGDELDLKEDLSALGLPIVEEHLQVFIQMTGLSGKQPEFKVTMKDTKGENVEFEWDIEGPFLRKEDEVKLLSEGIWQLYQVIHSEIEDPYEKIARVQHLAKKYHFILDDFLTREKYTFVEEIELEPKLLDDDTLKLEIKTDDAIADQLVEQNQLNASIKKGDTRQRVRFAPKVVEDIRKIKQKQVLRGEEIAQFAENPHAFYGGDTFTFNLEDFSERVKGYIVIQRVRYSVVNGKRVWFNTESGEPVEMDEGEMRDQVTREPDKLFYKQNNTYFYLDKKAKQELGFVDQEEKQTKEKIALEILKNEDELEYSKAGTGERRYKSYPIPEGLKANLFDYQKEGFFWMASLAEAGSNGLLADDMGLGKTMQVITFLLHRENQDQLAPTLIVLPKALINNWKNEIAKFAPSLSPFVYIHSGPSRHRTKAELEKENIILTTYDTLKGDQFVFGQVDFQNLITDEAQNAKNYGSARSLALRAMKAQFRLAMTGTPVENSLEELWAIMDFVEPGAFSSLADFRKQYVKEVNTEKLRALLQPYYLRRTKSEVLADKLPTKHIKEPYYLSASRIQQQLAASIVSARSGNQANMLTALMNLRQAYGHPSAVNDDIEPLVKHSPKLEKVLELLGTIQKQQEKVLIFTEFRKLQSILKVEITRKFKIHVPIIDGSTDNRAGVVEEFNKLEGFQVMILSPKAAGVGLTITSANHVIHFTRWWNPAVENQATDRAYRIGQERDVYVYHLITQDPGNFPNGTVEEIMHQILIDKSELAEDVIVPFNTKKMQSEVWESVRK

SEQ ID NO: 4172 - protein, 729 aa, Pantoea rodasii; identical to SEQ ID NO: 3909

SEQ ID NO: 4173 - protein, 245 aa, Pantoea rodasii; identical to SEQ ID NO: 3910

SEQ ID NO: 4174 - protein, 560 aa, Pantoea rodasii; identical to SEQ ID NO: 3911

SEQ ID NO: 4175 - protein, 1083 aa, Pantoea rodasii; identical to SEQ ID NO: 3912

SEQ ID NO: 4176 - protein, 729 aa, Dickeya solani D s0432-1
MEWLNSFLTILTSVQPEKVPLVVIIVVAVALVFFAALYVYRAIKIINKLKKQSVIISGWKNETTVVKLQKLSELFTGTPLAHSWREFAESLHQQKTLVDGELKLKDVRATAPAAAFFTEQQLIDIPLNTEFFKHLPGILTGVGIIGTFYGLMIGLNHFDPSTPEQVTSSVAALLRDVLYAFLGSFTAIAASILVTWLEKLSIAKCYKYLEQFTAAVDQLFETGVGEEYLAELVKSSNESATQAKQLKDSLVTDLRDMLQNLVASQVAENEKLAHTLSSTYRDTGQQFAEQVSGAIENSLKSPLDKIAGAVQTASGDQSGQVQNMLQDVLTAFMSKLDNTFGKQFENMQQMMGQSVGAIEAMQSGFAGLLQDMRNASEDTRQGSAELMSQLLNEMKSGQVAMQAGMNDMLASLQSSVAKIGAEGEGAGERMAQQLEKIFADSEVREKAMAEQMKAFIDSIQQTSQQGQSETMKQMAASVEALGEKLGSLFTQLEQGQQQLASHQQDTQTSLHQETQQIIAGFDEQVRSLLNALNEQQGATESTLRKLAEQTSAHLQDMNTGADKMRLAAERFETAGDKVKDANHLTADVLTKAQGAGNTLSQASQELSSVVADYRNNREAVAKSITLLEGIIANAQSELEARSQFLKELKQHNEGLHDYNREAKEFLENAGQVLANGFNQFSDGMKTSLDTTLGALDANLDSAVKRLGSGIDELGESIETLEEVLSKVSA

SEQ ID NO: 4177 - protein, 247 aa, Dickeya solani D s0432-1
MFGQTFRIKTRRTDEAEKPFWISYADLMMAMMVLFLVVMVASLSSVTQRIQRVEQGEKLRGQDITRLCERLELHARNLNKTIVVDCRDNRISFGEAGRFDHNRFFLNADGQKALQDVVPLVLEAANSEEGQKWFKQIVIEGFTDTDGSYLYNLHLSLQRSEWVMCSLLDSRSRLQQQITPLQQEQIRKLFLAGGVSFNNAKESKEASRRVELRMQFFGLKDEHDKAAVDVDSVAGPTAEKCQLEMPL

SEQ ID NO: 4178 - protein, 561 aa, Dickeya solani D s0432-1
MISALSRLSSEIAATVKRHIDTEATAFGDFPKLRAAEQYLAVKMEKSERTTVPPLTKRHKAIAALRQLKVLTRYDWQLIFAGLADSDPDATFPVLLEDDSLYNRVEQEIQQRIDSKKLKRREWKFLCSSYFGYHAKKPDENNNWCSLRDQLRIGYCVIKGQVRREKRWMAVIDEYQDLFTPDAGNLLANKMSSGKLVDFSALETVAQVPDDSWLWYRAFAVLLAKILELDDEAFKQHLPNLLELARQRERYKNIILRVCLTQYYRSSFRNTPHTQLKQMVLESWGSPQLRSKQNLWLTHLKDPDTSEKICGMVRSWLAKEDLTHFFQLLKGNDDADQARLFYWLRFANQMGFTRIVIGQDARHNMHSDFVAFRKKNKGRLSSLSGGNSADNAVIMQIGNYLFVEFSRTGNALYVYELSSAPFNPEKSDLHLNYELKAGTIKHRHAPTAFGYSDNHLTGWMINYEDELHKLGIKYQPADISASPSPIAVNTINAQSENATKGTREQEIRSLLKQLNATVSDKRNIGGALHVRLSSRNAENVEKLIRLGFKQKNGDPLTFWSK

SEQ ID NO: 4179 - protein, 1080 aa, Dickeya solani D s0432-1
MLKRLLSKFKGNNSSSEKLMSHRYQVEESGLSFLFNLADEDALWPLVAYMEQLSEEEYVVELSDRWLLTWDELYRLSADEEHQTSLPLLGIPEVKPLKVCLAGNGSLSDPEFSVYTRDWKESATDRSVQIEKTGAIFNSPEGQFLQTWENWQLLSALQQFRDEQQRSAGENTNQLGWAKIRRFAKKALAELDNYLAKTIVVKPESLKLKLRKATIYNTPVIEIEPSFDDQPAQWLNSFDNNKLVQDQYRVLGEDGSLSHVIISPEVKEVLSSVHSITGRRVAGDDAVSFIRNPYTFIGEEAASVVPPEQHEEALQDAHIFFHRFSVTPVLDDEAKRILSVSLVLEPIAARPQPAIAFSLTKAYEFEGFIQELAVKLASGLPAGIWQGYELELSQLTLEQLEQYQSLLLRWQQEIAGIEFDEVLDLNKYGDRVIGIGEFEKISSPFLMKGESEEWLPETLGEALLASDFFEGWELQSQEQLSDLEERIESAESQQETTVSMPWNEQSLPIDDAKSLLKNWQKKIETLESDTDKDITEPEKRAVLQIEQNIEHAAYIKQRREALLNAKDAEPVLPVLLKEHIHLREHQQQGLAWLQQLFLKSPEETSGCLLADDMGLGKTLQILAFIVWYIEKNPDGLPTMIVAPVSLLDNWERELDNFFHAENLEVLKLYGNAVKAVKFHKDEIPAELRAQGIKNLLRPGWVGSAKIVLTTYETLRDQEFSLARQKWSIMVCDEAQKIKNPAALITHAANAIQARFKVACTGTPVENTLVDLWSLFDFAQPGLLGALNDFGKQYLRPIEGSTERDSFVLESLRRIIEVQTLRRTKEDVAKDLPAKVEDTSCKQLIMSPLQRDLYISSIASYQNRQRVQDELAQSGMGMLGLLHRLKLICAHPYSVKPDSRLRGHSPKLEWMMRKLKDIANRGNDKVIIFTELRDIQRELQYAIHQQFGFKPYIINGDTSTKSENANSRQKLIDTFQEQPGFGIIILSTVAVGFGVNVQKANHVIHFTRCWNPAKEDQATDRAYRIGQTKDVYVYYPTITDDSMSTFEETLDLLLQKRRALARDMLCIQGDLVSEDFNQLLT

SEQ ID NO: 4180 - protein, 729 aa, Dickeya solani
MDWLNSFLTILTSVQPEKVPLVVIIVVAVALAFFAALYVYRAIKIVSKLKKQSVIISGWKNETTAVKLQKLSELFTGTSLAHSWSEFAESLHQQKTLVDGELKLKDVRATAPAAAFFTEQQLIDIPLNTEFFKHLPGILTGVGIIGTFYGLMIGLNHFDPSTPEQVTSSVASLLRDVLYAFLGSFTAIAASIFVTWLEKLSIAKCYKYLEQFTAAVDQLFETGVGEEYLAELVKSSNESATQAKQLKDSLVTDLRDMLQNLVASQVAENEKLAHTLSSTYRDTGQQFAEQVSGAIENSLKSPLDKIAGAVQTASGDQSGQVQNMLQDVLTAFMSKLDNTFGKQFENMHQMMGQSVGAIEAMQSGFAGLLQDMRSASEDTRQGSAELMSQLLSEMKSGQVAMQAGMNDMLASLQSSVAKIGAEGEGAGERMAQQLEKMFADSEAREKAMAEQMKAFIDSIQQTSQQGQSETMKQMASSVEALGEKLGSLFTQLEQGQQQLASHQQDTQTSLHQETQQIIAGFDEQVRSLLNALNEQQGATESTLRKLAEQTSAHLQDMHTGADKMRLAAERFEMAGDKVKEANLLTADVLTKAQGTGNTLSQASQELGSVVADYRNNREAVAKSITLLEGIIANAQSELESRSQFLKELKQHNEGLHDYNREAKEFLENAGQVLANGFNQFSDGMKTSLDTTLGALDANLDSAVKRLGSGIDELGESIETLEEVLSKVPA

SEQ ID NO: 4181 - protein, 247 aa, Dickeya solani
MFGQTFRIKPRRSDEAEKPFWISYADLMTAMMVLFLVVMVASLSSVTQRIQRVEQGEKLRGQDITRLCERLELHARNLNKTIVVDCRDNRISFGEAGRFDHNRFFLNASGQKALQDVVPLVLEAANSEEGQKWFKQIVIEGFTDTDGSYLYNLHLSLQRSEWVMCSLLDSRSRLQQQITPLQQEQIRKLFLAGGVSFNNAKESKEASRRVELRMQFFGLKDEHDKAAVDVDSAAGLTTEKCQLEMPL

SEQ ID NO: 4182 - protein, 561 aa, Dickeya solani
MISALSRLSSEIAATVKRHIDTEATAFGDFPKLRAAEQYLSVKMEKSERTTVPPLTKRLKAIAALRQLKVLTRYDWQLIFAGLADSDPDAAFPVLLEDDSLYNRVEQEIQQRIDRKKLKRREWKFLCSSYFGYHAKKPDENNNWCSLRDQLRIGYGVIKGQVRREKRWMAVIDEYQDLFTADAGNLLANKMSSGELVDFSALETVAQVPDDSWLWYRAFVVLLAKILELDDDAFKERLPNLLELARQRERYKNIILRACLMQYYRSSFRNTPHPQLKQMALESWGSPQLRSKQNLWLTHLKDPDTSEKICGMVRSWLAKEDLTHFFQLLKGKGDVDQARLFYWLRFANQMGFTRIVMGQDAWEDRSSDFVAFRDKNKGRLSQLIGGRSWDNAMIMQIGDYFFVEFSGTGNAMFIYSIADKDFKPESEYLHINNMLKKKTGIVARMLHSSPVRRLDLRYIEGWMAKFDDKLKELGIRYLPDDTPVTELVPESGVVKNINSDTEREKEIQELISTIECTVNDKREIGGALYIILPASNPVFEAKLLRLGFTPQRGNSLMFWSK

SEQ ID NO: 4183 - protein, 1081 aa, Dickeya solani
MLKRLLSKFMGNDSSSEERVSHRYQVEESGLSFLFNLADEDALWPLVAYMEQLSEEEYVVELSDRWLLTWDELYRLAADEDHHTSLPLLGVPEVKPLKICLAGSGSLSDSEFSVYIRGWKESATDRSVQVERMGAIFNSPEGQFLQTKENWLLLTALQQFRDEQLRRAGENTNQLGWAKIRRLAKKAHAELDNYLAKTIVVKPESLRLKLRKATIHNTPVIEIEPSFDDQPTQWLNSFDNSKLVQDQYRVLGEDGSLSHVIITPEVKEVLSSVHSINGRRVAGDDAVSFIRNPYTFIGEDAASVIPPEQHEKALQDAHIFFHRFSVTPVLDDEAKRISSVSLVLEPIAARPQPAITFSLTKPYEFDEFIQELAVKLASGLPAGIWQGYELELSHLTFEQLEHYQSLLHRWQQEIAGIEFDEVLDLNKYGDRVIGIGEFEKISSPFLIKGESEDWLPETLGEALLASDFFEGWEPQSQEQLSDLEERIESAESQQDTTVSMPWNEQSLPIDDAKSLLKNWQKKIETLEIATDKDITEPEKRAVLQIEQNIEHAAYIKQRREALLSAKDAEPVLPVLLKEHIHLREHQRQGLAWLQQLFLKSPEETSGCLLADDMGLGKTLQILAFIVWYIEKNPDGLPTMIVAPVSLLDNWERELDNFFYTENLGVLKLYGNAVKAVKFHKDEIPTELRAQGIKNLLRPGWVGGAKIVLTTYETLRDQEFSLARQKWSIMVCDEAQKIKNPAALITHAANAIQAQFKVACTGTPVENTLVDLWSLFDFAQPGLLGALNDFGKQYLRPIEGAPERNSLVLESLRRIIEVQTLRRTKEDVAKDLPSKIEDTSCKQLAMDPLQRDLYVSSIASYQNRQKMQDELEQPGMGMLGLLHRLKLICAHPYSVKPDNRLRDHSPKLEWMMRKLEDIAKKSDDKVIIFTELRDIQRELKYAIHQRFGFKPYVINGDTSTRSESANSRQKLIDIFQDQPGFGIIILSTVAVGFGVNVQKANHVIHFTRCWNPAKEDQATDRAYRIGQTKDVYVYYPTITDASIPTFEETLDALLQKRRALARDMLCIQGDLASEDFNQLLTS

SEQ ID NO: 4184 - protein, 733 aa, Limnoraphis robusta CS-951
MQLVNSFYTFISVLWQNSFFHVCTLILFIIAVWGEHRFVRQYQRYLKAKSQITQEAITYLSLQLERQPEGRIELKSTEIFHSNWGLLLDWFSSYLIGEISYQGNTYETEIKGRKFILFQYPAFLTRSIPRSQWQFVPSLLIAIGVLGTFYGIQSGLQDISLGNLENTTELLPSIRLLLEGMKTAFSSSLMGLGSASLMTLVLAWGERKRQNFRDNLREKLDQISQIKLSNSANSQGNLNIAEIMKAGFSQLIEAQNRVDSHAIGTQVGLAMTPIFQDIREELTTLKQIKADQGEVILNNLLRELRIQVIEPVVERLDQSAQLTQEASQAVRELKSELGGISASLAQSILTIQTFQEDTLTQLQAFAGSLQSILGEFQSDTQGVLQQVSLEIRSGVAESIEGMKAQRIAFQASAEDAANTFRGIKENLQFALQTQAEQEQQMLEQVQQRMTKILTATHNAFQTQSNTIKAVGEEASQLMNQAQENLVGSLQNVDTMLQNTRLTVQEELERFRIGYQVSLQHFFEEQNNLLEGTLGKQQKGLAQVVVALQRVFQEESEKRQLMSQQVDESMAIVLKTAKEVSEYANSVGLNASDRMAQLQELAKITAEEVKRVETVYEKLVEQLNTEGKRLENTYTNLVEQLHISLQAEQEQVQQVESVYQNLVSQFNLALESGNQQLIHYLEQASASQNKFFTDADSSMAKVCQGLQASSDGLMQVAQYLVASADNLSLKQTKN

SEQ ID NO: 4185 - protein, 238 aa, Limnoraphis robusta CS-951
MNINRFDFETNEDLEDNQDSSVWLSIGDLMSGLLLFFALLFITVQVQLNDYVKKLDEKMAQVEKLSKELEQYQQAFKALPQIIINALEGKVGTEDTFTVDPATGDVSIRDRILFDDNSSVLKAEGKEFLKAFIPVYSEVVFSNSEFSEQIARIIIEGHTSSAGTPTRNMQLSLERALAVSNYILSNELSFTQKPQFQNKILVSGRGEIDADQTQDNSGDRKVTFRFQFRRESLSLDSK

SEQ ID NO: 4186 - protein, 384 aa, Limnoraphis robusta CS-951
MTVEFSSIKIPSNQPDETPNKLHLVSKISPKFSLNLPRFETSLLRFIDEIIADLESQNIDKLTKIEWIYYLWIQTQWEHEYPEKSKKISQIIWQGISEDFLLADWLKQLLFWRIGLYYQSKKELVTSQNIPFPVIAESLITAFLDWSLTATSGDALSIQILKTISQGEIDYEIANLSWKYGKTPQELLEKAQLPVSLPVIELTLNCVGQIFVKNNVSDRSGVEWMLRCLQQMSPQQKLATVEILLTQISDDVLKNHRPKLIEWLKDEYSTQLDQLSEPAQNSLNRWIGALNYHYIQRLIDLILRFLQPTEFDRKQLEERQNFWGNYSDSIRRVRLLLPQSSFDRLGYQRGDLSCDIFKTCPNETEVIILDFGIFCDRIFAGSWL

SEQ ID NO: 4187 - protein, 621 aa, Marinomonas fungiae
MLEFLSDYWFIPKSTLGLWFWASLLVVFFFFLVQTVVLYRRFSFSIKQVWLIINDQSIDLLYQNIGDIREKGQQSESEKIRKLWHEFDESLVLDHREKGVFNTLDAEHFFNTRTLASGITSSRLLAAAPSFLTAIGVLGTFMGLTMGLQGIHLDSKDIDILKAGISSMMNGAAFAFLTSVWGVGLSLLLNIFEKIAERSVIRKVSSLQQEIDALFPRLPAEKSLVDISKFTGESSEALQELHERIGDRLQETISGVSDSMQEAFTNALNNVMAPAMQSLVSNTSQQTSGVLEQLIGNFTESMQAAGRGQGELMQKSTEEMRQAVATLSDQMKTVVDQTSNNHQAMAKQQEQASQQFNEQLRAMLSQSEERQQAMESKFAETLNAQQQALTERETEHRDKLQTQLDSWLEKQAQLIETMKDAVERTQAHMDSVIEQHRDVVGQLKTVADTTATSSQNLSNSSNQIGVLSGNLVKATELFDTRLGEMTDSIKGISAQNDALASHVIEQAKVLRGLETSLVTTTDKFGETAQLAQNGFNEMKEHQTEFIANIESSFESLGENLKKQVSDIEKQTNEWLRSYSSEVNTQLKERMETWNDKTREFSDQMVRTVSSISDLVDELERK

SEQ ID NO: 4188 - protein, 252 aa, Marinomonas fungiae
MRVFKSGQVNVDEENPYWMSFSDILSGLLILFVLASVVLMVELMEAKQELENKQEAFTEELEMLHKAEQVRRTLLHEIADSLRQMGIQVTISENETVLSIPNDILGFDSAAFNIGPKFETTALEIGKVLFKKISLDKSEQYFDTIFIEGHTDSKNFNGMMGKGNWGLSTFRAISLWELWSSSLPEDLQLDNLKNQDGNPLFSVSGYAATRRAVESEATEQDYRANRRIDIRFTIRRPSSEEYESVRNRLEMQ

SEQ ID NO: 4189 - protein, 571 aa, Marinomonas fungiae
MLQLPSIPKLHDAQWEKVTEQWGKLTANTKKIADGAGQSQEFKALEEGVRRLVLQGDFEQVKKILRKRRGVRVLTQLWIDNDEVRKSSFNESFISFIQEQHPKLGMSSLMNLISLLYRYFDDLNIGSAFHKLTAWLSQQIDMRLKDRKRSSDTILSVLHQHKSWLFDMTAPKAVVDLAKKNHLDLNDQLKQLRLSELPQGRFLNICHAQYYLETLRDIPLGEDHEILSELSKTEVAGMPFEDGKRIGHIALEIIIDRSGGAPSSVWQNFVLDLAGDPRIASTAKNYREWWMPIGENRIKTVTSWLAKEDLRLFLGAIEEYGKQSGDEALNRMFPARKKFLEGLYEHGIIRNTRLMLGNSAASTVKKVLGKSMTTNFIKLSDSSMNDKAVIYLDCGDFHIVEGSHAFKLWIYMGLPSARLSDYSLKKLSHSDLTTGFVRDFNNAYDEGSYKAITHSPTTWQRNAIEFLAENGVELDLEKVLSREDYQVYLRRFGTPVVKKIKTEASKTLEAQILRILETKSPIKAKGLVNAMLSEFGLVIERSKINSILYSLRSEGKAVLDSEYFWSLPEDH

SEQ ID NO: 4190 - protein, 1008 aa, Marinomonas fungiae
MSLVNFIKGLISKDEQHSSHKDNAYEWQSDSFGLIFKTDQSVYHCLNQGEGSGRQLVQHILLKMLEERDIAEALPNGFRIDSEQACLLEPDDAEALGLPPFFNGFFDIDIQGRTTKSSFALQLFVKYGNQKYPVRRKGPVLVLSEQTKFLLTPEQLDAVIAVEEHSGLSPDDRTELNNTLAMAKLQNAINQGLKLDLKHFNNFELVQPEHITVTAKQNADGSLELSPNMGEGSTPEELENRWAQLANDGQVMRIKDRIVLLSDEKKRAVQEVLQHRKIPAHKVAEFIKTPSAFLDASILNLDLGFSVRVSGIGKMVHIPFGQDSDGSNGWFSTNAQAEPPERLTKLLECEEDLESFEQSYAQAKAQNAESLMVNDENIDISDEKRVQESISEVRERISNPPSADGATDIDEVLERKEKVSLLLKDADEHNQEIVSKVSQLDKNTGFDKTNLARTPFPHQESGISWMVALLKSVLSENHDDMYRVQGALLADDMGLGKTFMTLVMLSEYLAMQKSQSNPEKPILIVAPLSLLENWEQEVEATFKLSPFRDIKILQSGRDLKEFRKQGAERESMQLTTVMNETTADHESIRYALHVGSEAATKRLDMDRRIVITTYQTLRDYQFSLCVIDWGVVVFDEAQNIKNPNTQATRAAKALKADFKLLATGTPVENSLSEFWCLMDTAQPGLLGDWGYFRERWIKPISSASEEEKAEKRLEVGEDLRSAVGQFMLRRTKEDQLQNMPNKTILTGVHLDMPDNMKFEPNLARNMSGGQLLAYNDIIEEYRKKKAKEDGSGHALAVLQNLRSISLHPRLDEIFKSPPSNAKEAQNQLQESEKLRMMLDTLAEIKSKQEKVIIFATTKKLQAVLKLCLDKLYGLSIHIINGDAKAVATKKDQLSRKGMITDFEAKEGFNIIIMSPVAAGVGLTVVGANHVIHLERHWNPAKEAQATDRVYRIGQKKDVFIHLPCLLHPEYDSFDVNLDRLLAKKTMLRDAVVTPEAVNEHELMNSMGF

SEQ ID NO: 4191 - protein, 730 aa, Pseudomonas sp. GM17
MDFSTLVHLWSAARFEQLIAPTMVVGFVIVLCTWYLVRYFYRSFRLSGRLKKLTAHLLKAHSLAAPQRRTELENLFKGTNLEHSWREYAETLHDQFELSGGEQALVRSRATAGAAHFFSPQSVIDTPLGTEFYKHLPGILTGIGIVGTFFGLMLGLQHFDPSTPELVNSSVDKLLKDVLFAFIGSFISIMASIVVTITEKWRLGRCYKHLETFNETIDGLFDSGVGEEYLAELVRSSAESSVQTRQLKDSLVTDLREMLQNLVDTQVRESLKLADTLSATYRDSGQLLADQVSGAIENSLKSPLEAIAGAVQAASGEQSGQVQNLLQDVLVAFMNKLEGTFGQQFNGLHELMGQSVAAMQSMQQGFSTLIQDMRSASESSTQNSSTMIAKLLSDMQAGQSAMQAGMNEMLVNLQTSIARIGNEGEDAGARMAQQLEKLFAESEARQQAMAENLQAFVESIKQNIGQGQQETMAKIAGSVEVLGEQLSAVFKQLEHGQQQMDQSTRAAQADLHQGTRDLVGGLDEQVKALLQTVTEQQKSAQDTVKALSAQTEQHLQSMQQGADKMRMAAERFETAGQSVARASESTAGLMGTVQGAGTELAQASRELNTVVADYRNNREALAKTLAVIEGVVASAQGEASGRSQYLQDLKVQSERMQALNREVYEYLENISGVLGNGFKEFGEGMDRTLRQTLGSLDAELDKAVKSLAGGVEGVKESLEDFGDIMERIRQ

SEQ ID NO: 4192 - protein, 247 aa, Pseudomonas sp. GM17
MFGKQMPSAARSRDEGEKPFWISFADLMTAMMILFLVVMVAALSSVTQRINQAEQGEKQRSQDISQICEHLSLKAKAANRTIVVDCKDNRISFGDAGRFGHNQYALSSEGQTALQDVVPMILDAANSDEGRKWFKQVVIEGSTDTDGSYLYNLHLSLQRSEWVMCSLLDSRSPLQVGLSPEHQQQIRSIFLAGGVSFNNAKDTKEESRRVELRMQFFGLKEKEENLKPEVPVFNNTDMEKCQLAMNR

SEQ ID NO: 4193 - protein, 541 aa, Pseudomonas sp. GM17
MTSPIARLSAAIDLGLSVYRTGHASEPLARFPRLGAARADLYERFERAEKALPPPQEKRREAINKFRNVLPLSASEWRLVFAGLSDKTERVGPILEDEQLFVRVHKEVHDRIEKRKLSRRDWLALCFSYFGYEASTPDQNANWCLLRADIQLGFDCVRAQQRREKEWIQIVQQHQELFSEQAGARLGDQMFNGEISDLSALQTIAQIPVSSWLWRRIFNVLISRIFMLDDTEFAQRLPDLVDIGREHPRYMNDVLSACLSRYHLADYREKPSSLLKQVALDNWGSPQIRSKQNSWLQYVDENVCAMVVAWFAKEDLEHFFNLLKGEAEVDQSRLHYWLRFANQMSYTRIVMGADAWNAGGRDFVHFREKNKGRLSRLIGAPGHNNAVVMQIGNYFFVEFSGTGNACYVYQADKSPFNPDKTQLDLTDLKQPYRALDRMRHSPAPSRPNRIEGWLSKFDDSLGKWGIRVQSQISSSGSPKPVALEDQIRDALKSVQHKVYDQRERGGAFQVQLSVADQTAIAALLRLGFKPVNHQPLRFWRQ

SEQ ID NO: 4194 - protein, 1082 aa, Pseudomonas sp. GM17
MLKRFLKGIGLQQDASLVTTAPVFSIEEQGLCYPLSLAEDAESWPLASYLDQLEEEEFVSQLSDRWLLTWDELYRLIDDPDHATSVPLLGLPAQTKLVPQLSSQGSLASNDFKVTISGWRDPQSNASIQIQRIGGTIQYNGAIEVLPESSWRLTGAVRQLYLAQQSEPGEVTNQIGWASIRKLARKASAGMDGFLDKTVVIKPESLRLNPRKSTVGNTPVIELEPSFEGQPANWLESFDGAKQVQDRYRVTGDDGALTHVLIEPEVKSVLDYVRSLPGRRVAGDDALSFVRNPYSALGDSAAQVLDADTYEEDLIEAGIFFHRFHLEPKLDDAGHRIERVNLTLEPISPVPQASIEITFNAAHELAPFVHELHLKLAAGMPAGFWQGYELELSDFDLRQLAGIGELLKRWQNEAAGIEFDSVLDLSLYGDRVTGIGEAERITSPFLVKEATENWLPPDVAMLGIDAEILGRWDPSDRAQFEAFEQRLDEARAAGDESVYLPESETPLSIAAAEQLFEAWSKKIAPVETALAKPVDKVGRAVLQIGHNIDEPTYVQVRQAALRSALDATSELPNLLKPEVVLRDHQLQGVAWLQHLFRLSPTDVSGCLLADDMGLGKTIQLLTFLVWYLEKYPEDKPTLIVAPVSLLDNWERELRKFFFADALPVLKLYGSALSAVKFKKEEIPADLKGKGIKNLLRPGWMGGAKIVLTTYETLRDQEFSLARQQWSIVVCDEAQKLKNPAALVTQAVKAIPARFRVACTGTPVENTLIDLWCLFDFIQPGFLGGLNQFGREYQRPIEAGLERDTVALERLRELIEPQTLRRTKQDIAKDLPAKIEDSACRALVMHTLQRNLYLSEISAYSQKQQINEQLDQKASHMLGLLHKLKLICAHPYSVQPDKRLRDNSPKLQWLMQTLESIKRAGKGDKVIVFTELRDIQRELQYAIQEHFGFRATVINGDTSTSSQSANSRQKLIDQFQDLPGFGVIILSTIAVGFGVNVQAANHVIHFTRCWNPAKEDQATDRAYRIGQEKDVYVYYPTIRDEAMPTFEATLDELLSKRRALARDMLSGASEIQTSEFEALLGTR

SEQ ID NO: 4195 - protein, 771 aa, Pseudomonas sp. GM41(2012)
MMELLKHLWPNFTSLTLGTTEALSAWFWIVMATIAAGCIVFLLLDWFRFKVRMRALGSLLEGQNRENLALNRRETLQKALTLKSTGIGALWREFDDSLVSSSDHKQLFNTLDAEQFFNPRTLASGLTSSRLLASLPGFLVGLGVLATFVGLTIGLSKLKLDSHAGVEQLRSGIDVMIQGAAVAFMTSVWGVFFSLLLNFIEKLVERFALSQIHALQHRIDSLYQLIPAEQSLVHIADYSRESKEALQELHERIGDRLQENLAGMGDAMQQAMTDALNNIMAPAIQTLISTSSQQSTQMLEKLVGNFMSGITSAGREQGNLMQQAAADVNAAVGGMTARLNQLSHTLSDQQTRQLEGSQQQNRQFEEQLGRIASAAEQSQQQTESRFNELMTDLTSQLNSQLGSAQRRDEERQTMVERLLAEASASQSALLDRVTNSSREQLQALSEAGNQRHDNLEKMFSRLMTNLNAQLDSQMGAAEQREQERSLRHEHQQASSFAQHQQQVSALAEASAAQQHALEETVGKLLNNFGEQMAGQGQQSEQREQSRQQRFNEQLESMTMQQQELLKGIASAVQVTQQQSRQMAEQHQQLMGGLQQASDAAFASSRHMDNSANQLGLLSTNVRQAAELLGQRLESVTQRIESAGTQNAQLATQLNSQAEVLAKLQQALLDSAQRFEQAAGEARNGFGEMRSHQQEFLIGVRGEFTALGEALRKQVEGVEQQAEQWLRAYAGEVRQQVHERMDQWNKETLSFANTMHAAVQAISNVVDELEAH

SEQ ID NO: 4196 - protein, 247 aa, Pseudomonas sp. GM41(2012)
MKRWRKSNEAPMEDEDPYWRSFVDIMSALLVLFILASVVLILQLMEKSAQFDKQVSQLEQAEKVRRTILDEAVEELRKRGVKVQVTENHTVLRIPNELLGFDTGAFEIQPRYQPTALEIGEVIAQVIKRDDRINYLDTIFIEGHTDNRPFPGFMGKGNWGLSTFRAISLWQFWSSELPQAQRLDRLNNQDGEPLFSVSGYAETRPVNKDQGSEDSYRLNRRIDIRFTIRRPQSTEYEALKTLLENSQ

SEQ ID NO: 4197 - protein, 652 aa, Pseudomonas sp. GM41(2012)
MMKLPPIENHSGEWLPTVIEGWGQLVEKTKRMKTKVGSSDAFERTLAALRDMASTGRFDDLRELLGRRLGARALTWLWLHDEVVGKRLFNARILDVLVEYQQPRLSRLTLIQLIQLYFRYFDGLDAYNKHGEDSLRKRLELHLLVQISRIPSRPTTFGTDPLMTLNREGEWLLTLDGPVQLINRVRDEGGELTEAFEKMGLNGFDVGRYGDVCRAHYYLAVLRELSPGEWSDVLDELLKPEVNNAPYEDGRRIGHAALEIMIDRAGSEPGDAWQNFILSLAGDPRIASSSKNFREWWQPLGEERIGKVRGWLSKEDLRLFLQAVQQYGVESGKQDLQRMFPARKLFLEGLYRLGLIRHTRLMLGRLAKESVHRILGEEMKTEFARMDGIMNDKAVIYLDCGDFHLIEGSHSFKVWVYLAQPGTSLQSYERNHFTHSDLISGLPHKYREMYPSLPYEAIVHNGTWQRKVFEFLANNGIGLDLEQLLSRQEYRSYLSRYGIPVVRRKNAQVLKSTERSTWAAAPTFVQAERGAVAPTRPQQTSLNSAPRPPPQPEELHSSTISKSIKPLPESGNDPLKDLLSHLGTFELNVLRYFATNPGDKVRYAANVLTVEAREINQVLYGRLNALCQQTDSFGWSVRADIAAALDHLPAGD

SEQ ID NO: 4198 - protein, 1009 aa, Pseudomonas sp. GM41(2012)
MGLVEIFKSLLGEGSAKLSTQQGFIYHADSEGLNLYLDRKVYADLVEGLGNALQKIQLVVLHMLEEQGIALPLANGFHLSAEDAAGLDDEQAEILRLPRRFNMGFVSQLSGRTGNSSFKTQLLVSSDSGEVPFTRKGPLLYLTLSEAYRLTPAELMGLMAWEHHQKLQPEQRGESANLRLMAELQTAARSGMRIDLSHFERLEVVVPENIGVVATRLPDGSLILCPSLGDGSTPDQLEKRWSQLDMGADGGVLRIDNRVVLLDPQKMQAIKEVLGNKRIPADRVAEFIATPSAFLDAALVNLDLGFSIRVAGIGKLQHMEFGELDTKKQDWFSLDTRAAPVEIISKLVQSEEDLVRFSDAYAAAKQQGAESLIFDGESVDISNSERVEEQLAKAKTAFSISKTETPDGSDAADDIKERVSVLLHDANKINNELLRMASQAKAVREPNWEAYARQPFPHQREGIDWMLGLLASALQADHDDLYRLQGSLLADDMGLGKTYMSLVTVGEYLSEQKAAGRPQKPVLVVAPLSLLENWEDEVSHTFNGIPFRDIVVLQSGRDLSRFRIKGAERESSQLASLMDDEGQMADDALRYALAIGPECGAHRLDMDRRLVLTTYQSLRDYQFSLCRIDWGLVIFDEAQNIKNPNAAQTRAAKGLKADFKLLATGTPVENSLGDFWCLMDTAQPGLLGGWREFRDTWIKPILNAADDDRDEVRRDLGGKLRDAVGAFMLRRVKEDQLRGLPSKTIHSGVPQLEGSQLSHDTQLAQCMSGAQLRAYDAVLDNYRSQRATEDMRGRALGVLQNLREISLHPWLRQESHLLAGNAKEARTRMSESGKLVVLLNVLDRISKREEKVILFMVTKRLQRVVKLWLDQIFDLNISIINGDTAAVPKKSDVLTRKQLIAKFEAQAGFNVLIMSPVAAGVGLTVVGANHVVHVERHWNPAKEAQASDRVYRIGQKKEVHIHLPIALHPRHDSFDVHLDRLLRGKLMLKDAVVTPEIVGEVEMIQSMGL

SEQ ID NO: 4199 - protein, 625 aa, Rhodanobacter sp. 115
MNFIHDVLAGGVLVVTLATISAALLFDYLWRYATRGLLLRQQLKTVAARIEALANKPRPTLREELKKVFEGTACDHAWSEYEETLHDQYDIRNGERKVREVRATVPSESFINLETTVDPRIGSEYFKHLPGIFTGLGIIGTFNGLIQGLVAFNPDVDADALKVGLSGLFGHVLHAFSFSMMAIILAMIITITEKWIYAACAKWVGRVSQKLDSLFRAGVGEEYLSDLLRSSQDNATQTRQLKESLVQDLKELLTQLAERQIAATQQLSIEIGERIEGSLKEPLAHIADTVRTASGQQTSMATTAIETLMRAFIDKMQETLGGQMDGLNEMMRTSAQSMTQVEAAMRSLVTDMQRVSGESTSGMQQAVRDLIEQMGEQQRLHANQSTVSINNLLTQVESSVKEVARQQENMSQRSEQSVSALMEAMHDRVDQLASSNRETQERGVALAASLSEVSTKAISGLEEGALAVGQALDSVRAAVERLGILTEKMSALQSGLNQSTEQIAQSSNVLGGAAQSLSTAIGTLGAATSHFDAFGKLVQAESAARSGMLEDLRCLTQQAQQTGQSLTSLTDEVRDKLGDMVAKFGVGVSQALEHNLATYNKQLSDAVGMLKSAFEEIAESVDAAS

SEQ ID NO: 4200 - protein, 241 aa, Rhodanobacter sp. 115
MMFAKVVRRKGKSKSEGEKPFWISYADLMTAMMTLFLAAMAVTMVAITHKVRQVEAKEVIRAKQIKQICSNIRSQLANDGVVHVDCEDNRISFGEAGRFGHDDYHLPSAAGPALARLVPAVLEAADDPLGRKWLKQVVIEGFTDTDGSYLYNLHLSLERSEWVMCLLLDPQRNTDLSLTSQQLQRVRDLFLAGGVSFNGAKSTKDASRRVEFKLQFYGSDTDSSQAKPIFQVTATDRCMLH

SEQ ID NO: 4201 - protein, 523 aa, Rhodanobacter sp. 115
MLANLVRERIPDADHLPLAVQVAEVKHRFGTASAAIRPDRVEAAARQALSDLGKLRASHRFVLAHSLAQPIAGLEGRSVLDHERVARQLLNDWESAARNQVLKLSHWRGLFRSYMQAPDGDWQKRLRLLLSKTIEPVVKRRRGRPAWLDTLTRHEHLLGDEPCLPYVDEMMAGEHELLADLRDHVDIPPTSWFWQQLKSRLFQQIASIGEAAFRASIDAFLELDHLIPLMGDELPKAILERYDAGRDRSIQPSLMDFSLKAWGSPQLARNTKWDLCRPSVRQMVNSWLAKDDLEDFYRLCNTERMVDERRLAFWLRFKDQMTFTQILLGGRLRSSRDPDVRAFIAKKGERLGDLTASTSTNNAILMQIGGWLFIEFSEVGTAARAIRLSDGVIKTGMASYPLTTLRHTGEQWTHQPSAAWEEKFLDRLRDVGVFPDDSKTKRSPRAPSLPQNEITASPSVRRVQPPPTLISKLRNMDVEVVDNRLKGGALWVYTSRNTTAEELAEIRNLGFRWKESKRGFYLP

SEQ ID NO: 4202 - protein, 851 aa, Escherichia sp. KTE114
MFSLTSFLDTLTSVNPENVPIYVAIVVGVLLLGFIVRYAIPSFRVSARFKQKAKAIRGLGNEKPAQQLEKLDALFSDKFFAHPWSEFKESLHRQFEFDENSGQKKISAIRSTAPASAWFTEPLLVEIPLYTEAFKHLPGILTGIGIIGTFSGLMIGLHHFDPSTPEQVSASVANLLRDVLYAFLGSAFAITFSILVTMFEKWRLAQCYKNLELLTASIDQLFEGGVGEDYLSQLLSSTKENTTHARQLKDGLVTDLREMLQNLVDSQMRENQKLAETLSTTYRESGQQFAEQVSGAIETSLKNPLDKIAGVVQTASGDQSHRVQSMLENVLTAFMSKMDNTFGQQFTTMQEMMGRSVEAIQSMQSGFSTLLQDMRQAGDDSRQGSAQLISQLLSEMKSGQQEMQAGMNEMLRSLQESVARIGAEGEGAGERMAQQLEKIFADSEAREKAMAEQMRAFIEAIQSSVQQGQNETMEKMAASVDTLGSHMATLFAQLENGQQQLNQQQNQAQNLLMGNMSKGVETLTQNLAGVFSQLESGQKQMSQTQEQGQRVLHEETQQLLARSEAREQAAAEQQQQFMTSLQQTMHSGQDALREKMTSGIDHLGSQLGNLFGQLEEGQKSLSQQQQSAQSALQQEAQRIIGQLESQVESLMQMLREQQSASGELLQRMAKNTTRHLEEIQTGADKMRVAADRFEAAGDRVAEANQLTAEVLNGTQQAGRTLSSASAELGALIADYRNTREVVANAITALETLINRSHDEQSSRSRFVDDLKAYSERLQQYNREAQEFLHNIAEVMGTSFESFTTGVENGLNRSLQEMDTQLTKAAGALSSSVEIIGESVDTLETVLRHRRA

SEQ ID NO: 4203 - protein, 244 aa, Escherichia sp. KTE114; identical to SEQ ID NO: 2015

SEQ ID NO: 4204 - protein, 595 aa, Escherichia sp. KTE114
MTSAIEKLKTRLLPYREQNVQPTVSHAFHYLQRVIAQLERKVDARAVQMVPPLEKRRQAIARLRAGEMPGPFEWKMIFFGLNDVAEGDLFEIALIDDATNFARIIAEIEQKIAQQRLTRREWLALCTSYFGHSNDTPEKNPQWLQLRTQIARGFQQLKESAPRQMSWMSVIDTYSDIFTDNAGFLLGQQLGRGEITDISVLEKVAQIPQTSWLWRKIVNHLVNEIFCLTDDDFQQKINSLIALSRQLTRFKDNILAATLTRYYQSAFKHQTHFELKQLALEYWGNPQLTSRNKSWQVHVENPVLLMVQGWFAKDDLKLFFELLKGNRDVDHARLFYWLRFANQMSYTRIVLGEDALRSKDADYVEFRAKNAGRLSRLQGSGSRDNNAMIMRIGDYLFVEFSKVGAMYAYHMGNAPFNPETGILDIDYDLKDKRNNRRKVRLRLPHLSPVFLYSLNRIEGWMSRYDEELRKLGIDYVAEDINQSSVTLDISRFNASKTVSRPEPASLPEHEVSDVKSDREEQIKIIASSLKAKKELPGREQQIREIIRSVDCKVMDKRGLGGAIHIQFNEPDHEAAQKLLSLGFKPVLGKFTYWSK

SEQ ID NO: 4205 - protein, 1079 aa, Escherichia sp. KTE114
MFKKLLGKFIKENTSLPASFVPLYVMKEEGFAFPFSLADSEDNWPVASCLEQLHEEDYVSHWSDCWFLGWDDFYRIRKNDDYASSLAIFAFPPQRNLTAHLAATGSISDDTFRVFIDKWTLPDDYRPVEITCTGASFSSAEGTFVLSEENWQLLDALQQLRLQQRQTPGETVNQTSWAKIRRQAKKAGAKLDDYLAKTIVIRPESLQLKLRKSLVVDTPVLEIEPVFDEQPANWLQSFDRTQQVQDRYRVLGDDGVLNHVILSPEVKDVLTSVHAITGRRVAGDDALSFVRNPYTWIGEEASQVLDPDVYEQNLQDAGIYFYDFRLEPQIDENRQIASVTLLLSPRTEQSVADETYIFKRPGELAALLSELEQKLAAQLPAGVWQGYDLELSRFSQEELQGYQALLENWQHQAAGMNFTHVLDLNKYSDRVIGIGEFEKISSPYLVKSESEKWLPENLAQEMCEAMFSGWDLDNHQHFQELEERLEEAKATDAPEVAMPWNDNLLPREEAEIFHDKWKKKIDGETNDGVNSEPVSRAVLLIEQNIEQALYVKQRRDSLLGAHQAEVELPMILKTSIQLREHQRKGVAWLQQLYLKSPTETAGCLLADDMGLGKTLQILTFLIWHRERFPDAPPSLIVAPVSLLDNWEREVGNFFLREQVSILKLYGNELKAKKCAKESIPQALKSKGIKNLLQSDWVGDAHIVLTTYETLRDQEFSLARQPWSIMVCDEAQKIKNPAALITQSAKAIQAQFKVACTGTPVENTLVDLWCLFDFVQPGLLGALNNFGKDYLRPIEQQNDNAVLESLRKLIEPQTLRRTKEEVAKDLPDKIEDQRCKQLNMLPLQRDLYTHSVASWQNQQEISEGLDQRGSGMLGLLHRLKLICAWPYSVSADLRLRNDAPKVKWLLETLNTIRQSSDDKVIIFTELRDIQRELQHLIAQHFGFKPFIINGDTSTKSGSDQNRQSLIDAFQSTPGFNVIILSTIAVGFGVNVQKANHVIHFTRCWNPAKEDQATDRAYRIGQQKDVYVYYPTVRDSQLMTFEETLDELLNRRRALARDMLKGATDLTAADFEAVLAGTPQA

SEQ ID NO: 4206 - protein, 851 aa, Escherichia sp. KTE11
MFSLTSFLDTLTSVNPENVPIYVAIVVGVLLLGFIVRYAIPSFRVSARFKQKAKAIRLLGNEKPAQQLEKLDALFSDKFFAHPWSEFKESLHRQFEFDENSGQKKISAIRSTAPSSAWFTEPLLVEIPLYTEAFKHLPSILTGIGIIGTFSGLMIGLHHFDPSTPEQVSASVANLLRDVLYAFLGSAFAITFSILVTMFEKWRLAQCYKNLELLTASIDQLFEGGVGEDYLSQLLSSTKENTTHARQLKDGLVTDLREMLQNLVDSQMRENQKLAETLSTTYRESGQQFAEQVSGAIETSLKNPLDKIAGVVQTASGDQSHRVQSMLENVLTAFMSKMDNTFGQQFTTMQEMMGRSVEAIQSMQSGFSTLLQDMRQAGDDSRQGSAQLISQLLSEMKSGQQEMQAGMNEMLRSLQESVARIGAEGEGAGERMAQQLEKIFADSEAREKAMAEQMRAFIEAIQSSVQQGQNETMEKMAASVDTLGSHMATLFAQLENGQQQLNQQQNQAQNLLIGNMSKGVEALTQNLAGVFSQLESGQKQMSQTQEQGQRVLHEETQQLLARSEAREQAAAEQQQQFMTSLQQTMHSSQDALREKMTSGIDQLGSQLGSLFGQLEEGQKSLSQQQQSAQSALQQEAQRIIGQLESQVESLMQMLREQQSASGELLQRMAQNTTRHLEEIQTGADKMRVAADRFEAAGDRVAEANQLTAEVLNSTQQAGRTLSGASAELGALIADYRNTREVVANAITALETLINRSHDEQSSRSRFVDDLKAYSERLQQYNREAQEFLHNIAEVMGTSFESFTTGVENGLNRSLQEMDTQLTKAAGALSSSVEIIGESVDTLETVLRHRRA

SEQ ID NO: 4207 - protein, 245 aa, Escherichia sp. KTE11
MFNRVFNGRQRRSDEAEKPFWISYADLMTAMMVLFLVVMVASLSSVTQRIQQAEAGERSRGHDIARLCEKLELQAKNLNKTIQVDCHDNRISFGEAGRFEHNRFALNAEGLQALQDVVPLVLEAANSDEGKKWFKQIVIEGFTDTDGSYLYNLHLSLQRSEWVMCSLLDSRSALQQKITPEQQVQIRKLFLAGGVSFNNAKESKEASRRVELRMQFFGLKDKKHDESMDVVPGISQETCQLGIMQ

SEQ ID NO: 4208 - protein, 595 aa, Escherichia sp. KTE11
MTSAIEKLKTRLLPYREQNAQPTVSHAFNYLQRVIAQLERKVDARAVKMVPPLEKRRQAIARLRAGEMPKPFEWKMIFFGLNDVAEGDLFEIALMDDATNFARIIAEIEQKIAQRRLTRREWLALCTSYFGHASDTPEKNPQWLQLRTQIAHGFQQLKESAPRQMSWMSVIGTYSDIFTDNAGFLLGQQLGRGEITDISVLEKVAQIPQTSWLWRKIVNHLINEIFRQNDDDFQQKINSLIALSRQLTRFKDNILAATLTRYYQSAFKHQTHFELKQLALEYWGNPQLTSRNKSWHVHVENPVLLMVQGWFAKDDLKLFFELLKGNRDVDHARLFYWLRFANQMSYTRIVLGEEALRSKDADYVEFRAKNAGRLSRLQGSGSRDNNAMIMRIGDYLFVEFSKVGAMYAYHMGNAPFNPETGILDIDYDLKDKRNNRRKVRLRLPHLSPVFRYSLNRIEGWMSRYDEELRKLGIDYVAEDVNQPSVTLDASRFNASKTVSRPEPASLPEHEVSDAKSDREEQTNIIASALKAKKELPGREQQIREVIRSVDCKVMDKRGLGGAIHIQFNEPDHEAAQKLLSLGFKPVLGKFTYWSK

SEQ ID NO: 4209 - protein, 1079 aa, Escherichia sp. KTE11
MFKKLLGKFIKENTSLPASFVPLYVMKEEGFSFPFSLADSEDNWPVASCLEQLHEEDYVSHWSDCWFLSWDDFYRIRKNDDYASSLAIFAFPPQRNLTAHLAATGSISDDTFRVFIDKWTQPDDYRPVGITCTGASFSSAEGTFVLSEENWQLLDALQQLRLQQRQTPGETVNQTSWAKIRRQAKKAGAKLDDYLAKTIVIRPESLQLKLRKSLVVDTPVLEIEPVFDEQPANWLQIFDRTQQVQDRYRVLGDDGVLNHVILSPEVKDVLTSVHAITGRRVAGDDALSFVRNPYTWIGEEASQVLDPDVYEQNLQDAGIYFYDFRLEPQIDENRQIASVTLFLSPRTEQSVPDETYIFKRPGELAALLSELEQKLAAQLPAGVWQGYDLELSRFSQEELQGYQALLENWQQQAAGMNFTHVLDLNKYSDRVIGIGEFEKISSPYLVKSESEKWLPENLAQEMCEVMFSGWDLDNHQHFQELEERLEEAKATDAPEVAMPWNDNLLPREEAEIFHDKWKKKIDGETNDGVSSEPVSRAVLLIEQNIEQALYVKQRRDSLLGAHQAEVELPMILKTSIQLREHQRKGVAWLQQLYLKSPTETAGCLLADDMGLGKTLQILTFLIWHRERFPDAPPSLIVAPVSLLDNWEREVGNFFLREQVSILKLYGNELKAKKCAKESIPQALKSKGIKNLLQNDWVGDAHIVLTTYETLRDQEFSLARQPWSIMVCDEAQKIKNPAALITQSAKAIQAQFKVACTGTPVENTLVDLWCLFDFVQPGLLGALNNFGKDYLRPIEQQNDNAVLESLRKLIEPQTLRRTKEEVAKDLPDKIEDQYCKQLNMLPLQRDLYTHSVVSWQNQQEISEGLDQRGSGMLGLLHRLKLICAWPYSVSADLRLRNDAPKVKWLLETLNTIRQSSDDKVIIFTELRDIQRELQHLIAQNFGFKPFIINGDTSTKSGSDQNRQSLIDAFQSTPGFNVIILSTIAVGFGVNVQKANHVIHFTRCWNPAKEDQATDRAYRIGQQKDVYVYYPTVRDSQLMTFEETLDELLNRRRALARDMLKGASDLTAADFEAVLAGAPPA

SEQ ID NO: 4210 - protein, 851 aa, Escherichia sp. KTE31; identical to SEQ ID NO: 2014

SEQ ID NO: 4211 - protein, 244 aa, Escherichia sp. KTE31; identical to SEQ ID NO: 2015

SEQ ID NO: 4212 - protein, 595 aa, Escherichia sp. KTE31; identical to SEQ ID NO: 2016

SEQ ID NO: 4213 - protein, 1079 aa, Escherichia sp. KTE31; identical to SEQ ID NO: 2017

SEQ ID NO: 4214 - protein, 657 aa, Sphingobium sp. AM; identical to SEQ ID NO: 4092

SEQ ID NO: 4215 - protein, 236 aa, Sphingobium sp. AM; identical to SEQ ID NO: 4093

SEQ ID NO: 4216 - protein, 550 aa, Sphingobium sp. AM
MARLQQRLTDVGAAAFRDMPEPDLRALKGHVQSLQAMLSGAGAGAGASNDRIQTELVRFRETGKLHDVRSARLVSWGTRLRSVGQPALIEDGERFDPLLSEIDSFRSMPRPYRRCWRGLLDGYVNYDPGSARGAGDRNWRVLREYLNDNLPQLERSGQAPDWLAAIDDHANLLTEDPCTRYGAEILTGEGDPLEILRRDLSAGDTSWIGQRIFEAQIEAAVRFDDRRFRDVLPRVIGLIEEHDVLADEGLSRVLDRYAECASIEVDPALCETSVTRWGNPWLERNDTLWTLVRPDTRRMVSSWHKLRLIEDFFNLLSADGINDQRRIKFWKRHVDQISDMHFALGDAAYRDPRPSFKALRQMMKGRMMSLTSGGVSSNNAFIMRIAGHVYVEFGEEGNAMFAFDAAKLPFDLTKMQVAGNKTALKHPSHVARIVHNNGAGERWERRADRLIASLSTARGGPQVSHTTPSYGARPSASPPPSARSSSTGSSVGKDAELFAFLAKHGIKTADSRDKGGSLWAYAPRSGPAANELTRRNFAWAERRGAWYLRS

SEQ ID NO: 4217 - protein, 1073 aa, Sphingobium sp. AM; identical to SEQ ID NO: 4095

SEQ ID NO: 4218 - protein, 851 aa, Escherichia sp. KTE52
MFSLTSFLDTLTSVNPENVPIYVAIVVGVLLLGFIVRYAIPSFRVSARFKQKAKAIRLLGNEKPAQQLEKLDALFSDKFFAHPWSEFKESLHRQFEFDENSGQKKISTIRSTAPSSAWFTEPLLVEIPLYTEAFKHLPGILTGIGIIGTFSGLMIGLHHFDPSTPEQVSASVANLLRDVLYAFLGSAFAITFSILVTMFEKWRLAQCYKNLELLTASIDQLFEGGVGEDYLSQLLSSTKENTTHARQLKDGLVTDLREMLQNLVDSQMRENQKLAETLSTTYRESGQQFAEQVSGAIETSLKNPLDKIAGVVQTASGDQSHRVQSMLENVLTAFMSKMDNTFGQQFTTMQEMMGRSVEAIQSMQSGFSTLLQDMRQAGDDSRQGSAQLISQLLSEMKSGQQEMQAGMNEMLRSLQESVARIGAEGEGAGERMAQQLEKIFADSEAREKAMAEQMRAFIEAIQSSVQQGQNETMEKMAASVDTLGSHMATLFAQLENGQQQLNQQQNQAQNLLIGNMSKGVEALTQNLAGVFSQLESGQKQMSQTQEQGQRVLHEETQQLLARSEAREQAAAEQQQQFMTSLQQTMHSSQDALREKMTSGIDQLGSQLGSLFGQLEDGQKSLSQQQQSAQSALQQEAQRIIGQLESQVESLMQMLREQQSASGELLQRMAQNTTRHLEEIQTGADKMRVAADRFEAAGDRVAEANQLTAEVLNSTQQAGRTLSGASAELGALIADYRNTREVVANAITALETLINRSHDEQSSRSRFVDDLKAYSERLQQYNREAQEFLHNIAEVMGTSFESFTTGVENGLNRSLQEMDTQLTKAAGALSSSVEIIGESVDTLETVLRHRRA

SEQ ID NO: 4219 - protein, 245 aa, Escherichia sp. KTE52
MFNRVFNGRQRRSDEAEKPFWISYADLMTAMMVLFLVVMVASLSSVTQRIQQAEAGEKSRGHDIARLCEKLELQAKNLNKTIQVDCHDNRISFGEAGRFEHNRFALNAEGLQALQDVVPLVLEAANSDEGKKWFKQIVIEGFTDTDGSYLYNLHLSLQRSEWVMCSLLDSRSALQQKITPEQQVQIRKLFLAGGVSFNNAKESKEASRRVELRMQFFGLKDKKHDESMDVVPGISQETCQLGIMQ

SEQ ID NO: 4220 - protein, 595 aa, Escherichia sp. KTE52
MTSAIEKLKTRLLPYREQNAQPTVSHAFNYLQRVIAQLERKVDARAVKMVPPLEKRRQAIARLRAGEMPKPFEWKMIFFGLNDVAEGDLFEIALMDDATNFARIIAEIEQKIAQRRLTRREWLALCTSYFGHASDTPEKNPQWLQLRTQIAHGFQKLKESAPRQMSWMSVIDTYSDIFTDNAGFLLGQQLGRGEITDISVLEKVAQIPQTSWLWRKIVNHLVNEIFRQNDDDFQQKINSLIALSRQLTRFKDNILAATLTRYYQSAFKHQTHFELKQLALEYWGNPQLTSRNKSWQVHVENPVLLMVQGWFAKDDLKLFFELLKGNRDVDHARLFYWLRFANQMSYTRIVLGEEALRSKDADYVEFRAKNAGRLSRLQGSGSRDNNAMIMRIGDYLFVEFSKVGAMYAYHMGNAPFNPETGILDIDYDLKDKRNNRRKVRLRLPHLSPVFRYSLNRIEGWMSRYDEELRKLGIDYVAEDVNQPSVTLDASRFNASKTVSRPEPASLPEHEVSDAKSDREEQTNIIASALKAKKELPGREQQIREVIRSVDCKVMDKRGLGGAIHIQFNEPDHEAAQKLLSLGFKPVLGKFTYWSK

SEQ ID NO: 4221 - protein, 1079 aa, Escherichia sp. KTE52
MFKKLLGKFIKENTSLPASFVPLYVMKEEGFAFPFSLADSEDNWPVASCLEQLHEEDYVSHWSDCWFLSWDDFYRIRKNDDYASSLAIFAFPPQRNLTAHLAATGSISDDTFRVFIDKWTQPDDYRPVGITCTGASFSSAEGTFVLSEENWQLLDALQQLRLQQRQTPGETVNQTSWAKIRRQAKKAGAKLDDYLAKTIVIRPESLQLKLRKSLVVDTPVLEIEPVFDEQPANWLQIFDRTQQVQDRYRVLGDDGVLNHVILSPEVKDVLTSVHAITGRRVAGDDALSFVRNPYTWIGEEASQVLDPDVYEQNLQDAGIYFYDFRLEPQIDENRQIASVTLFLSPRTEQSVPDETYIFKRPGELAALLSELEQKLAAQLPAGVWQGYDLELSRFSQEELQGYQALLENWQQQAAGMNFTHVLDLNKYSDRVIGIGEFEKISSPYLVKSESEKWLPENLAQEMCEVMFSGWDLDNHQHFQELEERLEEAKATDAPEVAMPWNDNLLPREEAEIFHDKWKKKIDGETNDGVSSEPVSRAVLLIEQNIEQALYVKQRRDSLLGAHQAEVELPMILKTSIQLREHQRKGVAWLQQLYLKSPTETAGCLLADDMGLGKTLQILTFLIWHRERFPDAPPSLIVAPVSLLDNWEREVGNFFLREQVSILKLYGNELKAKKCAKESIPQALKSKGIKNLLQNDWVGDAHIVLTTYETLRDQEFSLARQPWSIMVCDEAQKIKNPAALITQSAKAIQAQFKVACTGTPVENTLVDLWCLFDFVQPGLLGALNNFGKDYLRPIEQQNDNAVLESLRKLIEPQTLRRTKEEVAKDLPDKIEDQYCKQLNMLPLQRDLYTHSVVSWQNQQEISEGLDQRGSGMLGLLHRLKLICAWPYSVSADLRLRNDAPKVKWLLETLNTIRQSSDDKVIIFTELRDIQRELQHLIAQHFGFKPFIINGDTSTKSGSDQNRQSLIDAFQSTLGFNVIILSTIAVGFGVNVQKANHVIHFTRCWNPAKEDQATDRAYRIGQQKDVYVYYPTVRDSQLMTFEETLDELLNRRRALARDMLKGASDLTAADFEAVLAGAPPT

SEQ ID NO: 4222 - protein, 729 aa, Klebsiella sp. KTE92; identical to SEQ ID NO: 3962

SEQ ID NO: 4223 - protein, 247 aa, Klebsiella sp. KTE92; identical to SEQ ID NO: 2294

SEQ ID NO: 4224 - protein, 560 aa, Klebsiella sp. KTE92; identical to SEQ ID NO: 3964

SEQ ID NO: 4225 - protein, 1080 aa, Klebsiella sp. KTE92; identical to SEQ ID NO: 3965

SEQ ID NO: 4226 - protein, 851 aa, Escherichia sp. KTE96
MFSLTSFLDTLTSVNPENVPIYVAIVVGVLLLGFIVRYAIPSFRVSARFKQKAKAIRLLGNEKPAQQLEKLDALFSDKFFAHPWSEFKESLHRQFEFDENSGQKKISAIRSTAPSSAWFTEPLLVEIPLYTEAFKHLPGILTGIGIIGTFSGLMIGLHHFDPSTPEQVSASVANLLRDVLYAFLGSAFAITFSILVTMFEKWRLAQCYKNLELLTASIDQLFEGGVGEDYLSQLLSSTKENTTHARQLKDGLVTDLREMLQNLVDSQMRENQKLAETLSTTYRESGQQFAEQVSGAIETSLKNPLDKIAGVVQTASGDQSHRVQSMLENVLTAFMSKMDNTFGQQFTTMQEMMGRSVEAIQSMQSGFSTLLQDMRQAGDDSRQGSAQLISQLLSEMKSGQQEMQAGMNEMLRSLQESVARIGAEGEGAGERMAQQLEKIFADSEAREKAMAEQMRAFIEAIQSSVQQGQNETMEKMAASVDTLGSHMATLFAQLENGQQQLNQQQNQAQNLLIGNMSKGVEALTQNLAGVFSQLESGQKQMSQTQEQGQRVLHEETQQLLARSEAREQAAAEQQQQFMTSLQQTMHSSQDALREKMTSGIDQLGSQLGSLFGQLEEGQKSLSQQQQSAQSALQQEAQRIIGQLESQVESLMQMLREQQSASGELLQRMAQNTTRHLEEIQTGADKMRVAADRFEAAGDRVAEANQLTAEVLNSTQQAGRTLSGASAELGALIADYRNTREVVANAITALETLINRSHDEQSSRSRFVDDLKAYSERLQQYNREAQEFLHNIAEVMGTSFESFTTGVENGLNRSLQEMDTQLTKAAGALSSSVEIIGESVDTLETVLRHRRA

SEQ ID NO: 4227 - protein, 245 aa, Escherichia sp. KTE96; identical to SEQ ID NO: 4207

SEQ ID NO: 4228 - protein, 595 aa, Escherichia sp. KTE96; identical to SEQ ID NO: 4208

SEQ ID NO: 4229 - protein, 1079 aa, Escherichia sp. KTE96; identical to SEQ ID NO: 4209

SEQ ID NO: 4230 - protein, 851 aa, Escherichia sp. KTE159
MFSLTSFLDTLTSVNPENVPIYVAIVVGVLLLGFIVRYAIPSFRVSARFKQKAKAIRLLGNEKPAQQLEKLDALFSDKFFAHPWSEFKESLHRQFEFDENSGQKKISAIRSTAPSSAWFTEPLLVEIPLYTEAFKHLPGILTGIGIIGTFSGLMIGLHHFDPSTPEQVSASVANLLRDVLYAFLGSAFAITFSILVTMFEKWRLAQCYKNLELLTASIDQLFEGGVGEDYLSQLLSSTKENTTHARQLKDGLVTDLREMLQNLVDSQMRENQKLAETLSTTYRESGQQFAEQVSGAIETSLKNPLDKIAGVVQTASGDQSHRVQSMLENVLTAFMSKMDNTFGQQFTTMQEMMGRSVEAIQSMQSGFSTLLQDMRQAGDDSRQGSAQLISQLLSEMKSGQQEMQAGMNEMLRSLQESVARIGAEGEGAGERMAQQLEKIFADSEAREKAMAEQMRAFIEAIQSSVQQGQNETMEKMAASVDTLGSHMATLFAQLENGQQQLNQQQNQAQNLLIGNMSKGVEALTQNLAGVFSQLESGQKQMSQTQEQGQRVLHEETQQLLARSEAREQAAAEQQQQFMTSLQQTMHSSQDALREKMTSGIDQLGSQLGSLFGQLEDGQKSLSQQQQSAQSALQQEAQRIIGQLESQVESLMQMLREQQSASGELLQRMAQNTTRHLEEIQTGADKMRVAADRFEAAGDRVAEANQLTAEVLNSTQQAGRTLSGASAELGALIADYRNTREVVANAITALETLINRSHDEQSSRSRFVDDLKAYSERLQQYNREAQEFLHNIAEVMGTSFESFTTGVENGLNRSLQEMDTQLTKAAGALSSSVEIIGESVDTLETVLRHRRA

SEQ ID NO: 4231 - protein, 245 aa, Escherichia sp. KTE159; identical to SEQ ID NO: 4219

SEQ ID NO: 4232 - protein, 595 aa, Escherichia sp. KTE159; identical to SEQ ID NO: 4220

SEQ ID NO: 4233 - protein, 1079 aa, Escherichia sp. KTE159
MFKKLLGKFIKENTSLPASFVPLYVMKEEGFAFPFSLADSEDNWPVASCLEQLHEEDYVSHWSDCWFLSWDDFYRIRKNDDYASSLAIFAFPPQRNLTAHLAATGSISDDTFRVFIDKWTQPDDYRPVGITCTGASFSSAEGTFVLSEENWQLLDALQQLRVQQRQTPGETVNQTSWAKIRRQAKKAGAKLDDYLAKTIVIRPESLQLKLRKSLVVDTPVLEIEPVFDEQPANWLQIFDRTQQVQDRYRVLGDDGVLNHVILSPEVKDVLTSVHAITGRRVAGDDALSFVRNPYTWIGEEASQVLDPDVYEQNLQDAGIYFYDFRLEPQIDENRQIASVTLFLSPRTEQSVPDETYIFKRPGELAALLSELEQKLAAQLPAGVWQGYDLELSRFSQEELQGYQALLENWQQQAAGMNFTHVLDLNKYSDRVIGIGEFEKISSPYLVKSESEKWLPENLAQEMCEVMFSGWDLDNHQHFQELEERLEEAKATDAPEVAMPWNDNLLPREEAEIFHDKWKKKIDGETNDGVSSEPVSRAVLLIEQNIEQALYVKQRRDSLLGAHQAEVELPMILKTSIQLREHQRKGVAWLQQLYLKSPTETAGCLLADDMGLGKTLQILTFLIWHRERFPDAPPSLIVAPVSLLDNWEREVGNFFLREQVSILKLYGNELKAKKCAKESIPQALKSKGIKNLLQNDWVGDAHIVLTTYETLRDQEFSLARQPWSIMVCDEAQKIKNPAALITQSAKAIQAQFKVACTGTPVENTLVDLWCLFDFVQPGLLGALNNFGKDYLRPIEQQNDNAVLESLRKLIEPQTLRRTKEEVAKDLPDKIEDQYCKQLNMLPLQRDLYTHSVVSWQNQQEISEGLDQRGSGMLGLLHRLKLICAWPYSVSADLRLRNDAPKVKWLLETLNTIRQSSDDKVIIFTELRDIQRELQHLIAQHFGFKPFIINGDTSTKSGSDQNRQSLIDAFQSTPGFNVIILSTIAVGFGVNVQKANHVIHFTRCWNPAKEDQATDRAYRIGQQKDVYVYYPTVRDSQLMTFEETLDELLNRRRALARDMLKGASDLTAADFEAVLAGAPPT

SEQ ID NO: 4234 - protein, 800 aa, Pseudomonas sp. UW4
MLVEKAAYLLLTLILWTDIMEFLNHLLPNFSLLKSGSTEALGVVFWLIMAALFTYSVISLIRSGLSFRARMRALNTLVAGQIRENLALNRRETLQKALGLKVKRVGVLWHEFDDSLVSSSDHKQLFNTLDAEHFFNARTLAPGLSGSRFFGSLPGLLVGLGVLATFVGLTIGLSKLKLDSSGGVDQLRAGISVMIQGAAVAFMASVWGVGFSLVLNLIEKITERWALGRIHDLQHQIDALYPLIPAEQSLVHIADYSRESKEALQELHERIGDRLQESLVGMSEAMQTALTDALNNIMAPAIQTLVSTTSQQSTQVLEQLVSNFTQGLTSAGREQGNLMQQAAADVNTAVGSMTQQLNQLFQSLSDQQGRQQEVVRQQSGEFQDQLKQLSNSADQRQQQLETRFNELMSGLTGQLDIQLSSVERRDEERQLLFERTLAEASASQSALLEKSASASREQLKAMTEAGNEQHRSLEAVFSRLMMTMNSQLDSQMGAAETREQERAQRHEHQQAASLAQQQQLIGSLGQTSQQQINAIAETASAQQQALEVTVGKLLGNFSEQMAGHGQQAEHREQSRQQRFTEQLENMALQQQALLEGIATAVQATQHQSRQMTEQHLQLMGRLQQASEAAAASSRHMDSSANQLGLLSTNVRQAAELLGQRLESVTHRIESAGEQNAQLAGHLQSQAAALAQLQGALLESAQRFEQAATEARNGFGEMGSHQQEFLTGVRGEFTALGEVLRSQVQGIEQQAEQWLRNYSSEVRDQVHERMDQWNKETMSFANQMHAVVKVINDVVDELEAR

SEQ ID NO: 4235 - protein, 247 aa, Pseudomonas sp. UW4
MRWRKSNDVPMEDEDPYWKSFVDIMSALLVLFILASVVLILQLMEKSADFDQQVEQLKKAETVRQQILDEAVEKLRQRGIKVEVSENHTVLRIPNELLGFDTGAYEIQPRYQQTALEIGEVINQVVSRDDRINYLDTIFIEGHTDNRPFPGFMGKGNWGLSTFRAISLWQFWSTEIPEAERLNRLSNQDGEPLFSVSGYAETRPVSKQQRGEEDYRLNRRIDIRFTIRRPQSADYEAVKTLLGNSGQ

SEQ ID NO: 4236 - protein, 720 aa, Pseudomonas sp. UW4
MKLPPIDNRPGEWPPTVIEGWVRLVEKANRMKAKVGGSSAFERMLARFRDMAGSGRFDGLKELLTRRLGARALTWLWLHDEVVGFRLFNARMLDVLIEHQKPRLSRLTLIQLIQLYFRHFDHLDEREKQAESSLRGRLELHLLDQLKRMPAPRQAFGSDSLVTLRREGEWLLTLDGPLILVKSVRSKGEELGQTFETLGLSGFDVGRYGDICRAHYYLEVLRQLHPGEWDDVLDELLKPSVSKAPYEGDKRIGHAALEIMIDRAGDDPGDAWQNFFLTLAGDPRIASSAQNFREWWKPLGEERIAKVCGWLSKEDLRLFLQAVEQYGLESGKEDLKRMFPARKLFLEGLFRLGLIRHTRLMLGRSAKHSVKRILGGEVKTSFASMDSIMNDKAVIYLDCGDFHLVEGSHSFKIWVYLGQPGHWIKSYERNQFSHYDLTTSLPGQYKAAYPTLPYEAVTHNGSWQRKVFDFLAENGISVDIEKLLSRSEYKAYLSKYGMPVVGWKKARVEPLAQQGTTPDLALATKPSTIASVVEQRVVMPRVMTEDVHASGAPGTVDKELTDNQLSILTYLADHPGSLMGEIRRALKGDEAFFYEIQDSLRGSLSTYVQQNGAFQWSLSDKGNALLRKTALASVAAKVDRSPVAIDLGRLGVFELQVLWYFKENPGDKVRHAANVLGIDAREINRVLNGPLKSACEQSSSFCWSVKKEVSLALDRQPAGK

SEQ ID NO: 4237 - protein, 1011 aa, Pseudomonas sp. UW4
MIMGLADIFKSLLGEGGATLSNQQGFSHAADSDGVNFYLDKTAYTALLEGKGNSLQKVQMVVLRMMQEQGIAEPLANGFHVAAEDVAGTDEEQAEILRLPRRFNMTFASKIGGRTGNSGFRIDLAVLSESVEVPFTRKGPLLFLTSTESYRLTPAELMGLMAWERHQNLLPEQRGEAANLRMMAELQTAARSGMRIDLSHFDRLDVVVPENIGVIATRLPDGSLMLSPSLGDGSTPDQLEKRWSQLDIGADGGVLRIDNRVVLLEPQKMAAIKEVLSNKRIPADKVAEFIATPSAFLDAALVNLDLGFSIRVTGIGKLQHMEFGDLDNRKNDWFALDSRPAPAEIIPTLVQSEEDLVRFNEVYKAAKEQGADSIIFAGEVIDISDHVRIDEQLKTVERSLVDPETDLPSDEEPSVGPKERVSVLLHDADEINSALLRKASEAKPAHEPNWGAYARQPFPHQREGVEWMLGLLESAVQDDHGDLYRLQGGLLADDMGLGKTYMSLVTVGEYLARQKVAERAQKPVLVVAPLSLLENWEDEVNQTFKGIPFRDIVVLQSGRDLSRFKVKGAERESAQLASLIDEDGVMADDAIRYALSIGPEAGVHRLDMDRRLVLTTYQTLRDYQFSLCRIDWGLVIFDEAQNIKNPNAAQTRAAKGLKADFKLLATGTPVENSLGDFWCLMDTAQPGILGGWGQFRDSWIKPILSAAEDEKDEIRRKFGAGLREAVGRFMLRRIKEDQLKGLPSKTIYSGVEQPKGGQQLHAAHLSVCMKGAQLQAYDAVLNDFRARRATEDMRGTALAALAQLREISLHPRLREETKLMASNASEARANMAQSGKLVVLLELLDRIRQNEEKVILFMVTKRLQRILKLWLDQIYGLDVAVINGDTAAVAKKSDELTRKKLITVFESKPGFNVMIMSPVAAGVGLTVVGANHVVHLERHWNPAKEAQASDRVYRIGQKKDVHIHLPAVRHPQFDSFDVHLDRLLRGKLMLKDAVVTPEAVSESEMVQSMGL

SEQ ID NO: 4238 - protein, 685 aa, Ralstonia sp. A12
MNLETSLVTAPTPVLVTGAALAVLVVAFFAVFLGPGFAHWLRLRRIQQDIANFEAKDYPAEFRKVFAGDKQLAHHWKEYQESLHVQREERGGQMVVRAVRATAPAELYFNSQTVVDSRLRTEFFKHLPGIFTGIGIIGTFSGLIEGLRAFQVSENAATVRTSLESLMHSVGEAFLVSAAAIAAAMVVTFIEKLLLASLYRKTEEIAHAIDACFEAGAGEEYLSRLVKASEESASQSKLLKDALVEELGELLRELTSAQIAAGKEQQAQVVERLVQASREQLEAARQDNQVLGNTIAESIQQSLKGPLEDIASTVRTASGDQSATAARMLQDIMASFSQRLNDLFGGQISGLNELNQQTARSMQDAVGTLQALVANIEASSQRSTDAMAQRMAEAIEKIESRQEAMNAQSAAFIEQIRQLVATSQSETNQKLQGTLEAIGTQVTTMLARLSGSQQEVFESNRAREQSMADRASSIVTGMSESVEAAIKELGAATSQMAQSVTTLTQVTSSSVDKMNAGAEQLGTASRNFATAGERVTSIMGQVTSVSTKLSETSGSLTAGATAIQELLKDYRNQRDAISQLVTELRATVEAARKEATLTSDILGRIEGSANRLGAAQKQADEYLDGVSRVLGEAHTSFATEVKRTLDKANTEFHTKLSTAVGLLHSAVAELEVTLASMGSLAPVRR

SEQ ID NO: 4239 - protein, 236 aa, Ralstonia sp. A12
MVGARVVLKRGGRDEAEKPFWISFADLMTALMVLFLVVMGVALLAVTKNVTEKEKREEQHRKDIELILDRFVKAAKRYDGIKVDRDRHVIDFGDRARFAFGKSNLTTEQEVVLRQFVPEILRVANDELGKRVLKRVVVEGYTDKTGSYLSNLNLSLQRSQRVLCSMFAASGLSLLSGEQKESVRSLFLVGGYSFNAAKDTDEESRRVEMRLEFLGVGEQRPEAPEQSGNFGECALK

SEQ ID NO: 4240 - protein, 558 aa, Ralstonia sp. A12
MSALDHLASLLRPAVEEGAKTMTPSRGIDEAIAAMEARTKSRKGSALSEDYQLETLRHFWQSQEVKSFRDAYLLSWSLCLPHRPQGACVMEDRPRLERVLEGVDAWVSRPSAYRRCYQGLVKSYFTYDAIADGTALTGRKNWVLLREYLHERNRLIKDRNLNPEWVDTAVENRRLFGEQPCEPYVDALLRDDTGDIERLCEQLGIGKASWFLRELVLAQVKGATRLNHTQFQALLPRMLELLAVNEVLRDRGMILLLDRYAEVPNAALHQRLRDHSVAWWGNPWLPSNRTRWGGVAPEARAMVADWLKLEFIETFFTKLAEDGLGDPRRMNFWKRYVKSIDHIEFALGSSARNSREQDFVALRKKMTGLVRELDASGANNAFIMSMGSLVAVEFSGLGNALYGYDAKRSVPFDTTQTLRLEVNGRNSLKQKSKSILWLSHQDGIHNWDKWEDMFEATLAKEFGIKPTDSVPRATRAATKLPSTRQSSQETNQHAARAKSQPYSRSALAGLAREHGLEIDDKTSMGGNLWVRGGESDEIVNQVLTHWGFRKKAGKGWWK

SEQ ID NO: 4241 - protein, 1254 aa, Ralstonia sp. A12
MFKLFKNAKAQKNAWRRQWSPAGVVLTSDKAMPDVPAIEGSLLEGYLTQLVDDGLAVETEDGFLLGWDSMYAVLDMPAYVELSSLLQLPGFTNARPALRSSHSLTDRDFSIALAGWYGNDGLEFDEILNGPVMARDGHQALMRPEQWLLFKEVVAFSQRAEEERGDLAHRQAWGRIRRLAIAAGAHLDDFLYRSVVLTPEKLQIGLRRSESVSDDHVVEIEPVFEGAPANWLEVFDRAKDVRDRYDIVTPEGIVQILVTPKVRTVLQEVKRLPHRRVAGSRAQAFLLNPYATLGADAVDVIEESQFEQARENAGLDYERFVPLLERDATGYPVRVGLLIETAVASGPTSSEIQWLDDAELSSFTQALARALKRGNQLVAWGGYDFVVQGDAEQHLKELTAALEQRLAPPTLVSYSAVHDLSGYSARVDSIGIEKPYCSPYIAKRKEDDGWFPENVLPVVVYDPQDGSGPVAIPTSKTAIEQLKAGLQSSEQKGAGEVSVPWLPKPISVQEAKQIVKTFEEVFADIESGKPFDQEKVIQPPPSTKGPQKQLVLRANIQALEYEELRREALQSVPVEPNVPKSIRPEYALLQHQREGLAWMQHLFRLQTEYQVRGAVLADDMGLGKTFQLLALMAWLLELEPDMSPMLVVAPVSLLENWAEEANKFFQPGSLPLLTAYGDSLSELRVPRAQIDQRLQSEDGLVKFLRPNWIGSAKIVLTTYETLRDLEFSFAAQKWSLMVCDEAQRIKNPAAMVTRAAKKQNVDFKIACTGTPVENTLADMWCLFDYVQPGLLGALNDFGQRYRKPIEAKTEEERARVEELRARIAPQILRRLKSQVDTGLPPKIVVDECRRLQLSSTQRNLYAKAVESFKKRGDPTVTTPFKNHLGLLHYLRLVCTDPRPHGLGVFKPEPVRQYREKAPKLDWLLNQLHAIKAKGEKVIVFCEFREIQRLLQHYIEAEFGFRPDIINGDTKASANHVASRQKRIKAFQETPGFGVLVLSPVAVGFGVNIQAANHVVHYTRTWNPAKEDQATDRAYRINQKKPVYVYYPVVRADDFTTFDVKLDMLLEYKRGLAEDMLNGAGDVAPGDFNLAEVVPESEGAGIDERITLDMALRMGWQHFECLTGALWGKRGYGCYRTPGTNDNGVDIVAIDGRKGQLIQAKTSGTDGAALGWEAVKDVVTGEAFYRRRHPMVEFERVCITNQFFNRQAHENAALNSVELLDQTHLASLLERHEVTMLEVERMLFSEWQQHEATAQ

SEQ ID NO: 4242 - protein, 686 aa, Acinetobacter sp. ANC 3929
MLAFAEFLQNYFIIPISMLIFVLWIGFRFFTKYIQPAKNLNNKLLTIINALQAAKKDASSSKNILDSEFEHDTPLQHAWLNYKNSFHDIYETVDGEDLLVSSRATASSDVFFSQTVIVDTPLKVEFYKHLPGIITGVGIIATFAGLLFGLLAFDPAGDPSKVQDSLGLLLAGVSEAFMASGLAIATAMIITWREKSWLRKCYESLETLTTEIDQIFETDATGEEYLAKLLRSSEANETNARQLKDSLVNDLKAMMTNLVEENKKNQLAFTAQLSESYTKTSQDMATQIGQSITDTLQAPLDKIAASVQQVSGDQGSAVQELMTDVLTAFMSKLESTFGSQMTGMSEMMTQSVSAMREMQFGFSQLLTEMKTNSEASTKTLETQMSKMIEEIQVKQNLMSDQMNLMVEHLSQSTVKIGEQGQQAIEQLNYKVSELMMGLGGTMSELMSDVARQRMEQDRVVIENQQKLHEHSSILIDNLGSEIKDLIVHSQDAVQAYKENIQKIAQVTTESITGMNNGAEKIRLASDKFNTAGESLITVADKTTRLIGEVSTTSTHLTTASSNLITLLNEYKNSQDSIKQAISTLDSLIKQAQSEASMSTEMLKDMNQMTVALNQVKKEMQDYLEQVNDVLVKSFESFGASVETSLNHSLGAFDNTLDQAVKRLSTGVDALSEFVEDLEDLVHKKKN

SEQ ID NO: 4243 - protein, 243 aa, Acinetobacter sp. ANC 3929
MLGNRYSKKPRIKDEGEKPFWISFADLMTALMTLFLVVMAVSLMVVTKKINEATQAEKERSSEILDICTSIQNDAALKNKIITVDCKDNRINFGEAGRFGHNDYRLNAAGIEALNTLVPIVLDAANSENGKKWFKQIVIEGFTDTDGSYLYNLNLSLRRSEWVMCSLLDPKFSQGLSLTDTQKNLVKQLFLAGGVSFNSAKDSKEASRRVELRMQFYGLKEKDNAEPQPHFVSAPVETCQLAR

SEQ ID NO: 4244 - protein, 462 aa, Acinetobacter sp. ANC 3929
MSIVNLKMRMQEKINQMSEPNHIQNKFVKPQRLLKTLSAIEKKIDDYENAQPLDEKIFKTINRLKKYGFRDLTKRDLKNLAWALGKKLPSDNEKMLFSQLGKEIINYFDQADFELLRFVYFPLLYTYFSFEKNEIEKTPTSWIQLRNILSQNKSKIFNSVPKPKKWMNTLIDHSEILSDQPAKKFVRDFLQDNHQNKISPELESLRISASSWFWDDLIRSSIKSIKDMKEDEYFKIIPRFLELIEKNKIYTTDILVALLERYANSSDRAKVHEELKNIALNQWGNPQYESSAGWNNVNTDTKKMVIQWFVRADLEAFFRLFSRTADVDRFNYWIKFIDKISVSQIFLGPAATKSTQAEHRKFREINRGRLKRLSGSTQTNNAFMLKIENIYVFDFSDIGNACYILNKIPYNQARAEVHIDTLKPWEHILKLSHTSGWQRKFDEKLAELGIFANRNINSRYGR

SEQ ID NO: 4245 - protein, 1067 aa, Acinetobacter sp. ANC 3929
MKLAFWKKEKDTKFVTEINLVDSVITPLQYDEVGLLYTYKQNAKNDADFYWQSLEEEDIAYRIDGQYVLPWEDFFQLQQDPDHSNVLPLLNLPKQTKLYPVLRSEGGLSNSDFKIILDGWRDQNGIKLKGIKRGGAVLDVEGEEQLIDEITWKLVEKIKEFSRLVDKNYKQNQKYWAQIRSLANRSQANLDDFLKKTVVLAPEKLQLNLRKNEISTESVVEVQPDFEEAPSNWLQVFDKYNQVQDQYSISLPDGGIAHVVIDPQVKNVLNEIKKMPNRRVSGERAQTFLHNPFAQLGDDASEVISPESFEQSKQEAKIYSYSLQLDKRYNEVGHYVSSHLHLNENSDRDQQPIILELVNLEQTKYFIDAFDKPSPVFLWAGYAIDRTSYLDHQIQDLKSDILEIQKFQDELQAKQILDLSNYSERVIGIGEAQKLNPGFVQKDSGESVWLPQHLVELEQHLQKSSEDQTFQLLEQLIKQAEQVGKARVVIPNTDTEVSIDEAKELLNKLKTSKKNSLLELEKEPLENLQKKKKDTLLIASNIEEAEFTKQRMELLTLDKVSFPPPRLPSSFRKQEFSLKQHQEYGISWLQNLYQYAPENVSGCLLADDMGLGKTLQLLCFIGEYLETAKQKKPVLIVAPVSLLENWEAEANRFFSAKFAKILSLYGENLKDRKIPKLLISAQLREDHGITNLLEEDWLGDTDIVLTTYETMRDLEFSLARVDWSIMVCDEAQKIKVPTAMVTKAAKAQKADFKIACTGTPVENSLVDLWCLFDFIQENLLGSLSAFNKTYRRPIESGENADSQLLEQLRELIKPQVLRRMKKEVADLPNKNEVSDCKKIGISMLQRQLYAEVINRYQKLSTEGNQGAMLASLHSMRMICAHPLQIRPDASIQDSPKVDWLIKTLEQIKAKNEKVIIFTEFRDIQVFLKRILLERFGLNITTVNGDSSTSSKKGLSRQNLIDKFQNTVGFNVIILSTVAVGFGVNIQKANHVIHYTRSWNPAKEDQATDRAYRIGQDKEVFVYYPSISAHDFDTFEIKLDYLLSSKRALADDMLKPSTDLTKELSKLI

SEQ ID NO: 4246 - protein, 827 aa, Magnetospirillum caucaseum
MDPNSTEQIAHASFNLGRLAIDFVLPFFSLFRDETVAPTIATVMVFFAIVLAIAFLVSIVRLTRQVQHRVNFVRGCKDRQEFYTKLDEFDELMARSKLLSHSWDEYKETLLPQKPGSTLIESTVRPGDFINLTELEHSGLKLKWFHNIPGIFVGVGLLFTFIGLVAALFFASQAIHAVGGDGVDAATQTAEMQKALSQLLSTATFKFWTSIAGLGSSIVLGMLYRFLVRSLDRSLDALCRQIERCTLTVTPEVLANRQLDELREQSSQLKEFTGQLAFNLGRALEEALQKAMPSVITSAMEPMGHKVSEITSSINNLHQAMPSVMSDAMSPVAEKLGSLTQNMAQEFGSVVSENAGAEIRETAKALVSVKDALLEASKHVSGSGSGLSDQIAEAAGDLRAAAKAITDGMAGITETVRADVDKTKDTLNAQLLAATEGVSSVADVIRASLADVGGKMRTTTEEAGSAFSKQIADAVARIETGTQANATAIQQTLTQLRDMTASATGSMASETNAVVAAMRQTAEQMAQTVAEITTQIRQGSQEGVTGLTEHLVKAAEDMQEASNRNSERISDAVDRIIAAGNKAEAGVGEATAFVAKTMEVRGAEAAAKVVSGADQVLTDLKGNIQDLSGSITELWERLDKVTGAMGTVEGKIGLHAQALDDVNRAAKGTETSLSAAAASLIEAGHPLNQATQALRESIDRSSRSVEATAQTLSETQRQSSALSKEMAHTLSELQAVWNRHSGRFDKADENLGAAVIKIMDIVDKNTTRLDEQVKAIDSGLARTVGMLAGNIEELQEAANEFHEVTKGLDSAAKSLEKAASRQGAGFR

SEQ ID NO: 4247 - protein, 251 aa, Magnetospirillum caucaseum
MAIRRRHAPADQEDEGFFVSMTDMMVGMLFLFILMLMFFALKFNEASVHFTETTKDLTTAEDTRKAILENLQNSLKSQGIQVEIDIENGILRLPESILFPTNRADLTSQGVQAVGILARALGGVLPCYTHIEGRERPADCPESKHTVESVFVEGHTDNTGSNGLNWNLSSQRALNTYQTLINENSVLERLHNTRSLAVFGISGYGQHRPVQPNNTTAQKAQNRRIDLRFIMTTPKAPGVEKVEKQVEELAR

SEQ ID NO: 4248 - protein, 457 aa, Magnetospirillum caucaseum
MNFEDALAKLAAWSPKKVAFPPTPVMVHEANAVAKRLREVSASVNLIDLDDLRRRLSQARSAGDWTSISTRDWRYVADCLGAGQSPLVDDAGFLDEYLARLKDQLSRRAISRLIRYYVTHFDPAHQGLRKIAAFLQVAVGQWQWQWSDKEAVDMFDVSNAPSQLAKYVRRSKEMPAADAMEAAGLGGTLYGCKLAGHAYIAAANGLKTFISNNPSSLPAIRRFASWGVVDSRFAFDGTSGAAARMAEAMLLPWVDRQPPDDVRSFIESHLLALLHDLRIERSRWLDVAEDAKRVMRRWLTRASLEQFLDVVDRTAQTHMWAARRKFWNAYYENKFMLEAWVAFAKDGADLAKRLAAEKENPAIGNFGLLESGARDKTQAVLIMQIGELLVADWSHNGKCHVWLSGNPSAPKLYRSYSREDLVTGSDFEKMHLGAWQSDVHEYIRRNTGIRMMSRDYM

SEQ ID NO: 4249 - protein, 1120 aa, Magnetospirillum caucaseum
MARQHFTWEMAEDGILLRLHRRKILGSRIVPVDQWTDAIEPQHLFAVGSLLKMLDYDDAAGPLVRHESDGLWVRDAVVASMSSAHAQALDLPSPTSLILGLQSRGNLAQRDFTVTAQWLESTSVPAWRASASGCMLKHGGQTYRIPEPLFSIWHGVALFNKTAGDDDNVRFAHLACLRELIPDGDGEQVSTDAYIRNTKIVHAAAFSLRLQTGKNGFQVDPVLFARKVKDAWAETDGEASISEAESLLPEALQEVFSKTRFPQWNDCRDRYGLGSHHYVYIEPGLQKALSVVRKVQTSDVDTRRKFARNPQAYLKEALADDADTAETVEHLFVATEQYSQRVIDLGIWQPAVLPWLKREPNTWLPERFGIQIGDKRIELGPSDIEPARHAVSTAIDQGAETVALNGQDVPANRSTLDALNALMGFATPIGKDEDDEAQGPDEQGQDDAKPEPVPPGKMFLIVDENYEEVSYHRNLSSRVPEGSGGVPPSLLTSLKPHQEEGLTWLQAAWRQGFPGVLLGDDMGLGKTLLALAFMKWLADIRAQHSLERLPMLVVAPTGLLANWNAEHDRHLSFPGLGQPLKAYGSELKQLRANSGRDVDLGQPLLNSTKLQEADWVLTTFETLRDYHHSFAKVRFAATVYDEVQKIKNPTSQLARAAKTVNADFTLAMTGTPVENQLEDLWAILDVAYPGYLPELKTFSSEFQPDDLDALKRLRAILLDPVGSAPPVMIRRMKADKLEGLPEKEAVAIRQDMPPKQADSYAEIITRGRQASGPGSMLEILHAMRGVSLHPIDPLQAGGIPHDDYIAWSARLSKTFEILRAIAEAKEKALIFVESLDMQDVLSAMIKREFKLPRMPMLINGTVSGDKRQRAVDDFQKLRGEFDVMILSPKAGGVGLTLTAANHVIHLSRWWNPAVEDQCTDRIYRIGQTATVVRVYYPMAVHPAIGDSSFDVKLNDLLERKRSLSRDLLMPPVLPGQDESTLFRDTVGAAAGQHSADEVDLGELDRMTSTQFENWVLRRLQTKGYRSLRTPQTGDGGADGIAVHSTTGQQLIVQCKHRQSRYCNAEPVDDLLRARDAYGHPEARLIAVTTAECYTSQGRERAGRHGIELVARAGLLTFPRM

SEQ ID NO: 4250 - protein, 616 aa, Acidaminococcus sp. CAG:542
MGNWLSWISDFFYLLFIIGAGFCFRWFFRISKAGSSVEQIISVLQNYSRESIRENYGNLQAEMGQAPYDSIWKKFERTLFKSKAEGVLMTQDPEAFYNDQTLLDNLPLDLFRAMPGIFTGLGLLGTFVGITAGISGIDLGNVETMKSGIEVLLSGTKTAFLTSVVGLLLALVYNLVDTWIYRPYTKKLATLIDQLNTLFPSKSLEEFLSHQAEQAEEQTDAMRELNGELVGRLEDMFVKLSQSIDVALKNNLTESFTQSLEPVFQDLNQSIDKLGSSAGDTLSKSIEQGAGDQIQGLAVTLQDFQGKMGNMMEVSERLNAENTARLQGSVEMMVTKLNEAMDANIQKQATTSDASQAAMKQLVEEMNTNLKAALDQMVEAGRTANQALLQTTEATKGTIQEITDTMSQSTRTQRDEMIQVTANMKESVLEVLKQLQTDMQERNRTMDSYMAGLKEMLGHNREIMASAGKTADKFAQASTPMQKVADTLGSQLNLVVSASNQFNSHVDQNVQKLVLASQSSQKDLELIRDSMSTMRSAWENYQQTFQGVSREMREATDTLARTLEQYNTSTSKWLSETLGQYDKSIKEAMNSVSTINQSLSDSIQDLSDAMDKNRRH

SEQ ID NO: 4251 - protein, 235 aa, Acidaminococcus sp. CAG:542
MWKKKKEEKAQQSGDAFTTSVSDLMAGLLSIFILALCYFMLNFQTVTNKYTGNTELRNQLLKDVGKDLQAQGLQVRIDTKQGVLRIPESVLFESGEASIKEQGQAAVSKLSQSLLKTMTRPEYREALETVFIEGHTDNVPIHNEFFQSNWELSTQRAINTWNLMRNDVPEFNWLVNPRGEPIFSCSGYAETRPVRENGLDPNSEAGRAANRRIDIRFVMMPPQDPGEKPSGGSHG

SEQ ID NO: 4252 - protein, 467 aa, Acidaminococcus sp. CAG:542
MDKSLLHSLERLKSFKIRLPDVCLHPGRPVELEKWIKKTVSSSCSRPALDPVTMEELYAKVKNQEKNRKVVLDLRREIPFLPVLLTRDRKEKPRFYEVLLQDILQAIGNGVRRSVRRNTFRNLVFAYFTVYGQSYKGERLQKCISLFLQKDPELLKSVLYLRNRKQLLKPNGHKLLTREIQNRRSFHKALAEFCWPVNLWYGAFAQWAVKDFFQLEEEDDWDDLFGVLKEICEDKACENMVPFAAEKMIYLTDRSGDGNREKEVRILLLQALGDPRDPGSSLNWVDVDEKAQEIFLAWLKKNDLNLFFTIISKTVRQVATSENMWKYRKSFWEKYLDAMYYTRVFLGPEAEQIARQMDLAKQGMGFGRLNGSGDSLRSLLMFSIGDYVFIEASHNGKLRVWKRGKEPLPFYQAKYTYKGFSYTDVTQASNIEEEFVHSSSETGSWQRKVNDWVRRHCGVRPKESRWR

SEQ ID NO: 4253 - protein, 972 aa, Acidaminococcus sp. CAG:542
MTNFRFWTAQENGYFYPCVPTESTGDWPLIQGQLEILASEGKVEEKTDGFLLPHGQAVELDPEISEILELPDCFPYAITLRSHGSLGSPSFRYELEYQRSDGTPFYGIKVLGSYVELNRETCYRFSRDQYELVNLVEESNRESQQIKNRGELSQYNTLQLARIKERAKKIHATLDRFMERQKIVTADKLSVRLEKNPDGSFSVLPVLLRKDGDSYTRMEADSLEQGFRSNPYNTGKIYGPDKTQYVFTPEQEEGIRQMRRCQRLSPEAARQVAEHPREIFGSDAFDFDLGVYGDRVVSIGEFLAPDLPFSLSSGRNWLPPEGTGMKAADNREKSGDHYASLALDEKDYPELFLKVSDALDRGEKRIVVGDQEVELTPGFLDYVDQLKVKAGEKQEKQNQEPEAAGEKKKEASLQIQENFLSQEYRSRKAAREKRLGSNRLGDYLGQGLKPGIRPMPHQQVGMEQLAACWEHGCHGVLLADDMGLGKTLQAFGFLAALKKAYGNSAMASVLIVAPVSLLQNWMEEYRKFVAEGLFDGIVPMYGSELKKHWARNPDGSRCYFRPPDPNLKEVSMLDFQDRENRIDYSRNHLILTTYETLRELQLSFGRVAWSVMILDEAQKIKNPATRTSVAARAMNCDFGLALTGTPVENSWTDLWTIMDFVEPGKLESLKDFNSHYQHQLQNVENKGELLKELGDQLRKNLDPCFIRRLKEDVNLGLPAKEILRFKDPMPEEQRKLYGEVVREAREGQGEKSITMLQAIARLRDISLCPSLGAGGNVKKYTLGDPEHFFGSSARLMRTRTILDEVREKGEKALIFVESRKIQLLLRTFLEQIYKIQVQPPINGTTQAVARQKMVDQFNRAPGFQVLLLSPEAAGVGLNITGANHVIHLSRCWNPAKEDQATDRAYRIGQKKAVTVYLPMAVDTDFPEDASFDLNLDALLQYKRDLSRSALYPTEASEENAVAMLKRIEEAAG

SEQ ID NO: 4254 - protein, 657 aa, Dialister sp. CAG:486
MEFIQFCKMFFSQTINWVFIVAFFATFLLYKYHFVKPLDARYKEIETYLDILKKYNPQNVNAYFESLSQEMENSDLIKGIWRKYQRTLISIPGKDGLEKYSTVESESYFSVAAFTEGMKGGLWSGLAGTFTGIGILGTFIGLTIGLAGVDTSSTGALSSSISGLLGGMSTAFVTSIFGIVSAIVFGVWHSQNMKRFGDAVSRFTDALDQVFIRKSVEEILLEELAESRAQRAAMEQLSTDMAISICDHLPDVLDQLAEKMDSAMKGNLDTMLVGLSERQDKQTEQLMQISSNTNSLVSGGFDQLGDVLKKGVGQGAEELGNSLKNLSSDIASLAEGIRDILDRSTKASSEANQKTLDALNEAISQMNETMEGMANKQTEETDKNIQRMTALMEEMKTTMKDIFDKMAASAKEQRAEIDKIAKDSADQTKENLGVINASVKELMAEIADQMQQMQSMMDTHEKHMQETLDQMRQAVSSSGNVVNAAGKTVEAAGKTAKVFVEAADDVSMKLKTAAEPLQKAAQPLQQAAASLDSGVQVLAQSMTKQQADAKSVAESMRKISGDYMESSLYVKSALEEARNSWTAYEDRFKGVSGELEKAFVQLDNGMQKYNKATNEGLIAKLKEFDETISTAVDTLAGVTEEVNENIEDLTDAIKKMR

SEQ ID NO: 4255 - protein, 228 aa, Dialister sp. CAG:486
MRRTRGNTQMQENHENAFNLSISDLMAGMLSVFILAVCYFMLNLGQVKDQYMGNNAKRDQLLEEIQEEMSERGISVKIDKKQGVLRIPEGALFAQGEADVKEEGQQVIRNLGDVLYQLLDKKEYKNVVETVFIEGHTDNVDIHTDEFPSNWELSTKRAINTWNLMRGDVPELDREKNANEQPIFSCSGYADTRPIVDDEYDEDSEEGRQANRRIDLRFTMMPPVDESK

SEQ ID NO: 4256 - protein, 437 aa, Dialister sp. CAG:486
MSRQARESKEQWITLCLPQIETVLRKLREKADKMIQVDPLDLQVLVKKTERMYQGSQEEFTRREIRNLPFVIFSPELSMPVAKFALRQVDLDKTSCFRRLLFAYFRGYEPKESKTEWIRTVLWKQMQRNDRMGRSIHFLQDFPQLLAKDGVSQMAEFFSEGNLRDALKTLSFPPTLSGSNFVKAAIVKAFQMDIGLDAKQVLLENLTKDQVYKGLVPQVVGPVIINVDEEGSDSAKNWLMQLIFRYMGDPRGNDTAWLYVEEEAKEIFLHWLVKNDFAVFFHIIASTADAKWKYRQDFWSAYMDEIRASRIIIGQKAKLMLNDRPKEEKSKLMAYDYLEGKSSDTSLLVFTIGQYTFIEVSYNGKLRIYSREKSPIQIFAQGHRTIPYSHLINSDTEKEFVHTNPRGSGPNWQPKVRNWIYDHCDIWREEQQWKVKV

SEQ ID NO: 4257 - protein, 1097 aa, Dialister sp. CAG:486
MEGEGIAMNISYWTCSEEGYHFHWEGDSPQWEDIHTELDMLEMEGKAVKVGDSYRISHETAVSFSRDERELLTLPPIFPYPLFVGKEGLPQNNSFRLKVNFQKADGTYFMNPEVMGSYIDIRPGYCYMCSEEQYAILKSASSCNAEIGRLKEREKILACSLRYVALIKENAKKIDARLDPFLEKIDVVAPDYLSISVKEDTDGTYYASPVILNADGSPYGEKDASEFGRKFKNGSKAQRSYMGKDRTYYVFDQEQQDGLQQIKKARKLTKEQAKTLVLSPQSVFTGAPFRFDRGEYSDRVIEYGAFIAKNYPYLKGIEGGWLPEEGSVGREDLDGIDELDEPEVTEENVAILKELIENAFAKNKSSISYQGKTYKLTGAFIEKVMGKDDVTDSTGGSADGEKPKEDRGNLISEENAESVGYEQANEQRRQKRREARFQKLGADLSMEQVLSGFKDSVVPFSYQKEGIRWMAQNWKAGYQGVLLADDMGLGKTMQVLGLISGVKNAYGEKDMNSVLVVAPVSLLANWESEFIHFVKEGVFEEIVPLYGNSFRDFKRGHDLRLDFSPVAKNRIVLTSYETLRNYDISFGCIDWSFMVLDEAQKIKNPVTLITNAVKSMKYDFAIAITGTPVENAWVDLWSIMDFVEPGRLRDLKNFCNTYQNQLKKLHGDMAGQEALGKKLEQELQPIFLRRQKTDYLEGLPHKEVIPKPVLMPPVQREAYEKIIADAKKKKGNILQVIAMLRDTSLCPHLTSYADSTFENMNVDTFFNMSARLKATFQTLVNIKARKEKVLIFVTSRKMQRILKRFLEKAFGISIQPPINGELMGLKRQQIVDAFNQKEGFAILILSAEAGGVGFNITAANHVIHLSRCWNPAKEDQATDRVYRIGQKKEVHVYLPIAQYEGGDSFDVKLDQLLQYKRSLSQSVIFPTADTEVDGQDMYNELVGWNNDMESGSACSTASYWTIEDTDKVTGDVFERMVAKLYASIPGYAAEETKQTNNYGVDVVVETDQKSRRGLLVRCQQMMGASLSHDSVEAIYSAIPFYEKKLGYHFSGVVVTNALDFTSHDKERAAAAGVKLIARQDLTKLLERYPLEKDLYMM

SEQ ID NO: 4258 - protein, 648 aa, Asticcacaulis sp. AC460
MGSALDILMWPFVVVFGQSWVAPFVLLPALLGWAIIVIVQADGKVRPFWAAVDKRLETLRSILKPAGVDSGRRVFADRFDDIKAVMSPVETDAQALVLAWDEFHETLVDETAIPIVNTSRPLTYFQKVAPSQLRLMFWSNMSVGIGLVLTFLGLVVALYVAQKGMGNSPDPSASLIELLKVAGAKFFASIGGVGASLLLRGYEYRINLKSRAKIEELCSLLESGLLYIPPQKIAIDQLDVLREQRDQLKMFNTDVALQLSERIGVQFSQALQPVTASLDRLSEGFSGVREGLGAGAAEAFRDGIGGELRAFGQILGELGTKLDGLSTAVGASSDDAAGKIKTAGEDFAAAARDIRDAFDRLTSNVDSLGKKLTDQSDQASQAQADAMSRVLKDFELLQGRSSGTIEKAVEALQFAATKAADRVQEEFATTLGNAMHESDRQFRSILEESGEGLRSVSTGLTQAVSSAAQSIADASLGFQRSADGAKQTVDAMSGIVTSGRSLAVSLDESARSFGQAADPVALSAKALHEAAGRISASVDGATRAEREALKEMQVFVAQVRASHEEAETALRTYRGRFEDVDKSLGGAVEKLGAALGGSFDQFRDFAQKFDSEMAGAINKLATRLATIEDHAEALERHNDVMQAGRAAE

SEQ ID NO: 4259 - protein, 251 aa, Asticcacaulis sp. AC460
MIIDDAHEPQVEEENYFVSMTDMMVGMIFIFIILLMYYALQFRTVTDQLTGADETRAKILHEIQSSLKSKGVEVTIDTQDGVLRLPDAILFDSGQAVLKPGGAEKVAKLAATLGDILPCYTDTVGDAASTRPCPTTEHRIESVYIEGHTDKDPLSGGGLIQDNWDLSVVRATNTYRSLVGAEGRLTHLCARKGSGCAPVLSVSGYGDRRPVKAGDSNEDKSSNRRIDIRLIMVTPDRGNIEAISREVEARQ

SEQ ID NO: 4260 - protein, 455 aa, Asticcacaulis sp. AC460
MSGLKEALSSDWIRRLSVRAPLLVRVGRAIRALDGEGVSAEPENVDALQRRLLASLETGEGLSGRDLREGARVLFHPPLQPGRDETFLRHFVALVEKQHRRSALFGLIDAYIDRFSPDHAEISVLARELKALTAQWPWREDDVWRLRDKAFFDVDQVAGQIAKHVLHDDLAPNRTMEDAGLDTALRQKGGLALAAFVCACREVATKKGAVAGRMQSRLIDWARLDDSPLNYPAAWRDYAEALLAPWSQAEPSEAHKSLVIEAVFAYGGDPRFSTGRWNQASAEARSVLNSWLARASFEQFFAIVDRMDMAGRGDMWRDRKTFWSQYLDQVSKAWVVFGEDGAFIAKQISRQSGDASFLNFGLHDARSGRTKQHTALIMAIGELTVVEWSHNGSWNIWLTSDRTAPKFYEKNYRCYRIMNAPALGEHKGCGSHDQPGRWKGKIANIIRHFTGIGWR

SEQ ID NO: 4261 - protein, 1186 aa, Asticcacaulis sp. AC460
MKFPFFKSKKDKESADFTCEMRSDRVFLAMLDRGKSVPVSEWSRLKPGAASAIATVCGLDEAFAIVDDHTIEFTPSGLAELGAATGSALNLPSPTPLALDIKAIGRIDEDGFIVQVTWVRLGGQPIRATVEGALLRADGQQWRIPQPLYACWCAAKALTQPTDKANRFRALAALKACWPEGTAVTSESYLQDLRVHYASAMSLKLKTLTPNRTDFDPILFGPAADLPSEDRQRDEEWDNLLTPRAQKLFAENRFRRESEGRPVYVLRDGEYVFIDPELRPILNSIRTLQDRPEAERRNFVLNPRAVLRTLIGEARADELPLDELFVETQQYSDRVAGVDLWRVAVLPWMVPSHKNHWLPERFGLKVADDYYAVSPDKVEALVSSVSAAAEAGQPKVDVSGLLQGVAADSTPPSHLPVNDQVLAAISHLKPFAAGTDAGSADEASSPAEEIWPGKLFLIVKENFEEVAFAPRETPEGTDSDPVSVPSLLRTPLKPHQVEGLGWLAKSCRLGRRGGLLADDMGLGKTLQAIAFMAWLQAQRLEHGGDRSACLIVAPTGLLGNWRDEIAKHLNAPGLGRLILAFGGDLKLLREEADLSQRDIETGRASLDAERWREGGVVLTTYETLRDYHFSFARTRFGLIVFDEIQKLKNPVSQMTRASKTLNADFVLGMTGTPVENRLQDLWSIMDVISPGLLGASRDFERRFPPDQPDKLANLKALLTKDTDGQTPYMLRRMKSEVLGSLPAKHVHTYRVAMPPVQADTYRQVVVRAAALSASGAFGKGGMLQVLANMRGVSLHPVNPEQAPDSLDIYARDSARLTKALEILDMVCERKEKALIFVEDLAMQDRLAGLIQARFKLRTLPKRINGGVPGPKRQDMVRAFQGSLDPFDVMILSPKAGGVGLTLTQANHVIHLSRWWNPAVEDQATDRVYRIGQAREVHVHIPLAVHPDPVLAETSFDLRLDALLSRKRQLTQDLFSPPEADENDLMVLFGEVTGTQDAAEPAAPAVEVLAPEREVKRQTLSLPDAPQASGARKWKALAGTARPTAEILSIFKGRVIVDMVIKDPYALATPRARQAHVSFVEDIAKEASSLGQVTIEYVPDLGSADDSQDRRDIGGRFALNSAGRQTVVRLKSRPKRSGGVDFHDRSVELSVRHAGGAVRKHELWIGRGVEALYHDGFECSVSYFQDS

SEQ ID NO: 4262 - protein, 662 aa, Asticcacaulis sp. AC402
MTVDKPILDAIFWFLGIFFKQEFVAPLILLPGLFIWAGYFWFRASQRLKPFHAAVATRLKTLEAALGDDLDPSAARQAFAESFGEVTGAMNDRAPGAEPLVRAWQEFHKTIVDESETPIRNTARPSAFFVRIIPQPRDLIFWSNTFVGIGLILTFIGIVVALHTASEGMEAGSTAQQSQVALQGLLSVAAAKFFSSIAGLGASLMLRFVENKMTRRLNTEVNRLCDLLEKGLMYVPAQLLAVQQLNELKRQSTQLEKFNTDLALSIGEQVGQQFQAVMTPMQASLSALHSSMDSMSDSLSKSLGEGVGKAIEGAASGQLGELAKTLANLGEQLAGLSEHVQDSGEDAAKQIRAAGADFAQAAQDIREAFSGLTGQVGEIGAAITQDAEAARKQQADLLQLTMAGFEAANQQTQAAMAGAVQSLQDAGTKVAGDLQAQMGDAMTSAAKEAQALVRAAIEDSSKSFADAGKSISEAVETAALRIAALATAIEKSERHASSTAEAFMNTADGARSAASSMADAAGGFATAATPVANAAKALQEAATRIAAKLDESEKSALEALKAMQGLADGIADTQSSATEAWTSYRSHFDGVDKSLEGVLGQMTQTLSNSMKTFETFSQNFDAEMGKAVSRLGGVLEPLKENSEAISELADELKKQSRAESGR

SEQ ID NO: 4263 - protein, 267 aa, Asticcacaulis sp. AC402
MIASDDEHFTEHVEEENYFVSMTDMMVGLVFIFIILMMYYALQFRKEADRRTEAKDERTQILTRLKDEIEKSDPKLQVIILPESGILRLPASSLFDSGEDALTPSGRTTAEYLAEALYKVIPCYTNQVQRSPDCSPGSEKIKIEALFIEGHTDTTPFAGRPGISNNLELSVKRASNTYARLTSVEPELENLKSGTSSHAVPGTSGQTVLSISGYGDKRPAYRETDAASKAMNRRIDLRILMAAPLSDMPAPPSDEVVKALKEQGLRQ

SEQ ID NO: 4264 - protein, 464 aa, Asticcacaulis sp. AC402
MSLRDAVTSPKEFSGPIRVRDVEPIQMRKAIKALPDFGSGTPKGLDVAELQARFVDRVSNNTLASVSPAEMRQCPYGFFDEPRPFIDDPTVTAALLSELATRAQKSATRILIYQYLEHYNPSKPGCVAVANWLDQQVMQWNWAWRDRSETYALFNAEEAPAKLAIHILASQAPVREVFEDLGLSDTILTGSLGEAAFAAACIIVSASRSAKAQGQQRRLMEWARRGDRFGYEKAFPAYVSALLMPWQSSEPDAAHKAALLAELESFAGDPRVKPARWARVKSQAAQAYDVLMRWLTRASVYQFFDIIDQVLSADEMRMWAYRRPFWTSYLEPGYISEAWVAFGANGASQARHVARTTGGDAALGFATLTGKSQSHAALIMKIGDLTVAEWSHNGKYNIWPSASQNAPRLYKTRYDAYELSGAPFDGSHYGSDSFSWQRKIARKIEVETGFSTQKTSWMPRRFGR

SEQ ID NO: 4265 - protein, 1252 aa, Asticcacaulis sp. AC402
MFTTQRTRAIAFSFDQDGLDVLISAQVKTLLGTKPLPFEQWSATSSNVATALTKILADIEDGRIASDGRPRAIVSDTQLRLHPELVADLDSPSASALGLPATTTLALDLQSQNLFHETSFVLKARWLRGGGGPARATVTGAIISYDGQKRRLPEPLYSLWRTAEALASPQPEAERFGLVARLQTLLPEAAAHSLMTNGYLDETRVVYASAFSLKLGRQDPFDFDPVLFGPGVRAFADEGRVPDEEVDNVLTPQQQRVFADERFRHYRDVRPAYPLRGGQYVFIDPALRPVLQEVRALQSGTVEQRREFVTHPQRVLRQRLGDEVAEASDLESLFIETEQFSARVAGVAVWTKTVLPWIKPVADAWMPEKFGIRIGDDTPLGIAPADVVPLSNAVEQAIAASQLTLEFEGQTIPATEQTRQALAELRSFVEAEISQRGQPYTSALPKSLLEKRFLTVRENFDDLEYVTLDHSPQAVVDEAFVLPEIIRSKPKPHQVEGMTWLQRLYLSGKSGGLLADDMGLGKTYQAIGFMAWLQTHLLAQSAPKRPFLIVAPTGLLANWRKEIDLHLQPPWLGDIVLAFGSNLKALRDEDSFDQKDIVAGRASLEAAAWAKAGVVLTTYETLRDYHFSFAKSPFELVVFDEIQKLKNPTSQLTKAAKTLNARFTLGMTGTPVENRLQDIWSITDVLRPGFLGLSRDFEKTYVPSDKAALRSLRGKLCDATVVSAPYMLRRMKVDHLPEMPEKTEQAKAITMPPAQALAYEDLVRRAMAGRGTMGKNDGMLQTLHAMRSVSLHPYRPDESDSDDTYVAQSARLLWTMDILEAVKAKKEKALIFVESLDMQACLARMIQTRFGLQAPPSRIHGGVPGAKRHDLVEAFQARVGSFDVMILSPKAGGVGLTLTAANHVIHLSRWWNPAVEDQSTDRVYRIGQTRPVQVYLPMAVHPDPLIGPSSFDIKLNDLLSRKRALSRDMLVAPEGDQADITELFDSVSTFAREPQTPSDEQPGLPPESPPESQAETIPEPVPATPPEVVVAQEIVPDAEPETAALPAPEAVPLAVVASKEEVAAAVSPPVSPAVGIQTRKILTLPGIKPNRPSIMLWDFPTGRARDLTEILDLFTGVKVSRLKISDPYAIANSEAREAQMAFIRDVRKVVTRLHEVAIEYDPRHSEPREAEEQSRRYMHELWLLHFNPGESPLRLERRQKSYLRDFHDRIIFLDLPRAAGAVATHELRLSRGLIGLMTERMQCSVTYVAPRA

SEQ ID NO: 4266 - protein, 616 aa, Planktomarina temperata RCA23
MKYLSQVIGKMVGALMEFIQAIGLPVKKAILWLAGVLTESNLDTLSSEKGAAPGFVAALLFVFLIIGVLIYSFQVRRKSQAILWLYKLIKSYETPQEFTQNITDIDIEVRKRWGQNAYDELARGWLEYKETLVLYGEGDSRHLRNSVRPATFFNAEDLNFTPGSWKIVPGLFVTIGLFLTFLGLVAALDSLKVSGMDAAQLKASLQTLLETASAKFVMSLTGLACSIIFTIRLRTGVSQIENRLHELANHTEFLLKFISLEDIASDQLAAIKEQKEHFRTIGLELVAELGRPLKEDLPITIAQSISDAMSPLISQVTEVGTEGVGGMVSDLSEKFSKDVSGALESASLSIQAAGDKIDQSSANIGAELSSSVLALKQMIDEVQGSTRERMLDTGEALASSFGQTANQITEQANSLSDTLIAPLNDLQAKIAILSSDISESGAQFKVMSESVKLGADATQKAASSFEKSAQDFSKVTSPINRSIELIAGSISDLEDSTANVNDTLTEGIKQLMASSENALNSAVEIIRGEQSALENALQGMQDVIEEFRGQGDRLDELDEKLGVAFETYAEHVESQLEEMKLHARDLTERLTPALDKMREVVEHAEQFIPESGVQRR

SEQ ID NO: 4267 - protein, 431 aa, Planktomarina temperata RCA23
MRSLGRKRRDEDEEESVFVPMTDMTVSFLFIVMILLAFFAVQFTDEDNVPRSIYEEVVLERNGLIEEVKRLNIEIDKLETLIKKLKLENSNLTNQNTELTAKNSRLDGEIKIALRKISELKEDVSLLKADLAQADEKIKSLTLKNNDLTDQLQKLEDEKNDLLKVIDQKDELLRSKDDIIASLERSVKNLNDQVTVKNQKISELEQQLEELKAKLKDDPLEAYLIESQYRRTAILSEIERKLKIEFPNILVEVSPENDALRFKGDGLFTSGSSQLSSLKRKIVEKVGVLVTDAIECFTINPKEPDYKSCNPDGILIEAIQIEGHTDNTRFVGADGRDRNIELSAKRATSAFFAMKDAKPNLLSYQNLKGQPVISIAGYGDMRPVNIDPKMKAENRRIDLRLIMFTPVSRDQINIIQRRIKSDLEILLEEVK

SEQ ID NO: 4268 - protein, 675 aa, Planktomarina temperata RCA23
MSLSEVLIRRSQPATPSSVPNTNYVESAINRIFDRWPDINPEAREEDHEKILLQLNDIIFKNIWEDVKISFVISGFNIAFLERYNNRPDVQVITDFAFNELRATTKPSIVNALMRIYSSTFSLGSENTKKLGEMLVLKTELLSQKWKGILYEFPDYLLPQQAPETIADFMLLRKTPWVSLKQAGFNDPFASGIMDYAHQAYVAKLAPDLKNLDNIKQLFEWLIPESGKVKATGNVIVVEALIDHWLKETPPEPLRQYITENLILLYDDPRIRPERWNAVEQKYKDVIFSWLTKEDLRFFTSVVTATQKEEMWIKRRDFWLKLYDDELVDQAWVAFSPKAERYARQNLSSGKSDLGETRFARQTGRYGTETSLLFLKIGNKIFVDGCHNYKTHVWNISDRVAPKLFKSWYHCDADIMRKSPASKSHSHIPSWQSWVMEKIYATVPNSTYKPVNWDDPSRSFSNRSMEQRNAATDGQYEPARVRRSFGNRSNQNVEAAYSPTLRAQGSQSAQASQSEPMHHRRPTLESFDIDNHLMVAEVNKLQSVFSQNDYSSFNLRSSIRRVQKGQTLNTSNKKEFENLFTESVISAEDYPNLSRFLKPIFKETSGHGALTLWQPIINELVNAANQNRISISPNAKTALGKIKEGEQNLTRTDINAFENFLQNLRANKVSIDQFL

SEQ ID NO: 4269 - protein, 1040 aa, Planktomarina temperata RCA23
MQIEFNYSNEGVIINFLGIRKGFLKFFLSSTIKTSLSQLSKEDQNLALAIADLKFCADNIQSQLDISEDRLQFSHEVAASISSQTAKKLGLPPISHLTLETDVVSIPGHDSFQLKYNWSLNGQKQNPKRIGAILQTSEGLRRIPFWLLQAIDLAETELAQKSLEHHWHQMAKFRKALEPDFDTAHSSTSSVEMSQFLSNLKVKISDGFSILPDQDETTGSFEVIPFSNQHIDDQLISSETTVTVAMSELDQDELQNFQDRFERKGSLSAYKIGDGSYMVVEPSSKPALDVMANMQSASIEERREFIKNPRLKINEAIESYLSKNGKLDGLSDAQKEETIEQASFPVFIETAEYSERVTGKTVYMGNSLPGGDGSATTWLPEIFDEPQRDFLKDLPINDLEEVKSKLKTAVDLGKDIIVFRGNEIPASEASIEAINALLASKEDTETHPAEPSEVPGGDTADGPIILDVENNFEQLKWRAEISPRSVTIPMAAPKNITTQLRPHQEDSLDWQINAWEAGLPGVLNADEQGLGKTLQTLSFLAWMRAQLSSDKEAKAKGPVLIVAPTSLLVNWEQEVENHMSSGGLGQLVRLYGTATSARKRIGANGLDTKTGEDLLDLDFLIEATKQGQGHTFWVLTTYTTLTNYQHSLGRIPFSVAVFDEIQAMKNPGSLRAFAGTAMQADFRIGLTGTPIENSTSDLWAILDQISPGRLIPLSKFRQEFSAPNQDKMQMLYELIFEDVDGLPPMAIRRLKDDVATELPKKKRILHAEAMSEHQATSYEEARGKLVTGKKGAALKMLHHIRSVSVHPNISSELIADEYISLSARLKSTFEILDRIHSKNERALVFIEHIQMQYRFIELLKARYDLENIDLINGKTPIKQRQKIVNRFQSHLKNDRGFDVLVLGPKAAGTGLTLTAATHVIHLSRWWNPAVEEQCNDRVHRIGQTKPVTVHVPLSVHPEYEEKSFDLLLHSLMTWKRKLASSALWPMGDTEADMQKLQELLGSEATSKGDKDFVKNSVIKMFERDEVVPLEIVDDKTFVYD

SEQ ID NO: 4270 - protein, 692 aa, Idiomarinaceae bacterium HL-53
MDNEKQIELTWLLPDLSQLGFPPQTVEELSSVFVVTLWAITFIASLIFLWKFVRTRSRLKWFSRILEGLTREDVAKKRIDLLNEAKKRDKDIGFLWMEFDETLVEIQRGDVVEVRNTLDAGHFFNSYSLAAGVIENRLVAAVPGFLTALGVIGTFAGLQLGLSQLQLGADVGVAVMQDGVAGVVDGAKVAFLTSVWGVALSVFFNFGEKWLEQKTRKRIRAIENKVDWLFPRIRPEEQLQLISENSVESREVLQGLAEKIGEKMQEAMLTATQGIQTSLEASLSEIMAPAINKLVDETSQGNQKALEGLLESFMEGFGQAGNQQRVALDDVSARVNQSVESMQATMSGFVEQLQKTQAESRERERALIADISNQIHSLSSVSEATHKKLSSFIEEQIGEMSLQMKSREEAAAQRDTALVSTIKTQVDELISNSRKQGETLTKFVETQLSGLAKAIDEREHRSNEIERVRNEKIESQSKALSTLSSEILQSVEHSVTEQVNTVKQLIAQGQTLQNSINSSVEASAQAAQAMRESSSELRISADNMKLLSSHVNEAGNKLSGAIKEAVESTSDLANQNQMSAQRMESLRNELLSDVTRFSELTEQLNGLIQRTSTTFSDLKVTQKEFIGELKGEVESLNRKMTQMLEDYAEQANGQTTEHLRVWSQSVTDYSTQMNSAIKALSSVVDEMQSKLG

SEQ ID NO: 4271 - protein, 243 aa, Idiomarinaceae bacterium HL-53
MDRVFARRNSKVDEENPYWMSFSDLMSGLLVIFILAAVALIIELTQKSERIDTSIEELKLAEAARSAILRDIKEELAEKGIIVNIVENDTVLRIPESTLSFESGQDTLPDDDRTIFEVRAIGDALHRAITTNERWRYLDTVFVEGHTDSMGIWYRGKGNWGLSADRAVSIWKLWQEEISVEPKLNELRNYNGQLLFSVSGYADTRRINLVEETEEERARNRRIDIRFTVKKPEIAEYERARDI

SEQ ID NO: 4272 - protein, 475 aa, Idiomarinaceae bacterium HL-53
MKFTLSDEVYRHNIKRLSKLAEEQRNLAKRAGTHNPKFEAAWSRLFNLLSSGQFDRFTIENRFDVRALAIALTDKPDLRKKITITHNLLESVNAILPRGSSLFIESLYQFFLSDFDSIDDANMIGAWLCAERRRKKIFLDSEDKILCADGPTFIAKQAIQRNTAFNQQIKYWQLDRYASGDFIKRAQAVYFVEQLQNIPVNQPHELLEEVSKKQVAESRYDENDLIGHVALRILIDRAPPQNIHESWQNAVIAIAGDPRVPRSHPRFIKWWGQLSQQQAKKVQGWLSKLDLKLFLEALEDYSMSSRDTDMMRMFPSRKHFLEGMHEAGVITHTKLYLSRNADRYIRKNYKAEHIPDYSIVNDGDRSIIYAELTRGHMIEGSHNCQIWFYKELHESAPVLQFGTQRQAYRSLTIGLNQKMYRYGCEAFDNFNHSPANFSWQRRSIKTLTKLGVNLKASDVLSDEDYKRYKRIYGVG

SEQ ID NO: 4273 - protein, 1149 aa, Idiomarinaceae bacterium HL-53
MKNWFSSLFGVKESSPKFEYEINDESVDFYCDQYLLNSIKNGHADEYVTAQYVALRMLTEEGNAEPIPNGFIVPHATVARLDNDIHQLLRLPERWDGNAKVDIKGTTSGDSFKVKIYLESPNGRFTSSYSIEGSILAFGESKYTLPSTMFEAFSALEIYSKSAKSETDNLFLLHSLQRAQRSGAKLTLSHFDKLDIHVPERITVEAELDSHGNLILTPSMGQKADHDTLQRVLGQLQAENAYTLKVGNEIILFNEKTARAAKEIISQRTIPRSQVTQFLEAPGVFLDASLVDLDVGFSLRVKGATRFKHAYFGETDESGIDWFGQSQASGKILPISAVVKDVKTQADFNQLEQVLNDAKATGAEEIEFNGKSYDIGSEAQINDILTKLKQKIEKGEDYTGDISDGTGERTAEKDQEDETTIVIDIALNDDELDSPSKVVEEALNEVLYRESLDWSNYKRTPFPHQVIGVQWILGLVELASSQELVNGALLADDMGLGKTFMSLAAIEHYYKLCEQRCETCRPTLIVAPLSLLENWKDEVDDTFLKSPFKDIVILQSEGELNRFRDGSTETRVSNIDDVTFEPRYSLKFGEKYGPERLDLPKRLVITTYQTLRDYQFSLSQIDWGLAVFDEAQNIKNPNALQTRAAKGLKSKFKLLATGTPVENSLADFWCLMDTACPGYLDSYQVFRQNFITPILQAAGDEIDSVRGTLGRQLREKVGALMLRRVKEDNLKGLPQKRMFVGIEGSEWQYEPKLHAVMANYQQKIYEGAIEAQQESEDSHVLTTLMRLRDSSLHPRLAESGRLDAPTSKEEIASLFEESAKLSKTIDVLSEIESRQEKCIIFAVNKRLQRFLSIALGSYFKLGPLHVINGDAKAVVKRKGALSRKGMIAEFEARDGFNIIIMSPVAAGVGLTVVGANNVIHLERHWNPAKEAQATDRVFRIGQKKDVNIYVPILHHPVFESFDVNLHRLLSQKSMLKDAVVTPGEVMPNPAGTEKLGLGATSIIMAEDLSKLSWKQFEAFSLELLAREYKADNAWLTRDGSDFGADGVLTRGDTGILIQAKHKQGAYKGHSAIQEISSARELYGKRLGRQITHQIFITNATQLAKTTRDIAKNLSVTVIDGNDLSELCERHQITLTQVVTRLSKVRYVVT

SEQ ID NO: 4274 - protein, 692 aa, Idiomarinaceae bacterium HL-53; identical to SEQ ID NO: 4270

SEQ ID NO: 4275 - protein, 243 aa, Idiomarinaceae bacterium HL-53; identical to SEQ ID NO: 4271

SEQ ID NO: 4276 - protein, 475 aa, Idiomarinaceae bacterium HL-53; identical to SEQ ID NO: 4272

SEQ ID NO: 4277 - protein, 1149 aa, Idiomarinaceae bacterium HL-53; identical to SEQ ID NO: 4273

SEQ ID NO: 4278 - protein, 711 aa, Enterobacter sp. MGH 22
MPFTVISIVCLAVACFIFFYLLRAIKIVNSLKKYTQSINSIESNSPREQLAHLQNLFKRPELKHAWNEFEESLHPQSELEDGEEKIVRIRATAPSSSYFSEQQLVDIPLNTEFFKHLPGILTGVGIIGTFYGLMIGLNHFDPSTPEQVTSSVNNLLHDVLYAFLGSAVAIAASIFVTWLEKLSIAKCYKYLEKFTAAIDKLYVSGVGEEYLASLVKSSNESATQARHLKESLVTDLRDMLLHLAESQKVENERLANTLSNTYRESGAQFADQVSGAIENSLKSPLDKIAGAVQTASGDQSGMVQNMLQDVLTAFMAKLDTTFGQQFTNLNEMMGQTVGAIQTMQSGFSALLQDMRQVSDDSRQGSAQLIEQLLSEMKSGQQAMQAGMNDMLTSLQASVAKIGAEGEGAGERMARQLEKMFADSEAREKAQAEHMSAFIEAIQNSVQQGQSATMEKIAASVEALGEQLGSLFGQIDKGQQQISANQQANQQSLHEQTQRVMSEVDDQIKQLIETVASQHQGTTETLNKLAEQTNRQIQDMQNGADKMRVAAERFEHAGDKVSEANHLTADVLNKVQSAGSSLSLATSELSSVVADYRNNREAVSKSIAMLELLAANTQSEQTTRSQFITDLKQHGERLQSYNREAQTFMENVSDVLGKGFEDFSEGVSRSLDKTLGKLDVEMAKASNLLAGSVEQIGESVSELDDVLSRVRA

SEQ ID NO: 4279 - protein, 245 aa, Enterobacter sp. MGH 22; identical to SEQ ID NO: 1869

SEQ ID NO: 4280 - protein, 560 aa, Enterobacter sp. MGH 22; identical to SEQ ID NO: 1878

SEQ ID NO: 4281 - protein, 1080 aa, Enterobacter sp. MGH 22; identical to SEQ ID NO: 1871

SEQ ID NO: 4282 - protein, 678 aa, Osedax symbiont Rs2
MEQITETLISIFHISHIGLYLAFGLMGAGALVILAMFWKRMRLMNAINSMKKIIRTTKDETEFTAQYETIRGKVLKISDFAHTWQEFEETLTPPIDDIDDPNYRVYRNTKRPSEYFSTASVHHFQIKPFVLPSTFVGLGLLFTFLGLVAALTETGKSFSNNNIEEIQKALEALLLIAGTKFWASVGGLFTSIVVGAFYQLFNNSVRNGLNSLSEIIEKRLTYANAERIAVDQYGHSQRQTQRLEAMSTEITVALGKRISEALIELPPMLSVSLAETMRPVTDELKNVTSNMSNSNQSALHDMANEFADKMAGSSQESFAQVNNQLEKLVSTLESTATKLSGGGDELRAGLEGTISNINETMLGICQKLKETTQEAGGSFKSDAQFASSELKEVILAIKSQQESSVDKITKLTDSLDQVSLNATKSMDTMLEKSGEQLGNAVGEAVSQTSTVVAEALNGLGDDIQDRVQKATSVAQDAFTNTFSDLSQKLDKTSNGLSSVIGDWQKQLADISVRFESISGQLSNQVSEIAKVNTQVAVTGDAFSKSAQTVRDVTIPLTNVTNQLNQASTSISQTLQETITETQNTSETFSSTLKEMAAAVANLQYAWETNGQHLKNVDSELERAFMQITQQMSTSLGTLNSFTKDMDTQLSQSITPLAGFVAEVRELVEEFGEVKARLS

SEQ ID NO: 4283 - protein, 350 aa, Osedax symbiont Rs2
MDKSEESGDYFVSMTDMMVGVLFVFIIIVSYFVLELQKSLDKVAKKEEVVLLSTHEKIVKDFELEVITLEEIEKEQADVIDEQVIEIDENTVVIDEQAVVIEEKIVVIDQQQISINKKKVVITQLEEEIAKLRRNSWQIYAAAANNKRSEIIQAISAVLAKEGIKFKADPKIGVIRLEGDGLFNTGSSNLKAKKGAVNRIQILAKALYKNLECYSLHKEDESLQLPKDFNSCNPEHVFIEAVYVEGHSDSDGFTGKLRDGSRNNLELSARRATNTYAQMTLAQYLLPAIVNPLGQQALSTAAYGAQRPVVENINDFNKSLNRRIDLRFVMYLPESEDARLKLQREVEKLL

SEQ ID NO: 4284 - protein, 552 aa, Osedax symbiont Rs2
MSILEQLKHFDVRLRFELKNPKQSSLAKTALQIQTTIDSVGLLSNLNPQEYIEAAIAEIKLGTATNITTKNLRIFCIAGLSSFDHLSDVVKLVRHFLEEVYKRGKSSLYRALINGYLRVADSPSPWIEEIRNFLLLTIEQLPNAWILRCKEFGLLDRAPCLKLAEMFMDKTVDFEAQLRRAGITGSLKTVGIGNQLLQILCTKLSTSNWLVEEDAIFLFDRFTHLIQQDGTVIYKGSTNQVSIVDALLRPCIDQQPEIVIQKQIEHLLLGEYKDPRVNPGKWGNVPEELTLILKRWLTKQAIGLLIQVLNRTAEDHHWDSRNAFWSYYLDHDLVEEAWVVFGPEATRHAEDLVRTNTDFHKGTFGSFEKGKGYIQPNHSVLIMRIDNVVIAEWTHNGKVRLWLNDTNTPPSFYKQYYSADRLRGLKFVPDAGYTHDHTGSWKGKVTQFIYQHTGIKHPHVTLINNARIKKRPSYFTPTPKPKPNARDRTRPFVDFGGRDDPYLNLPAMSDCKSCGQIKAAREFYISKRRPGELTVFCKVCSKANELNRKANN

SEQ ID NO: 4285 - protein, 994 aa, Osedax symbiont Rs2
MAKISLNFDLVPDGIHLFLTEEKRTILLKKVKEKLDVSKWDIQKDLYALSGLAKLASLIDSASAGVSVDKPVVSVLPENQGYFIPHHIVAELTEGQALSLGLPPSAPFQLRISTTGPLLESSTQIKASWYSKGRKVRVDRIGSVLEVGETQYRLPEPMYSALDAIHGFNVDDSPTVDDRLEKLSGLSQLLSLDAKDTLDLERSLKELRISHASAFSLDIKSSSLGVDFDPLLFGQEVIDEFLDTGEQITDSTHLLTPEQQSQFSSSIFKNYDKARPMYVIDKGTYLYIDPSLRPALEIVREQQKAGPASKKSFAKNPAGFIKEQILGDGEHDQELADSLELLFVETTGFSSRVKELGLWVPKVIPWLQREPNSWVPEKFGIRIGDQIITVNESELDEAITTIANGLEAGVQSITLPDGSQIPPSIEVAEAFAALKKEIQIPTEHDADSNADEDDTNTDIEELKLAPHKHVLVVEENIEETMFVKNFSARCEYVKPEISPLLKNSPKEHQVYGIGWLQECWATGFPGALLADDMGLGKTFQTLGFISWLQRKRHSLGLPRLPVLIVAPTSLLNNWLDEETLHLADPGLGAVGLLFGNELKKFKLKGYSNDTAEGMNTLRSAELVECDWLLTTYETLRDYQISLGQLHLSCVVFDEMQRVKNPSSLNTHASKSLNADFSLGLTGTPVENSLSDLWCICDTLIPGFLGDLKSFMNDYPEDDQEKLIQLRKDLLERSVDGPQPILRRMKSEVLSDLPPKMVHLVDEQMAGHQANTYDDLVKRVKREEEPRGLRVIHQFRNISLHPYSPDSEQSNDADKYIADSARLKGVFRQLDKIAKKEEKVLIFLESLAMQEWLAFVIQQRYGFKQLPPRIYGGIKPIERKRIVDRFQERKNIFGVMILSPKAGGVGLTITAATNVIHLSRWWNPAVEDQCTDRAYRIGQDKEVNVYIPRAIHPTYKDGSFDVILHNLLERKRGLSETMLVPMESKGDMDAIFSEI

SEQ ID NO: 4286 - protein, 652 aa, Sphingobium baderi LL03
MNDILDLILGALNIIYGERWVAPFVLLPIMFALAAYVRHRAIVTTRPYLDAARRRVQTLKDALGSDSDPVAERSAFAENYIPVSAVMSDDQKGAHSLVLAWREFQESMVDESTSPVRNTNRPAAFFNRAAPKLTMLTFASNIFVGAGLILTFLGLIVALNTAANGMAGQDVSVAKQSLQELLVVAGAKFFTSVAGLGASIWLRFAEHSLSLKVRRETDLICEFLERGLLYVSPQRLAVEQLEVLREQRDQLKFFNTDVALQLSERIGAQFTQAIAPVTASLTALNDNMASVTQGIGAGAREAIEKVSGEQLRGLSETLGDLRGRLDAIGQAVGSSSDDAARQIRLAGEDFAKAASDIRDAFVNLTTQVDGIGQGMAERGEAANAAQKEALETILGSIEVAQTRSVTMVTEILEALKNGSVSAAGKMQEEVGSVLKSGVEASQETFRIAIEESGQALKDTTISLSQAVGEAAQQVERAASGLARTGDNAERTAEAIRSVTDNARVVATSLGDAAQGFSQAAGPVADAARSVNQAANQLAQTITADRAAGTQALGEMKSLAEGVRATQDAAGQAWHDYRARFEGVDRALSEATEKLAQTLADSLTEFREFAQNVDREMAAAVGRLGNTMTQIEEYAESLDEYVEQTRNQREAAE

SEQ ID NO: 4287 - protein, 250 aa, Sphingobium baderi LL03
MILEEAQELVAEEENYFVSMTDLMVGLVFVFIILLMYFALQFQDVTEELTGANKTRTEILEQLQRKLKEQGVPVIIDSENGVLRLPDSVLFDSGQRELKPQGRTNVEHLAAALIDILPCYSDGIAKPASCPQSKHKLESVYIEGHTDSDRYAGSGGLKDNWDLSVVRATNTYRTLIEYQPGLSSLCAPKQGRCDPILSVSGYGPQRPVPDGQGTEEERKQQNRRIDLRLIMMTPDSGEAERAVANRINRK

SEQ ID NO: 4288 - protein, 476 aa, Sphingobium baderi LL03
MTFLARLAADPKSLTARMRVGQVEPVALRRAVAALDMREGTEGTSTDPDVAELQQRIASLVSEDALDGLSRRDLRAGCKAILHPPHPPAANEATRNGLLAVVARNKRRAAFFAVIDAYLDGFASEDETILSLAKKLETMAATWPWREADHWPAKIGEFALLDPTRAPQLLARRILDSGSHPRDVFREAGLDTPGRRFGGLAEAAFRFACRLVMGMKGQQAVDGQRTLIAWAADDAGKFAYQRAWPEFVEASLVPWEVVEPSEAHKSALLEMLQRFGEGDPRAKPARWRTVMDKAPGAYAVLMRWLTRASVLQFLDIVDRLMPDSAAKLMWAYRRAFWMSYLLSDGNAPGIDAAWVAFGDEGERLAKRAARESGDSSFAAFGKQHDKSPQHAALILQMGDLTIVDWSHSAKYQVWKRGDPRIPELFRPSYSYGALYCAPIQESHSSPSTYTWQKRLAQIIEGRAFYSPKSTWKPKRA

SEQ ID NO: 4289 - protein, 1250 aa, Sphingobium baderi LL03
MLKRLFGKADQPTFAWREDGDHLIITLAQSGKELPFSSWATARPDAAHALSELCAANDLDDDPADQPLAIGDDHLRLAPRVLAGLDTATAALLGLPAPTPLALDLRAQNRIDQDDFRLTVRWVRPGGQPVRAQMRGAMLLTDAGPRRVPEPLWSLYSSAQPLTRALEKPERFEALARLKEHWPEDPRLAVESEGYLQDIRVHYASSLSLKLKTLTPDRTEFDPVLFSARAIAEAGESGQAVDEDADSILSPSTQKLFATDRFRRESEARPVYVLRNGEYLFIDQALRPALSAVRHLQDAPESERRAFVLNPRKVLRETIGEEASERIGLEELFIETEQFSDRVAGVDVWRAPVMPWIVPSEKNKWIPEKFGLRVGEDYYGISSPNIAEVIKRVDKAADAGERDADVSGLLDPIDDDGPPPPDRIPVNEQSRAALASLEPFAQGPIEEGADEAEETEQAWDAATQGKLFLVVRDNFEEVEFAPLGLTESLDGEPYEAISAPERLNTSLKLHQVDGLNWLAQNALVGRPGALLADDMGLGKTLQAIAFMAWLQDEANAGRRHRTPFLIVAPTGLLGTWRAEIEKHLHDPQLGPLVPAFGGNLRLLKDEDTFGARDIETGKASLDAANWRDAGVVLTTYETLRDYHFSFARTRFGLIIFDEIQKLKNPGSQMTRAAKALNAEFTLGMTGTPVENRLQDLWSIMDVVAPGFLGASRDFEKRHPADNVEALAHLKAQLTDPIKGRPPYMLRRMKGDVLDGMPVKHVHPLEMTMPPAQASAYRDLVVRAAAAGAAGTLGKGGMLSTLANMRGVSLHPLDPREAPNELDSYARDSARLSQTLAILQKIADAKEKALIFVEDLAMQDRLAGLIQQHFDLSSRPTRINGGIPGHKRQALVDTFQSRPGSFDVMILSPRAGGVGLTLTAANHVIHLSRWWNPAVEDQATDRVFRIGQTRDVHVYLPMAVHPDPDLASSSFDLRLNALIERKRKLTRDLFFPPDASDGEIGELFREVSLESPIEPVEADDADDAEAAESRPEPTAPATDEAATPAAGSKDSPADTENLIVATSGAEPSEATSRDKRERPRLSLPKVAAEAQVRIWRRSAGEPRPTEEILALFSGRHLVQVSIRDPYALGTYEARRSQLQFLQDLQKCTIALDNVLIEYAPEIDGDLEELACRREFGSAFATEFAGALPKLVLARRSKRARDDDFHDRFIEVDVRHSGGAVKRHELTIGRGLEALYNPKRQCTVTYVPPGNY

SEQ ID NO: 4290 - protein, 652 aa, Sphingobium baderi LL03; identical to SEQ ID NO: 4286

SEQ ID NO: 4291 - protein, 250 aa, Sphingobium baderi LL03; identical to SEQ ID NO: 4287

SEQ ID NO: 4292 - protein, 476 aa, Sphingobium baderi LL03; identical to SEQ ID NO: 4288

SEQ ID NO: 4293 - protein, 1250 aa, Sphingobium baderi LL03; identical to SEQ ID NO: 4289

SEQ ID NO: 4294 - protein, 650 aa, Geobacillus sp. JF8
MTLYTVFEALFSSINKIGNKGFTDLFLYFQLGLFLVMAAWQLIRIQREIAVMNQLKPKLLELNRSLDGSAYEIDRTINDLFAQTKRSKYKELWERYYNRVSQKNEDERINVEPFFGFDVMYHHMGYRTLMDMGAGIHVSLGVLGTFVGLSVGLAELHIGDTEALRSGISSLLDGMKVAFYTSVWGVLLSLTWTMFDRWISGTLERNIDWHSERLDFLLSTDDEELFLNRLEKLSRSQADHLKTLLTDALEKAMQPIALSLQQSHGSLQRAFGQLHDQFAQLHEGMEAQARLLESQIELTKNTSADVTSRLVDEITGGTQQSIGRFSEFVQQSQVLQAEMMKTIEAFTSRFAHTEERQAMTLERTEKMFAQFEKMAGELELMKESYQKTAGMMNGLGETFYQLQQLTKDQFPIQQEVMRSNQLLAEKYDDLAEQFTRFNAQVETQYSQLLEQLVHASSSLSASFQTMANRFEESLRIQKESLHDSQQLLGDVQSAVAALSPLVPELRETFDRVRELKEQLLDMQEAQKELLPELVQLRTQTKETVEEALQTTKGYMHEMTEQIEALQQNWATTKEQLSRITDALHLSMKDFAENIDNGLSKTYQHFDETLTKAVQEVSGLVYQFSEVQADFIENLEDLVDHFDKWKAGAST

SEQ ID NO: 4295 - protein, 223 aa, Geobacillus sp. JF8
MKYRKRTEVNYWMSYADLMSAMLMVFALLLTFVILDYRELLEEKEKQIEEVVSVKTEIIRALTEAFKQSNMAIEIDQQTGAIRFPGSILFESDSAEISPEGKAFLQQFIPKYMGILLQDRFQNEISSIIIEGHTDRNGTYMYNMSLSQRRAYAVLEYIYSKEFPNFKERELSKKYITANGRSFSSPLTDATGKYDPDRSRRVEFLFRLKDDEAIKAIEKLVNE

SEQ ID NO: 4296 - protein, 426 aa, Geobacillus sp. JF8
MKYEYEPVLLKRWLREARPPLLKQTVEYSAEKYQGVLERLSEQFTQIANAPVSAFQEWVQQLSRREKLLLPNLYKKELPDEIKKAMIESIQRHIQHERRLFRVLVDVMYETCDLDEIWKLLRYAYAAHIEKIEKRMEKEKSEKWRRYLLSRDPIVYLATEAYQSEKGILDELETFYLTKNFPLFKLVLMEIFQLADESFFLKEQNLYQDIFVSATNEQQQKMAHALIKKCKLNRVKPLGKLIFEKLQTYRRKPMLWRYVGEEEKSRFAQWIMKLELKDFFGGVNKNHERFQYWEKFIPQLEDVVVTDERTTLIMYFRDVVIIEVLGTGAVYIYRADVFQRHFQPKIDRMLAERERFANKAWLKAREVRRTELMDRNLTIPGGWLRHNGGWQWKFDEWLRRELGWEVKRDVLLQKETENDEGCFDAD

SEQ ID NO: 4297 - protein, 865 aa, Geobacillus sp. JF8
MMKAVLMPTEDGVHFSFQLHDGKTVTELKLPMAREDIEKYYKVQGFQQYVAWEELYDSGVLADSILPYHEYYRLLEDEGAKEVLQCLGLPVVEEKVSGKLLLRSLPNEADLVLQLFDASGRNLDRIGKSAGAMYGLPDRFLLLPEQVYRLKRALLEPYESGYEKIGICQQLAKEAGIQLENFLQTETYHIVDTYDLDIAVHRPDHIELVVKGRTEEETRHLQQLEKISSVKKGHARSRFISTARVHADIVHLQQKRHIMGEEVPLFLENPAAVLPEHDYLLDLDQFSERVRGLIPIERVRPVFHEGAGMKWFDEESGFVVPYDESFLRELMENYPDQQYVEYNGKWIYLDPLLRRKLLQLPKDADEALKRRYILDIKDNEEELEYKMDSAQAAPFRRYPLPSELQAELFPHQIEGFEWLCHLAEQGRGGLLADDMGLGKTIQVIAFLLHQKARGQLRPTLIVLPIALIENWVAEIEKFAPSLLEGLYIHKGGGRLASSQIISQFDLVLTSYDTLKIDQLLLGKIEFQAIICDEAQNIKSHASQRSRAIRAMQGHFRLAMTGTPVENSLDELWAIMDFVQPGVLGSLKEFRFRYAETSDYNSLLKAIQPYYLRRTKQQILDDRLPKKHLVPPIYVEASSVQKKIVRSMLATKESGQVAILNMITRLRQLYGHPGAVITDYENLPAAEVPKLKETLRIVETIRQKGEKVLIFTEFRKLHFLLKRTFMEKYGISVPVIDGDTKNRQSVIQRFNETKGFGIMILSPKAAGVGLTITSANHVIHYTRWWNPAVENQATDRAYRIGQRKDVYVYHIITTDRSHFPQGTVEELMHELLESKRHLAENVIIPFDMREIQQAIAERMMEQRQLV

SEQ ID NO: 4298 - protein, 675 aa, Pseudoalteromonas sp. OCN003
MNFESQLSAIFVAFLMGITFFFLAKSGNSFRKAKKRIKVLNDALKGISTENISSKRRDLISFITEKDKEKSQPVRHIWKEFDETLIEVKAIGNVHLHNTFDASHFFNTHTLAKGVTDNRLIAAVPGFLTAVGVIGTFVGLQIGLSEMNISSDVSVEEMKAGVSAVIGGAKVAFMTSVWGVLLSVLFNFIEKSLEQSIRKRISILQDKIDDIFPRLSPESQLQIIAHNSIESRESLQGLAEQIGIKMQESMLTATRGISEALETTLNEIMAPAINKLVDETSEGNQKALEDLLTKFMDGFGAQGNQQRVAMENASEKVNESISGMNTTMEAFISKIEASQQASGEREKELISSISLQVSQLVEQSNEQGRKMTELMETQIGSLNDAFDSSQARAKEREQEFTNNIEQQIKSLTEGIASQSSVLTEFVQSQMSSLNESFTKRDEQSAAISEQRNAALEQQTQAISKSTQELVSQIESSIQNHKTSSEQIIEQGKSLQQSVESSVLASAKATDSMRESATELKSAAEKMSIFGSHVRDAGNKLSGAVTEAIESTKDLASQNQTTSERMENLREQLIADTGRFRDLADQINSMIVNAGNTFDSLKSSQKEYLSQLQKNVNELATQMTNLLSDYAEQANAQTKDHLTIWADSSTQYATTMNNAARALAGVVEDIQDKVGA

SEQ ID NO: 4299 - protein, 247 aa, Pseudoalteromonas sp. OCN003; identical to SEQ ID NO: 3722

SEQ ID NO: 4300 - protein, 480 aa, Pseudoalteromonas sp. OCN003
MRINLKKLRFTIPENPFGKNTNLMLDLVNGLKQISKKAGTDNDSFKAAWRKVYNAVQANKNLENVIENKLDIRALGFALNSKVGQQIQLTTSILDKIDFLTEKPSSLFLESFYQYYLSRYSSLNNVAYTSEWLINARKKRKQSKGFDENLLSQDGPKWLAQQAIDKNRDFDFIVKEFELDQFQSGQFMELAQRIYFVEQLKNIPVNKPHDLLTEVQKKEVYESSFDSSELLGHKILKILIERAPSHDIHESWLNTIMSIAGDPRVPVSHPRYRKWWSHVSKDMSAKVKGWLSGLDLRLFLEALEDFSYSSYDPDMERMFPTRKKFLEGLYDKKLIKNTKLYMCKSMARFLKTKYKEEHLPDFSIVDDGEKSIIYVDLGSAHMIEGSHQCQLWIYRSLHESAPVLQYDKQRISYRSLTKGLHEAMSNYGHGAYDYFTHSPANFSWQRRAVDSLRDLRVPVTIKDVLTADDYRTYIRRFGAD

SEQ ID NO: 4301 - protein, 1152 aa, Pseudoalteromonas sp. OCN003
MALSNLINKFFKNADRSVSFNFIPDELDGAYFSLDKKEFEKVRNGTANEWLIQQYVTLKMLEEQGEAESIPNGFIVPANVLCRLDDYVRESLSLPPLWDGVIYSDIRGNTSRSNFKVELAVSDPDGRTTHSYSIEGPVIKFGETSQYLLTQAQLIAFESKKKHENSDKTEFDNLTLLHNLQLSQKQNAKLQLQHFEKLKIHTPEKIAVEAELDSFGNLILTPFMGQESSHEDIQKVLGQIVAPNANTIKVGDEIILFTEEKIKAVKEVLDNRVVPKSKVKDFLQNPTAFIDASLVDLDLGFSLRVHGATTFKHAYFGETDDSGVDWFGKSASSEQVLPISKLLPLVSDTSSFEHVKKVIDDAVNTGANEIEFEGKFFDISDSDNVSKTLDEIEVKLRSGNDEEEVETGFDSDSEEEATETEETIVVDIDLNDEELSENSPIVSEKINDVCRMGDLDWGNYLRTPYKHQDIGVRWILGLLDQSHENSAISGSLLADDMGLGKTFMALSAVEHHYREVSQINETQKPTLIVAPLSLLENWKDEVEKTFKTSPFRDIVILQTDGELNRFKNGGVEIRTNTSDGDEFEPRYSLNIGKDCVDRLDMPGRLVITTYQTLRDYQFSLCLIDWGLVIFDEAQNIKNPNALATRAAKGLKAQFKLVATGTPVENSLADFWCLMDTACPKYLGSYQDFRAKYISPILQAASDEVEDIRNRVGRELRVKVGAIMLRRVKEDNLDGLPEKFMYVGIENTDWKYLPELGKTMTGYQLKVYDGAIESIEESDSNHVLSTLQRLRNSSLHPRLADGGSLNCPQSNKELDQILFESEKLKSLLQLLDLIKTKNEKCIIFAVNKRLQTFLSIALGRKYGLGPLSIINGDAKAVSKKVSTPTRKTMIADFEAKEGFNIIVMSPVAAGVGLTVVGANNVVHFERHWNPAKEAQATDRVYRIGQTKDVNIYVPLLLHPEMESFDVNLHKLLTKKTQLKDAVVTPEEVIPMPGGIAGAKGFSDEQVINADDIKKLSWQQFEALTVEVMNKELCADSAWLASNGADKGSDGVLIVNNEMVLIQAKHTTRGRYDGYKAVQEIFAAKPIYEHQIGKTSAKLLFITNATMLSSRTREVAKQCGVDVINGSELAQLVKKHQITFKQILMRLDKKRMKV

SEQ ID NO: 4302 - protein, 653 aa, Ferrovum sp. PN-J185
MSFLGNLNWLILAPVLAVIGFLLSRFITQYQNPAKKLQLELVKIADGLQKYKKENIQILDIANLKPIFSVEPFRHLWAEYEDTLHLVRAPDGEPISMRATATSELYFSKESVVDTQIDADFFRHLPGILTGIGIIGTFSGLVWGLFQFNPVEPDKTLELLLHEVTSAFIGSGIAILAAIGITYFEKTTLNKCYRLLETVNNRIDDLFSKGVGEEYLYRLVSASEKSSANTASLKDALIDDLKQLMHEVADKQINAQLQSAQNFSSQVSGAIKESLDAPMKDLMEVVARASGEQGGAVTGMLENLLSAFMAKIDETFGSQIQNINTAIQKSSDSMTMVQEAMTRLITDISGAGQKATSEMSAKMEESMSKAALAQEQMNQQLRSFVEELRKLILEQQNQTKQAMDETMQKILSELEKSISVISAERENQAVADKARAERLVAETEGLYSGLTDNVVQLMGDVKDAAFKTEENIKAIQNAATVAISGMNDGALVMRDAADRFTKAGDSIGGVFDKSRVVTDQLEQTASTLQMASASVRTAFEKYDESRESVQGYVLQLQALVENAKKEAGLSTQMLSDLERILGSLQTAEKQSTDYLNQVNSVLKGSFQQFGQEMVAQVEALKVSSDTLLTGSLSALEGAVQSMLMSVAKLKKSE

SEQ ID NO: 4303 - protein, 249 aa, Ferrovum sp. PN-J185
MFNQRSSKKSYKDEGEKPFWISYSDLMTACMTLFLVVMAVTIVMLKKKYENQYAAEAAREATISACAKDLQGIANQRFPGQARIEYSKGDAIRIDLGSIVKFDDGKHGISSEASKFLRDYIPTVLKTVKNNECKQFFRRVIVEGYTSKTGNYMTNLDLSLKRSKEVICELAKTDPDGTGGLSLDDKNQVKSLFLVGGFSFNSQKRSDEESRRAELKLEFWQLGDDKKRQEESTIDLSGKDFGVCPSQTY

SEQ ID NO: 4304 - protein, 493 aa, Ferrovum sp. PN-J185
MSFTDLLKNSLADLNSTFQYELKSDRGESYPKLSKIHKKITDEFTFILKPKDEVAYAAARNFLDGSLNGDVGEYEIISFVLTKPISELGGISVASASEKLRSLLDRYAKEFESDEIDGIFWFGVFQSYFQAQKLNYQGDSFFSSQRAIRSFLVKTWPDVKKNAAFSTNWMKSIEANQHLLGESPCEVYGAEWLAGSEVRVKQIKQELHIPDTSWFWEEFFKSCLKASLSQSDAKFKESIPLIIALLKRHPSYLDNGLRALLDRYRASSDIRVHRELKEFALETWKSPKLRNTGASKWIHVSEPTWRMVLTWVQEANLRLFFELLKRRGVPDLHGRVDFWMQYINQITFTRLVLGEDMRRYLTAHPELKEHFKNDVESYANLMGAKGESSLDAFIMEISGHLIVEFNPHGGCYIYQKGENTFNVNAVSLDASTSQRGLKERYYTGSAKGPDIVHREGWQYKARTYQLPAFGIFDDVRAGKVGSGTTTFSIDKYF

SEQ ID NO: 4305 - protein, 1331 aa, Ferrovum sp. PN-J185
MNFLSRLFKSRPEVKNVFEEMGNNPSSQKLIQPAFSNDRISYLIDVNIGLSASSQLMDIATDPVSGSQQLIYLAQLVSDGVAAFNNSEIAIPWSDLYALFEDAEHEDSLYLLSLPKIDHSIPILGEDGTVADKFFRLRIDGWREVSGRSIRVRKWLGGAFVDGSTYSLQSKDSWQLIDFISRNHGFEAQSRSQSENEILWGEARKFALLAKAELSPYLAATIVLVPSLLKMRYIRAQALGTSVVTIEPYFDGAPDDWMGQFDSFKFIPEHSDFPTATGRTRVIFPEAIRDVLTVIKTQFDGRKVAGSKAEAFLRNPFAYLGEAASKVLDENQIQEAKEEAGIFSTRISLFPDISKGAIESVTASVYQNLEDGMAKADRSIISTAHELNLLIQEIESALSEERQFFTWRNFVIDVDGDLYQTLDSAKAWFNVWKDQVKNFIDFNDIYALDNYGGRIDGIGVAKPIYSAYIKKEGGDDSSWAPPLLGVSLTPGSAPVFIAVDEIWVTEFEAKIEQAKAAGVDKVADPRLPIPLSIPEAIDLVKDLKVLLGIIGSGGDPLPPDPTPPGPTPPGPTPPGPTPPGPTPPGPTPPGPTPPGPTPPSPNPPGKGRKETLLVKVNITQLDYSETAAEEMRAAILKVPEGFSPQLPTDLKSEIKLKKHQLDGLAWMQYLYSKAPEYCRGALLADDMGLGKTLQLLSLLSWFYERNPEAPPSLIVAPPVLMQNWKNEARNFFNNFPEILLLHAEGLSARRQPKQFIDQSLLDKKIVNLLTPNWLGSAKVVLTTYETVRDYEFSLARQEFTFMICDEAQKIKTPNAQSTTAAKKQKAKFRIACTGTPVENSLADLWCLFDFIQPGLLGALDEFGRTYRKPIEAKEAGDEKAAEVIEHLRAIVSPQILRRMKSDIADELPQKILVSNDEYEFDGALRKRLSVPISNHQRNLYAQGLRQIAAAAQEKDAKRRSNVSFAVLHFVRALCSEPYCLPKTTFTIDVNGIDAHLNNAPKLKWLLSTLELIAQKQEKVIIFTDIKEIQRSLVMFIRKRFDFSAQIINGDIDDRQDLIDAFQSREGFGVIILSPLAVGFGVNIVSANHVIHFTRTWNPAKEGQATDRAYRIGQTKDVYVYCPTITAEDFVTFDAKLDRLMTLKMDLAGDMLDGVGSDIPTGTLMPDSGPGGIQVDADKLVDISRVDTLDGATFEVFCQLLFGAYPNKAYITQKQRGDGGIDIVVIGNDGKGMICQCKYSMQDELGWDAVKEVAAGSPAYQARHPGVMFQKVAITNQKFNSTAIQQANTLGVKLIGRAELIELLNKVKLKQLALDEEIFKFYMNTSKFSANV

SEQ ID NO: 4306 - protein, 529 aa, Vulgatibacter incomptus
MTEIAKLLTSTESVWVSCLFIVAVGVVPFLMMWGKLRSVRVDAEKGIGTLATADGKSAFRANYEDHDARFLENRVLGKTWREYRRTFEFPASLGGAAAPVRTPLEASAFFQAERLMADRLNLRRYGAVPNILTGLGILGTFVGLAAGIHLANLGINVADIEAMKSSLGDLLAGASMAFLTSICGLTCSMLFTLGERTLVANSGAAIERFAASLDDRLEFVTAEALAAKQLEESKEQTTQLKQFNDTLAIHIAEALDERVAGRLTPALDRLIEAVNGVRSDRGESNEKLLTSLVQEFQRTMSGAAGSEISAMAQTLERVQDVLENSLGAMQEAGHALTSPIAATTNRLEVSMAKLETAIGGWASLIEGTKQTLERFDSLTRAMDGVHGKFQNTALAVERAGENLKVTGDRLGAASDVTQTAAQSMGEASVQLATAVHATSASWADYQNRFADTDRSLAAAFQQLDEGLHRYSDQVKHFLLEIDEQFGKASKHLVQAVSTMGDDLGDLPVEVKKLTEQVDRIASGLQRRVG

SEQ ID NO: 4307 - protein, 238 aa, Vulgatibacter incomptus
MSDLMAGLLFVFIITLMVFAFNLRRAEDSLRQAEEQKQEEVKQLKGADAARAQLLSTIQTRLAREGLAVEIDVEHGVLRLPEEILFRSGFDDFNPGGRERLAVLADNLATVLPCFTVGSIDRCPQRTYDANVEAVVIEGHTDDVPLLPGMRFKDNWQLSAARAIRTYEVLTSRSAELLSFRNERGEPLFGVAGYADSRRVALESTPEARARNRRIDLRVLMTPPSTDERPAVSEVVEF

SEQ ID NO: 4308 - protein, 470 aa, Vulgatibacter incomptus
MSGDGLKAQLESRRASSGRWDLGHSIAGLAPRNVKAAAFEVFQALEKSGGKVPPLVELDQVLREVRAHWESTKSLDGLPRRHLRALPWVLFMPEGAEHADRWLGSSSELLKAYVGWLRVAGRPSALLAAVKAFLRDYPQAAPTFDEWRLAIDQLLRDSASPQGIAWRERNETWKLLEADGPGAFADQLWRRSDGIPVLLEGAGFTDDLQNARFVHLVADALLDRLGRELSRGLAPTSPAAQRVVAMAVGAGQFPYPSLRTKLPGALLGPYVDRDPDEAGRKWLERLFLDYYGDPRIDTSRWFGVDERHRGVMHRWLVRQSLEAFFRVLDGTADKRHWDARRAFWGKYFDAGVVVQAWVVFGLDAYRIATGRLNMDGRQFGTVHGEQDQSKSVLLMQIRGPRGSVDIAEWSHMGRCRGWPSGGSGAPQFYRRRYDGWDLRGEAPLEQTHYAGGSWMPKVREWIGLQTGLRV

SEQ ID NO: 4309 - protein, 920 aa, Vulgatibacter incomptus
MGPLLRLVSEEQAVLEGATVLVPHASIAGLHDSELRSLGLPPRAALFLAIEAKGTLTSSDFRLLVTLRHIDGRPVSFYERIGAELRMGSTVRTLDAALFSALEAIDGFNASPPTDLDSRMLAWAAIKELLPEGATDKYLTEFRVASAPSFTLRPFRNEQGEPDFDPVPCQIETIEGLDSVEHEAREVLPPGMQKEFAASYRRRTQVPTRYAVGGGWFLVLPPQVKKALEVARRAQAGSVAERTAFLKNPRAFVREALGDELNEEQLEGLFWDEGFSDRVKAVGLWQPKVVPWYSQSASQWMPPEHVGLRIGDVELRLEPTEVRALAADLEGAIALGTESIRVEEVDVPATTDSLAAVRQLVDVLDRYPSVEVVHEAEPQEALPTVDEEKPAKLALLVKDNLEEVEYRPTVRRMAAPKVRRPGNLATSLLQHQVEGLEWLQDHWIAGHPGALLADDMGLGKTLTALSFLAWLRERQDEGVVGRKPLLVVAPTGLLRNWRDEHDRHLLRPGLGILCEGFGAGLSGLRTTKGTGGDLAGGLPTLDVSRFQNADWVLTTFETLRDYQHSFGRVSWGCVVLDEAQKIKNPAAGVTDAVKAMKTDFLIAMTGTPVENRLADLWSIVDTAWAGRLGSLKDFLGTYENEATEERLEELQVALTEKPPPPLMKRRMKEDHLHGLPERSLHVRRIPMPEVQATEYAKALEYARGSQKKGGMLEALHALRRISLHPFADASTSDGAWIDASARVHGCVEILDGVFERGEKALVFLEFLEEQGILAELLQRRYRLTSPPMVINGGVAGDKRKSRVDEFQRRSGFDVMLLSPKAGGVGLTLTAANHVIHLSRWWNPAVEDQCNDRIYRIGQNRPVHVHHVLAIHPRYQDHSFDVTLHNLLERKRLLSRSVLAPPAATDADASDLFDATVNAGR

SEQ ID NO: 4310 - protein, 678 aa, Marinobacter sp. C1S70
MDFVSLLSHLLPDFTALSNGTPQGLATLFWLLMIVIFLVAVIAVTRHFLRFEGRLGSLRTLISDQDKKSLASNRREVLQKAMALKQEDVGKVWREFDESLVISGDQKALFNTLDADHFFNARTLAPGLTGSRLLAATPSFLVAIGVLGTFVGLTVGLDSLNLSSRSDIPELRDGIDRLIQGATVAFMTSVWGVGLSLLLNMIEKFMERSALSKIKSVQQEIDFLYPRIPAEQSLVHIADSSRESKEALQELHERIGDRLQESIKGVSDSMEEAFTTALNKIMAPAIESLVSNASQQSTQVLERLVGDFVEGVSGAAKNQGALLEQAASDVNNAVTDMSSQLGELFTKLNEQQERQLESSRQQASQFDDQISRVADSASSSQKALEDKFGQLMASFSEQVERQLEAADKRAERASEGSLKREQKMEQMFAVLTGRTMESLKSQIEAADEREGLRQERFREQNEQVAEQQQRLLNEIAESVRTTQKQSLQLAEQHRETLQQLASVTGSISESSKHLDSSANQLGLLSSQVKQATDLLGTRMSEVLSVIESAGEQNALLSERLSEQSRLLEGLQRSIQASVEQYGNAAKLTNEGFAELKQHQQEWLSSIKTEFSGLSENLANQVSGIEKQAESWLSSYSTQVNQQIEDRMDKWNNSSRAYADSMLRVVENMNSILDELETR

SEQ ID NO: 4311 - protein, 263 aa, Marinobacter sp. C1S70
MALLRSQKHMSVDEENPYWMSFSDIMSGLLVIFILASVILILQLMELQEEAEQERERLQEQVVEVEEEINLLRKAEEVRRNILTEAAEILQKRGIQVEVSENSTVLRIPNQLLGFDTAADQIGQQYQNTAREIGEVLHQLISKEDRSDYLDTVFVEGHTDSRPFTGRLCGEKGNWCLSTFRAISLWQFWERSLQERAKLSSLKNGEGKPLFSVSGYAETRPVVENQRTADDYSKNRRIDIRFTIRRPSSEDYEKVRAKVDLTK

SEQ ID NO: 4312 - protein, 246 aa, Marinobacter sp. C1S70
MKLPQPPQLKKEWPEHVQSGWSNLINQAESFAQSAGSGSAFDLMCQRIVKAINNGDFGDVYDALEKRLGARALTWLWCNDEKIRKISCRQSVIEVLVEAQNPRLTRTTFLQLCQLYFQEFDHLESIEPGLSSKLEAVLRDQSKKQPRQTHKHMSRDPVASIKENVNWLIGGEGPSYFSRQVRESGQELEQKFAALGLVGYDQGRYGDLCRAHYYIETLKEVELGQWDPIFDELLKPSVNRAYSGPS

SEQ ID NO: 4313 - protein, 666 aa, Halomonas sp. PBN3
MTISRYQELLVSDWFWLGMMAIMAVAITSLSYYFSKYRKNVRLVEALIKGQTREELAWKRQEILEKAQSSRVKAGKLWEEFDESLVYSPDRDKLYNTLDADHFFNGRTLAYGLTSSRLLAATPTFLTAIGVLGTFIGLTIGLRGLQVDADDVDTLRVGIASMINGAAIAFLTSVWGVGLSLLLNVIEKLVERSALRRINKLQHTIDFLYQRMPAEHSLMHIAESSQASKEALQELHERIGDRLQETVSGMSEAMQQAISDSLNNVMAPAIQALVDNASNQSNEVLEKLVSNFMEGMKTAGSEQTKALGTAAEEVNQAVTSMSTRMDELFTKLTEQQQKSGEHVETASRELSEQLDRQRETAMEQQSALAEKFESFMERMTESMDTQFHQASERDEQRKRAHEESLQKISEDQAAAIERQVALADERDQVRAAQFDEQQKAIEERFGGLVEKLVNEQQELMRQVGEASRSANQHLTGISSQYEKLSSSLSEVASSAERSSQNMTNSSTQLGTLSANLHKATVLLDERVSSVTESLEQVSTRNSEVLSGISEHARTLASMQQAISDAARQLDSAAKFANEGFSELGSHNDEFIRKLRDEFTQLGDSLSEQVENIEKQAEEWLKAYSQEVREQVSERMEAWNTNTLSFADQMRRTVTAISGIVDDLERR

SEQ ID NO: 4314 - protein, 578 aa, Halomonas sp. PBN3
MGRGDAYLKAEEKLLDVVRSRNFGVLPALLQKRVAVRALTQLWLDHSDVLKRLMSPRLLEIMVDAQQPRLGRVPLLNMLQLYFKEFDRLDRYSSENDDSLREVFEDLLVDQIQKVENLGEELTADDLISVVKQQGDWILKVDGPAQLVKLAIKNGMTLEDAFSKFGLKGFDSGRYADVCRAHYYIEKLHEIDEQEWSPVFDELLHHDVSKAPYGREGKRIGHAALEVLIDRVTEASEAWQDFMLSLAGDPRVSSRVKSYREWWAPLGEQRVEKVRGWFSKQDLRLFLQALEQYGEATGNSELKRMFPARRTFLEGLFRLKMIKSTRLMLGSKAEYSVRKILKNELKVNYIKLDGQLSDKAIIYLDCGDFHLIEGSHSFKLWVYLAPPSRKYVGYEVTSLSHFDLTQMVPKSYKKEYPSLEYTGIVHSPSTWQNKVFEFLSENGISLDVEALLSKQDYRRYVERFGLPVVRPAKRFVSRVSSESANNVGADYKESQSNADRDQSVLSPLAIQILLYLHRHPDSKARDISRHLGLPLKAINHVLHLDLKGYCIQVSNFNWINSGEGERELKNSGVLGDEE

SEQ ID NO: 4315 - protein, 545 aa, Halomonas sp. PBN3
MLRLIELSALDDSESFDRIQGGLLADDMGLGKTYMSLVAINEYLSHRKLQGLPEKPVLIVAPLSLLENWEQEVSLTYKSIPFKDVKVLQSGRDLSEFKKKGEKRESVQASELLDEEGQMEPDKIRFALHVGPDAGVKRLDVNRRLVITTYQTLRDYQFSLCLVDWGMVIFDEAQNLKNPNTLQTHAAKGLNSDIKILATGTPVENSLGDFWCLMDTAQPGLLGDWTYFRDRWVTPILRAQEDEKDFVRGSVGSDLRKAAGDFMLRRIKEDQLSALPSKSILSGVPTASHGASYNPKLSCSMNGFQLSAYNETIESYRKRRAEEDDVRGFALSTLQKLRAISLHPRANEPLQSLVSKPDSYRMIMSESAKMKVTLDVLDDIRSAQEKVIIFILSKNVQRFMKVWLDKIYGLDVSIINGDTSAVEGKGDSLTRKGLIEQFESVDGFNIIIMSPVAAGVGLTVVGANHVIHLERHWNPAKEAQATDRVYRIGQKRDVFIHIPTALHPEFDSFDVHLDRLLSGKLLLKDAVVTTDVVSESEVMKSLGLD

SEQ ID NO: 4316 - protein, 897 aa, Burkholderia megalochromosomata
MIETILEAPIVAKICAGFILFFVAVFLVRFVPRALGRWSDLNRIISGLTPLKAAGGDPAPLFAKKEDLAHLWSEFRKSLFDPKSFDPATGEYITETSRRTVPAEQIFNAQVVVDSRVGTEFFKHLPGILTGIGIIGTFAGLLQGLSAFIISDNTKVVRDSLSALLHSVAEAFLVSATAIFFAMVITVIEKFFISRLYQKAEEVACLLDSLYKAGAGEEMLEELLYSSKENVSNSKILKDALVHELKGILTSLSESQIQAQQKIIEAQIAAQKNIAEDQSRAYSKTSEDLGRQIGQDIRDGLKAALEEPMEELKTAVKSATVDRAGAVHTLLAQVVEGLNQSLKDLFGDQIAGINTMQQQTVSALQTAVARMEQMSSSLETAGTRATDTMAAKLGEALSGMEARQEMMSRQMAQVVEDMKTTVAGSQTETNARLQETLAGVSNTIESLVSSLSQSVATSQDATNEKLQSALTGVTQSVEALIGSLSQTMASSQSEVSAKLQDTLAAVSNAVENLVTNLSQSVATSQTQSNDRLQETVSSVRHTVENLVTNLSQSVATSQTQTNDRLQQTVSSVGQTVESLVTNLSQSVATSQTQTNDRLQQTVSSVGQTVETLLTNLSQSVAASQAQSNDRLQQTVSSVGQSVNALVSDLTQQAASADAGHRERQTQLAAQAEAAALGVKSSVEALTAEMRTLVAGTRDAVDTMRSSVDTMRSSADSMRTVTTDVVSRMNSGADTLYAASSEFGKAAASVTGVLQQATSTTDKLVAAAASVGTAAQTMQGIVTDYRATRDQLSQMLTELTQVVNNARTDASLTSDVLRRIEASTQALNAAQRSAEEFLEGVGDLMTDSLTTFQQRLADSMTAVNRQLVDKTAAVTSLLRQTIANLADSIELVVPNPEA

SEQ ID NO: 4317 - protein, 241 aa, Burkholderia megalochromosomata
MLGARIVIKRGSRSEAEKPFWISYADLMTALMVLFLVTVSVALLAVTKQVSETERLKAQRDRDISALMHRIEVAASKRPGVKVDHERNVIDFGDKAHFDKNSYDLKPDQQRLLRAFVPEVLAIARDPLGKKWLKQIVVEGFSSPEGDYLYNLNLSLERSQRVLCVLLTKPYADERAMSDDELEQVRDLLLVGGYSFNAAKASYEDSRRVELRLEFLGIGEQRPSVSNAPRGHFGTCALGGA

SEQ ID NO: 4318 - protein, 597 aa, Burkholderia megalochromosomata
MGALSPLEKMRQALSSKHGPQPVVLVQPLTEMNRHERELEKEIREKRPLPPPKDLVIEAIELFRETRRLANSRQARLVTLGCVEPLGKTHYRLIEDAERFPHVLTGVEAFRKHRQTFRNCYQGLLNAYLTYHPDKKGCRPPGRANWELLRQWLRRNIANIREQNGGVNEDWVTEVAAHTDVFSEAPVARFGKETLRGNREPFLLFKKTLGIKDFSWIVDQLVLEQVHAAGRSGTSEFLHYLPGLILLLGSVSENNKTLLNKAFAQILTYYHARTSGAPHKDLQENSVKRWGNPWLKRNNEGWDLVDRPVREMVTSWLKRHYIQYFFEVLAQEGKSDRRRLDFWIKYHEAVGPLTFALGPQTLGSNDEDMADARDLMEGMYVGLQGNGSNNNNAFIMQFGEWVVVEFAQKGNACFFFKESNLPFELNRDVSVPAVKNHIEGDSDDPRDPVRRTHRDLIEADWETTFERVLSARGIFAGQAALSSPAKRRSTTSRGPSGATPQALTRTAQPSQTAAAHARQSENASFQSPGVSRLTPKQEQGVKALCTRLGIRLEDLRSKNGNLWVYHDMAHDSRATPQLKHWGFEYRRGKGWWYKGPA

SEQ ID NO: 4319 - protein, 1257 aa, Burkholderia megalochromosomata
MLKWLKRAASAGTPSNEQKPADVWRCLDSQGVLLGTLEAVGGLPGATPLSSPMMPAMITQLHDEGYAVGEEASAHLSWESLYNLLDDPAYASSLELLELPAVCDYVPELKSHNSLTDRDFYIGVTRWRDGGGRVLEGATRTGALVEVGGKAQLLSRRAWDTAEQVARFHSRPETERDDASQRRQWGQIRRTAMAARARMDEFLYKSVVLTPDTIDINLRKTETGGTRVVEVMPGFEGAPENWLDVFDSYQKVPQRYDISTDKGIVQVLISPEVRTVLDNIRRLPGRLVAGSRAEAFLLNPFATLGEDASAVIDEAQFERARIEADIFFDHFTALIQRDAVGFPEHVALAIETPGPSEVSAEERSFADDAELEDFIRGAERALTASKQLYGWQGYDFELLGDSVAQVELLKAALAERQQPRILVRYEDVYDLSAYTSRINDIGIEQPYYSPYIAKKGEEWWPENLVNVIVYTPEGSADPVAVPVTEAVRDELKAKVEQAQASGQTSVELPGFPKPLPVTEARDILDAFEQFGKSVRDGHEEPPKPRDEGTSRPKAKQLLIKPNVDAVDYEEIRREILTTVSAAPVLPTGFLPTTRLKEHQEEGVAWLQHLFRHSPTHCRGAVVADDMGLGKTLQLLTFMARAFEDDPSLPPALVVAPVSLLENWAEEIGKFFKPGTFQPLIAYGDSLASLRVPRAAIDEELRSQNLVRFLRPNWVGDANIVLTTYETLRDLEFSFAAQKWSIMACDEAQKIKNPNAMVTRAAKKQNVMFKIACTGTPVENTLVDLWCLFDLVQAGLLGALNEFGKRYRKPIEAETEDEKACVNELRRLIEPQILRRMKADVAKLPPKHVVPTLIPISTLQRTYYTSAVNAYMASKNPAGGETGVSPFKNHLGLIQYLRSICTMPHAPGQGRFRPQALEQARNEAPKLAWLIETLQQIRAKAEKAIVFAEFRETQQMLAHYIKEVFGFAPDIINGDVTASAKHVASRQKRIKAFQAKPGFGAIILSPVAVGFGVNVQEANHVIHYTRNWNPAKEDQATDRAYRIGQEREVWVYLPILSAQDFTTFDVRLNKLLDEKRELAGDMLNGAGTVLPSDWNLQDIVPRGSNDPAFNRKVTLDDVLRMEWDYFESLVAALWQKKGFRTVYRTPRQDEGVDVVAFTGNAGDLIQCKSSGTEGAALDSQGVKDVVAGEAEYRLRHPGVSFAKWAATNQYFNETAADRARKNNVALLNQKDIETLLRQHPVAHSDVQRFLHAYWDEAA

SEQ ID NO: 4320 - protein, 667 aa, Massilia sp. WF1
MNSISAALAHINPSLAAVHGFPLYIFLIVVFLTLLFILGYLVMGIKVWTQIRSVLHATQALHKANPSPDPKAVGKAFRWEPFKHLWAEYDDTLHELRKAGSGENALIEVRATVPADSIFTRDVLVDSRLFDEFTRHLPGVLTGLGIIGTFAGLLDGLQQFRPTPIEEAVKGLGPLLMGVQHAFVASGTAIACAMLVVFVSRLTLAYFYRLVEKLTHTIDSMYSTGAGEEYLSRLVKSSEQSAASTAQLKDALVEDFRLMMTNLVERQIQAQEATTVALGNHIGEAISTAIAEPMKRVSEAMETTSRGNGEQVNSMLEALLTGFMAKLEDTFGGQMRGINEQMQRSMDSMTAVQASLQSLLSDIKQTNEQAATQMSGTLEDAMRKAADNQQLMTDQMREFVQEFRRLVTEEQAKSKQLMDEAVMKVLSEVAAAMDNMEGVRKTAAAEEAGRSERLASQTDHLVGGLASQVEALLGTVSEQVTKTQRNIDVLSDVSLRAIDGMNNGALTMGAAAQKFETAGTSVTNVLDRSTNIAESLGSVAQTLQVASTAVQRGFEQYDSTRRTVDTQVAALMGLIESVKKEAGVSQQLVESIKTSAEAMRRSEEEARAHLDQVNQALVKAFSDFGNSLVSQVKSTIAETDRHLAQGTGHLNGVVQELANAVQRMKRA

SEQ ID NO: 4321 - protein, 234 aa, Massilia sp. WF1
MLARVLLRRSGKHEGESPFWISFSDLMSALMVLFLVVMAVTLVAVTQSIDASTKANIERTAAISKIMAMIANDPKSAGVGVDQQNYRIDLGKQVRFDSGSYTINPEAGQFLRNYIPTLLKAKDTPEGQRWIKSIVVEGFTDEDGTYLYNLQLSLDRSRGVVCSLFQNTAGGTALSAEQLRKVQELFLVGGYSFNSIKKDKAESRRVEFKVDFWGIGEKPPSAQSVLITKGFGTC

SEQ ID NO: 4322 - protein, 578 aa, Massilia sp. WF1
MLASIALESLSRDLAKAIGTLGLADVKFGVPDLVEKPAKQAEEIFQGYAKAKPSKEDAYAAALAFLRGTKLDEWQRDMVASALCVPVREQSGATVVGAQERFLNLLETYRDEAKCGDLWRLTWHGLLYSYFNFDLDAAKSASVHTGWEALRDFLAETWPFVDKQTEGNLVPAWVSVIRQEVELLSKQPVDKYANAFLRGDTSGIDRLASDLGIPPSSWFWHALVLSAVKQATTESDTKFRERLPQLLDLIRSKPGFRDEALEFILNRYHACQGAPADERLRDFVCQPTVWKNPKLKAAGIATAWNRVPEAVWKMVLAWVNEQNLKDFFDILAARNKADEGRLAFWSKYLKQISWTRLLFGADTMALQKANAEVRNLIAREEGSYAQLTGKPEVDAFMMQLGPYVVIEFSKKPNACYVYEADQLPFEPYDRYYDGGTSDLAAGYRSDVNYALRIVHRVGWDDRAEIDLRQLGIQPDARSGTNTFRTTAAKAESTKTSYDKPGRPSISAASKMHGGPDLAIVKAIVSRFNRAIVDDRRNLPNGGRLWVADPLQRTQLSAELERMGFKWSDRRLAWYFPEN

SEQ ID NO: 4323 - protein, 1284 aa, Massilia sp. WF1
MSIFNIFKRAASNTSAAPVLKTLWSADGVRVEFSDPLPEPTQDALLDALSAASAEESVLGAYLAQLVSDEQCKLQRDAAIVRWEDIYQLQTSAEHVGALALLDLPPVGPLRPIIDSTGTLSGRDFELEVTGWTDGSKQLRVTELIGGIATVDGRPQMLTRAAWRTASEIATFRSRDDGERSQNHHELAWARIRRFADEAQALYANPYLETTLVLSPETLRLPQSKAETPFGKVLTVAPTFDGAPDGWLTAFDGFNSVQPHYDLTRGAGRVRVVISEPVRKVLEVIKREMPGRRVAGSKAEKFVHNPFAFLGDAAHEVFREDEFEADRAEAGAVEAIFSLVTRTSNARVDSVDLLVTEHYANGAASTDCEVFNTPEELEEFLSALKRALEDDLQKLKWGEYDLTIDGHCTVQLEQGEQVAHVWRMQPAERIDFNDVYEMEGYSSRIEGIGPARPIYVPVFQKDKTEEEKEGVWLPSDLTPMVRVTLQDHEGQVVIPLTKEWVKTFDQQVERAELDGSPSVSNPSLPTAIATPQARQLVDSFKSMVDAQERVRGDVAGAPKDKKGPRQTLLVKTNFYDVDYVEERRTSLALPAGWSAKLPRCLRPSIKLKQHQLYGIAWFQHLVSKAPTECRGALLADDMGLGKTVQLLSVLAWYYEHNPNAAPSIIFAPKSLLENWEGESKKFFNDSFPEVLVLYGDKLKERKQPLGLIDEGLRDKGIVDLLRPGWASTAKVIITTYEMLTSYEFSLAKQPFAFLICDEAQRIKTPGTLVTLAAKKLKAVFRIACPGTPVVNSLADLWCLFDLVQPGLLGALDEFWKKYRRPIECDTEEQRDALQRLQSLIAPQTLRRTKADIASELKAKLFAFTSVKEQGLSFKALLEETERLEIPMTEHQRILYKGGLKKLQDANAESNSKKRAQLSFGALHLMKAVCAEPYCLPGTKFLMDKSGFDVHLKNSPKMKWLLDRLAAVKAAGEKAIVFTELREVQAALYYFLNKTFGIKPSIINGDKQGRQAYIDKFTASQGFDVIILSTLAAGAGLNITAANHVFHFTRAWNPSKEAQATDRAFRIGQQKDVFVYCPTIVADDFNTFEVRLDQILKRKAGLAGATLDDGGLSAMLNGSGGDVGFADLVDNIGIGERVVKHYLTMDDVDRMDGAGFEVFCCLLWQKLGFQARITEKRRGDGGVDVVAIKGRKGELLQCKSSKASSIGWEAIKDVTGGAAGYQVRYPNTLFTRVAVTNQMFTQGAMTHAVENKVQVVTRASLEELLGLYPTTNHEFDEALQAWAMN

SEQ ID NO: 4324 - protein, 632 aa, Alcanivorax sp. 97CO-5
MQEIQITDLLMLLTKMNGPSLAFVCVMLFLFTVTCFFLLRHWLNYRGRMAGVSALINGQVKDDLANRRRQTLEDAISNRREEVGNLWREFDESLVFSNDKAKLYNTLDAEHFFNAKTLASGLTESRLLAAAPSFLVAIGVLGTFVGLSVGLAGLDVSGALPELRMAMNTMISGAATAFNTSVFGVLLSLILNLIEKLLERNVRNQVRLLQQKIDFLYPRIPAEQTLVHIEDASQKSAESLMGLHERIGDELQKTVNEMSVSMQEAISESLTKVMAPALERLAQNASDQSTTVLEQLVGSFLDKFGEAGRQQGQALEKVAGDVGGAVEGISREVGRVSSMLSEAGSKTDELLVQQRQQMSEQMARLQEQASTREQAQRQQFESLLEGVTRKLSEQADTASKADQERQERLDGSITRMHEGQVGALNAIKESSENSIGASERLLETMEPIAKYLGEAAGSLDRSAENLRATEKGFSVLGAEIHNSADRLGNTVTAMVQKMAEVSEGSSQVSEGIQGQLGLLEQLQAGLGETSKRMEGAATRMLDGFGSMEASQNRYLESVKQQFESLGDSLKQQVMTVEKQAEQWLATYHKEVTGQIQDRMGKWDEVSRNYADKMLTTVQAIDGIVDELESKSR

SEQ ID NO: 4325 - protein, 251 aa, Alcanivorax sp. 97CO-5
MRSFRQSSAPVDEENPYWVSFSDVMAALVVIFILASLVLLMQLVDLRQDVNKEIKELKIAEKVRKTVVEDIARELKDKSIEVQIAENHSIIRIPNDVLGFRSGKFSIDSQYQDTARIIGEVLASVVTKDNRTEYLDTIFVEGHTDNRPFWGAPGKGNWGLSTFRAISLWEYWGEAIDKRMALYNLRNHEGQPLFSVSGYADTRPVTEIQSAESDYELNRRIDIRITIRRPDAEDYEKVKSKFGEPDATPQD

SEQ ID NO: 4326 - protein, 508 aa, Alcanivorax sp. 97CO-5
MRLPKIDKKSFPEWPESTYQTWAALEDKVAHKSEELGKSGAFQRLEKLIKECSRRGQELPDEAYHTRPGVRALTWLWLQSETVREDYLDQEALEYLLSAQNEKLSRMVVLQLIQLFFREHDRLSDGEKGLMESLGIILSQQAEAINARSSVQGRDIIAVVNSDSWLIENDGPARLVEKCLLTGLPLDDFISRLGMDGYMDGRFGEVTRAIYYIKELQNIPIGQDHDVLNEIVKERVAKAPYQENLRVGHAAIKILIDRTEEEPSERWQDVILTIAGDPRVSGTNRQFAEWWAPLGDDRVNKVRGWLAKEDLKLFLEAVEQYGLDSGDESLNNMFPARKQFLTGLFKQGVVRNSRLMLGSKAEFFVKRILDKEMLSSYARMDGTMSDKAVIYLDCGDFHIVEGSHSFKIWLYQERPDPSFVNYDKNYYTHSDLTIKLPRQYRKDHKGKRYAAIPHYPTTWRKNVLEFLVDHDVELEWPPLFGKGEWKYYKNLHGIPTKDARRLKNYEGG

SEQ ID NO: 4327 - protein, 1004 aa, Alcanivorax sp. 97CO-5
MGFRESIANILGRNSTQEKGGLSLLVEDEGISFYTSPDKLTDIRSGNASSLAGAQHVALTMLSESGQAQPISNGFFVPSESVACLEEDILSILQLAPRAPLQFQIKVDGKSTHPGFKVSAFVLIDGESYPINRKGPILSNTSTDKYTLTPPQLLALDAIDIHASMPADEKGEGSNLRLIATLQQAKRDGLDINLSHFDNINVAEAERIGLTVSKLPDGSIELSPTLGDGTPYAELLSRWAQLDPGADEGTMRIGNRIMLLDKQKMEGIREVFSSRRIPADQVVRFMEAPTAFIDAALVDLDTGFSVRVDGVGTMRHIAIGELDAKGADWFSQEGRPAVPQVLGGLIQSEEDADRIEQEIQAARGDGASTVVVDGQEIDISDEEAVSAIIEKARKNLSEPDVVLEEAEQPDEKRQKVSVLVKDAEERREELLAMADRAAPSSEPDWSLYKRSPFPHQRAGIDWLVGLGEQAQNADAEQFYRMQGCLLADDMGLGKTFMALVSLSELMQRQRKAGNAVKPVLVVAPLSLLENWEEEVEKTFTRSPFRDIVVLQGGRDLKRFRIPNTQRETVQIANMADGEVDMATLRYALHVGPEAGPDRLDMDARLVLTTYQTLRDYQFSLCRIDWGTVIFDEAQNIKNPNTGVTCAAKALKSSFKVLATGTPVENSLLDFWCVMDTAQPGLLGDWPAFREQYVKPILKADDEERNRVRQEVGNDLRQAVGRFMLRRTKEEELQGLPKKSIFGGAITEPSGDVQPMPALAGTMTGVQLQTYDQVLDDYQSRRHEEIQGLAISSLHQLKTISLHPRLQDGDIAALSSGKNVRGVMAESAKLEAMLNTLDEIRARKEKVIVFLITKKLQVLLKVWLDRLYGLDVGIINGDTKAVSSKKDDATRKGMISKFEAASGFNIIIMSPVAAGVGLTVVGANNVIHLERHWNPAKEAQASDRVYRIGQEKPVNIYLPAAHHPERDAFDVHLHRLLDNKLLLKNAVVTTEAVSEEEMLKGMGLG

SEQ ID NO: 4328 - protein, 679 aa, Candidatus Accumulibacter sp. BA-92
MIEVSNIATHLLVTGGLLSVLVLGFLALFLVPGVIHWFRLRNILSGVGSLEAKTSPGDFKKLFMRDKQLAHLWAEYSESLHVQREERDGQMQVVAVRSTIAADTYFNEQFVVDSRLRTEFFKHLPGIFTGLGIIGTFTGLIEGLRRFQVSENAATVRASLESLMHAVGEAFLISAAAITAAMAVTFLEKLLLAALYRKTEAIAHGIDARFEAGAGEEYLSRLVNASEASASQSKILKDALVKELGDILRELTASQLSTGQQLHAQLAQRIEESTNRQVEAAREDNQVLGDIIAGSIEKSLKGPLDKIANSVETASGDQSATAVKMLNDIMVSFSQRLNDLFGGQINGINELNKQTAQGMQDAVASLNALVGKLEESGKKTTDDMAAQMAASIRAMEERQASINTQTEEFVDQIRQLVQSSQAETQQKLQATLDSIGQQMTTILSKLSESQAKVFEDNRAREQSMADRASNAVSEMTGSVEAAVKEISAASQTMAQSVSTLTAATASTVDKMSAGANRLDTAATNFAAAGDRVTSAMGQAATVSGKLTELSGALTTSSGALQEALRDYKSQRDAVSALLGDVRATVELAKKEVSLTGDVLQRIETSTTKLSQAQKAADEYLDGVSQVLADSSDAFRESVVSTLAKVNHDFHTKLSSAVGLLSTAVQELEVTLGGSLAARR

SEQ ID NO: 4329 - protein, 236 aa, Candidatus Accumulibacter sp. BA-92
MFGARAVVRRGNRDEAEKPFWISFADLMTALMVLFLVVMGVALLAVTKNVTEREKKLEQHRKNIEKIMERFEEAAKRHEGIKVDKLRQVIDFGQRAQFAFGDWRLNSQQEDVLRKFVPEIITLANDELGKSILKRIVVEGYTDKTGTYLANLNLSLLRSQKVLCTMFATSGPSLLNAEQKEQVRGLFFVGGYSFNAAKDTAEESRRVEMRMEFLGVDESRSAPPAGTGNFGDCALR

SEQ ID NO: 4330 - protein, 573 aa, Candidatus Accumulibacter sp. BA-92
MTALDRLSGLLRGSLRVAERPFPQTDDLDSVIAGLKKHNKAGSGSNVPEDMQEAAVRKFWHAQRFETLKDARLVSFGMCVPSRPSGPCIMEDRQRFQAVLDSQTGIDQWVDEPRWYRRCYQGLVRSYFTYDAKVAQAPTVGKQNWGDLRDYLNERTRNIVDKKVNPDWVTTAVGNRQLFGEDPCAPYAADVLSGDTTKVDLLCEQLGVVKSSWFLRELVLSQVRQATKLSHEHFKDLIPRLLELLSTNLVLRDRGLILMLDKFASTVQPGINEPLRNAAVEWWGNPWLPSNETRWGGVISAAREMVSEWLKREFIEAFFTKLAEDGVGDRRRANFWLRYVKSMDNIQFALGARALHSRDRDFEALRKKMKGLYTELKTTDSSNNAFIMTLGDLVAVEFGGMGNAFYGYDVRKTLPFDASRPVGTTVNASNSLKHKNRMLWMQHQDGIKGWKKWEDMFEATLKKHFDITPNAAARRVVPRAVAPAPTELTPGPVAPRPPVQSLGTGQTGRHSCDEHDLSMAALYAFARAHELKVEDNRNLNGNLWVRTDDNDLRVDKALLDWGFQYKPGKGWWR

SEQ ID NO: 4331 - protein, 1250 aa, Candidatus Accumulibacter sp. BA-92
MVFSFFKKAHTEPAEPWRRQLSDKGVVIHRSGEGTLLAGEMLPAYLAQLIDDGFANQEPNDEVSISWNSIYEALRSPGYDELAEVLEFPPFTSCVPALESRNSLTDDDFSIAVSGWRSGQHFVEQPEVLGALLVRDDQTELMRPEHWELFTEVVAFSRRAPDQRNEKVHRQTWGRIRSLALKAGAKLDDFLHRSVVLTPERLDIGLRKSAPIADDSVIEIEPSFAGAPPDWFERFDSSREVLDRYDIVTPEGIVQVLITPQVKTVLQEVKRLPLRRVAGSRAQAFILNPFATLGPDAQDVIDEGQFEKARERAGLQYERFVPNIGRDATGYPLRVGLLIESASAAGPASSETEWLTDEELAKFVARLEASLAKGFQLLGWNGYDLELQGETPSHLAELQAALEQRRKSESMVSYAQVHDLSAYSSRIEGIGVEKPYYSPYITKKKDDEGWFPENVLPLIAYTPEGDTEPIAVPATKDALEKLREAITKAEAAGQDTLEVPWLPKPMPLEEAKDIAGTFDEVLDEVKHKKFDPERQAAERKEKLGAKKTLILRSNIQAVDYDEQRREALLALPSEPEDPPGLSSDFTLLPHQRQGLTWLQHLYKSQAEHQVRGAVLADDMGLGKTFQLLAFMAWLAEKDLDVAPMLVVAPVSLLENWMEEAGKFIRPGLLPILTAYGDSLAPLRVPREAIDARLRTEDGLVRFLKPGWVGKAKIVLTTYETLRDLEFSFAAERWSVMVCDEAQRIKNPAAMVTRAAKKQNVGFKVACTGTPVENTLADLWCLFDFIQPGLLGALNDFGQRYRKPIEARNEEERARVEELRTRISPQILRRTKAEVAKDLPQKVVVDECRQLPLSSAQRNLYAKAIEDFKKRNDPTASVPFKNHLGLLQYLRLVCTDPRRYGLTAFKPEPLAEYRAKAPKLDWLLGQLQRIRDKNEKAIVFCEFRNIQRLLQHYIEQTFKVRADIINGDTSAAANHTTSRQKRIKAFQEQPGFGVIILSPVAVGFGVNIQAANHVIHYTRTWNPAKEDQATDRAYRIGQKKEVYVYYLVVTADDFSTFDVKLDQLLTKKRELASDMLNGSGDLSPGDFDIADVIPVGNAADIQERVDIEFALRMEWRHFEGLAAALWSKRGYDLCYCTPGAKDQGVDVVAISGDQGVLIQTKTSSNEGTKLGWETVKDVVGGEAFYRRRHPNVEFKKVGLTNQFFNAHAHEQAELNDVLLVDQTLLSEMLSEYPITMLELERLLYTDWESVT

SEQ ID NO: 4332 - protein, 785 aa, Burkholderia jiangsuensis
MNSTSDSLSHLLHYFVFTALSIAFVLFLWQFVLPFIRVRARLLGVSKAIEELKSAAGHVDADQIGGTIKNEALRHCWDEYRDTLHAQKTVNASGVTQTGRWRATAIASTFFTEQALINAPLRTEFYKHLPGILTGIGIIGTFGGLILGLNDFKITDDPLVVRASLESLVSSVGGAFKLSGLAIVLAMLITTVEKSMVNKLYTHLDALCGLIDGLFDSGAGEEYLQRLVEASETSATQAMQMKESLVTDLKQVLSELTQQQIQAMRTTSSDLGASITNSLSEGLAEPLARISNAVQTVGNSQGEAVSRILTDVLSSFTAQMESMFGSQLHGMNEMLLKTANTIESASQGFGALAAQIQDAGTGAADAMARRVEEALGQIQNHQSEANAQMQAFVDSLKDSVARGQAESADLTQNMLRQMSESTASFVRTLQDQNQASHAQAAAQQGEANACMRAFVDELKDGVARGQAESADLTRDMLRQMSEGTSSFVKELQDRNNASHADAAARQARASEQMHVWMEETRASMAQGQNEAAQASSRLIGQIGDKASEMIDALKAQTSSAHEEHGRRQAQLAAQIADLLDRQTSQIDKVTLAVQEGSLAMRDAIDKLNAATHGNIERMGQGAERLHDASTRFAENLLGVKAATDGVANTAERFSQAAASLDGSLGAVQQALADQRTVRDTLADMVSELRTVVETVSSEASLKRELVQSMEQAGKSLREAQDATRDHLDDLIEDLAEVHQEFADQVRKTLRESNSAFHTELAQATGLLKGAIVDLGDAFDRLPAAA

SEQ ID NO: 4333 - protein, 252 aa, Burkholderia jiangsuensis
MLGIQTPARRRSRDDGEKPFWISFSDLMTALMVLFLVALSVALLAVTKHVSEAEREEKQRAEQISALMQEVRRVANQFDGVRVIGTTIDFGPRGRFEREGQNTLSEPQRALLREFTPRLLEQLRTTEAGKNWFKRATVEGYASRSGKYLFNLNLSLERSERVLCELLRDPGHAQPALSFADRALVATRFFVGGASFNSLRATADDSRRIEIKLEFKSRQERKDEATQIAPGADDGALEQALDLKERCPLIDR

SEQ ID NO: 4334 - protein, 618 aa, Burkholderia jiangsuensis
MPADRPLTPSGARLREAMLRNGPSLTADARVMSVALREIRRAFGGRDDTPSLDQLKIALRTFFAGRQGLSPTQIRYVCYGVAVPLDDRQGERLIDDRALFRSLMALLGDYEQQERRFRKFYQGLLQGYFSFTSDSGQQSDPHANWVGLRRYLDERLPAVHASASERGIVPEWLDTLREHANLLTDDPCSRYASHLASGRTAELAQVFDGLGIDSNSWVWEEVVMAYVRSVCERDDAEFQDALGDVLAYVNGRADIKLPQLLAVRAAARVIRRYAKCRNRPEHERLRDTCLTLIGNPWIDPTAWDAHVNHEPARQMVEGWLKRRLIRDFFELLAKDGAADLRRLNYWLKWEPEISDMWFVLGRDAQRNKSAAFTNVRKRMAGKDRILADAADDNNAFVMRVGSLLVVEFGVTGNACYAFEASRFPVDLDAPAFSLYGMKNRRVAALWLSHSGYTWEQNFDMKLRGLLRTTPATPATPRATAAPSRAAATPPRATATPPSRPQVTPPPVSRAPNRPAGPFDGLMPREASPLVSPPPERPAAPLEGLVPRDARRTRAESFDRELRDVLSLCELSGFEWEDNRSNGGALWVLLEQRRQRPHLANRLEALGFEFKPGQGFCLK

SEQ ID NO: 4335 - protein, 1102 aa, Burkholderia jiangsuensis
MLAKIFGWGKTGKSDAGKAFAPDAAAAVPVLTIDEHGLRYASPAPLARQWLASPYDYPAHAELGAHLALVAQEGFGVAVGSAVLLSWEHVYGILRSDELRSFRAPLHFPPDTLMRPRVTNAGALGDADFGLRIDEWVDAQGRGARPAPRLIGKVLRTGDADALLPASVSDMLDLLSRFHATPADARTLSFKEHIYGRVRTLAAESGCPVSDYVASTIVLAPEHLRLDVERRGEGAAAVLEVSPVFEGAPDNWVAHFDRLPLDDRYSIPEGPALVRVVPTPEVKAVLGEIKRRMPGRRVTGTRAQAFVRNPFATLGESARKVLDASEFEVACEAAGIVFKSFLPQVERAESGEIVRVGLLVQPIAASNEEAAMTWFASPDELARFTGRLSRALDDGSQCTAWNDDELEIVGDTSEHLETLSGWLREWKTPALWTASEVLDLRHYSERIDEIGVEKPFAVPVIAKNREEGGWFEENTSIGLRVDDPSGGTRYVPFEFGEIPSLQESVNEARAAGADRVTLPGLVQPIPIAEAQRALEALARAAAEVQRGAFTPRVAALPAARKRLIIKRNFEDIEYNEVRADALHMPPDRAPAMPKTLRPEVVLKPHQETGVAWLQHLWALSPAACRGTVLADDMGLGKTLQLLTFIASCFEREPQLEPALIVAPVALLENWRNELARFFEPDTLPLLLLYGDTLKSLRASRQEIDESLAAQGVTRLLKRDWIGGTRLVLTTYETMRDLEFALARQSWSIMVCDEAQKIKNPAALVTRSAKKQKVRFRIACTGTPVENTLADLWCLFDFVQPGMLGALNQFSRTYRRPIEAKTEEQQAKVEALRKVIQPQILHRKKTDVAKDLPVPVENEACKRLPMSPYQQRHYEGALATLRAQRETNPSAQLQALLAIRKICTDPHGFAEPDVRDVPITRLVDDSPKMGWLVKTLKMLAADAEGRHKVIVFCEFRELQLVLQRVVAAMFGFAPSIVNGDTSADPRAIGNRQQLIDAFQASDGFDVIILSPLAVGFGVNIQAANHVIHFTRTWNPAKEDQATARAYRIGQTRTVTLYYPGVISEAFPSFDVRLDALLQRKRALAADMLNGCSDLTAADFADFG

SEQ ID NO: 4336 - protein, 644 aa, Comamonadaceae bacterium B1
MKNVLRSLEDKSLKDARDPQALDVAFPKEGELAHLWREYKKTLYAVPGEATDGISTVRWASTAPAEVVWNSQLAVDQRVGAEFFKHVPGMFTGLGVIGTFFGLIEGLRRFEVSADADVVRGSLESLMHSVGEAFLISAAAITLAIVVTFVEKLVLTNLYGKVDAIASSLDRRFQAAVAEKFLELTAAHTEETATQLKHLKGELLKDLRPILQDLSDKHTATLERLATALQERLTEGTHTQIEAARDNNLALGSTISSAITGSLAAPLHDIKTAVQQASGDQSAAAINMLQDVMTSFSQKLNDLFGGQISGINELNQRTAQTMQDAVTKLNELAVALQDAGKVSSDEMTKRMAEAIEKMEQRQESINTRTMELVDQINTLVASSQTETSAKVQSTLQTLGEQMGGMLQKFQTEQRDAMDAGRKREQETNERTQSAVSGLMGSVEQLVQQIATASTKMQESTASLGATTTLAISRLSVGADQINTASRNFTAASDKVAGAMNQAATVTTKLSDLTTSLTVAASSLHQGVQDYKVHRDSVGKLVSELNGLVANAKTDVSITSDVLRRIEAAAKELSKAQVQTEQFMAGVANVLAKAHESFREAMLKTVQDNTHDFHTKLSSAVALLGTSIKELDDVLSTATPKERSK

SEQ ID NO: 4337 - protein, 236 aa, Comamonadaceae bacterium B1
MIGRRSPSQQRGKDEPEKPFWISFADLMTALMVLFLVVMAIALLAVTRTVSELEKREAEYRADIDNCMILAVEAAKRHEGVRVDLRRNVIDFGDRARFAFNSSLLSPEQEGVLRRFVPELLSMADSDSCKRVMKRIIVEGHTDKTGSYLANLNLSLMRSQRVLCAMFKTDGPNPLTDAQKAQVRDVFLVGGFAFSASKDTPEESRRVEMRIEFLGIDEKRVKPPQGATGGFGTCAI

SEQ ID NO: 4338 - protein, 609 aa, Comamonadaceae bacterium B1
MDPLALLSDLLRQTSNQSSVPMRQCTEIDGVLAELEKRVRSGSSSYEPNDLQVEAVKNFWDARGFESLRQARLVSFGLAVRPWNDRRCLIEEPERFGAALTGLRNWESSPRQFRRCYQGLVRSYFDYDGLGRDVPATGHRNWRQLQAYLCDKAKLIRDAAINPDWVECALENKGLFSPTPCASYAQDLLDGREDKVRQVRELLGINDASWFTRELVLAHIKRACELEDTAFTNMVGRLLALLGRNEVLRDRGLRVILERYAEVAQMPQHSGLKDYSVNAWGNPWLPSNEHRWGGVTDDARQMVGDWLKLEFIELFFTKLVQDGRSDTRRVKFWAKYVPLIENIHFALGTHAKYSHEPDFVALRAKLKGLTVSLQDNKPFNNAFVMTMGDLVAVEFSGESNAFYGYSFKRSLPFDLSKPVRSAPVNGRNSLKNDARVLYLTHQDSVRGYSGWEDRFKKELQDKFGLVPSRQSAPLVVLSPASTGSHTPLAQPAVPPQQSTSPAADTTRQNISPQSFGVLRPSAAPVQSQVAPRTPTAPEQKTLPIPASEVYNEVNLRKLAWRFSASIVDRREKGGSLWLVMANAPEARRILKAWGFQYSEGKGWWKKDLE

SEQ ID NO: 4339 - protein, 1255 aa, Comamonadaceae bacterium B1
MSIFSLFKRSTVSEQHKRWHRTLTEAGVTLSPRAAEGEPLQATGFGGALRQMLDDGLANEAGERYLLTWDCLFEALSLPAYDGLSEALELPTTTKLRPMLSSRGALVDEDFAISLGPWVDAEGQDFSPEYRGASLQIGSRSELMTPEQWGLLKAVKSFAQRPPEQRAEHTQRLAWGRIRRHALAARAVLGDFLVKTVVLTPERLDLAFRKSDAVTDDTVIEVLPGFEDAPADWLTQFDRFDHVSSRYDLPTQDGGLVQVVISPAVRTVLEQVKRLPARRIAGARAQAFLVNPFATLGEAASKVIDEAQFEQAKLDAGLFFERFTPLVERTEDGVPSKVGLSIERADDTGLASANVIYLSDEELRRFIGRLEHAIKRGHQLVFWEGRELELLPEAEEHLKTLRLALDQRLMPRVLVTYDQVHDLSAYSSRVEGVGVEKPYYSPFIAKKKEDEGWFPENVYPIIAYTPEGSAEQVAIPVNDEAIDTLRKAAHEAERRGEAEVTLPWLPKPIKVEEAKRIVGTFVEVLDEVKERKFDPEKRKPAGPKSKKTLLLRPNIDTVDYEEKRSAALRLKQHDPRVPRTLAPDAKLLDHQLEGVGRLQHLFGLRTGLNIRGMVLADDMGLGKTLQLLTLMASILEEEPATKPMLVVAPVTLLENWKEEAQKFYPGAFSILTAYGEALAPLRVPRESVDERLRNEDGLVKFLKSNWVGDAKLVLTTYETLRDLEFSFASQHWTLMVCDEAQRIKNPSAMVTRAAKKQNAEFKIACTGTPVENTLADLWCLFDYVQPGLLGALNEFCRMYRRPIEIDDRDEKGKKRIEDLRQRIDPQILRRTKLEVANDLPKKVVVDDCRRLPLSTTQRQLYARAIEDFKTRGDPESHTPFKNHLGLLQYLRLVCTDPRRHGLTVFKPEPLEQYRKAAPKLDWLLTQLRRIEAKGDKVIIFCEFRNIQRLLQHYIAEVFGFEADIINGDTTASATSAMSRQKRIKAFQAKLGFGVIILSPLAVGFGVNIQAANHVVHYTRTWNPAKEDQASDRAWRIGQKKDVFVYYPVVAADDFTTFDVKLDQLLERKRSLAGDMLNGCSDISAADFRVEEVVPGDFIQDIDEVVTLDTAMRMEWRHFEGLAAALWSKQGFDTVYCTPASNDNGVDVVAIRGAYGELVQTKSSAADGRLLSWDAVNEVVAGEAFYRRRHPGVTFKKVGLTNQFFNSGAHEKATLNDVELLDQSHLAQLLAKHSVTMLDVERLLYHDWQQQSDCRV

SEQ ID NO: 4340 - protein, 629 aa, Paraliobacillus sp. PM-2
MFASIYEVISNDFYIRILTIAAVVIFFVTLAFYLWIKIGMNSFSKKLNEVSNQEGGIDKRIVLINEWFKSSKSKWLPGILEKSWKKFYWEYSSTEEHYIPDVYESFKEDQIVYKYGRRKLVETLPAVFVSLGILGTFWGITSGITGINSNAGVDELQGGINTLLSGMEFAFYSSIAGIVISLIYQLCDRIFFYRMISKNFDLLMSDLDKAFPIKTEGSLLEEMVKTQQEQMNDLKTFFADEFVTKLTTGISETVQQSLNPHLERSNEIMETVVQNTTEAQGEKLNEMVNYFVESLNEVTGDHMKDLGEALNKTVEWQEKVHGEMSALVEELSNVAEKQSEMAKNTTDLSEQMNEYTETLSDYQGKLITSTQELSSITEQNTSLLEQMRSLSHEMNDRHKESEDNFANRLDQMNHTMKRITELGAVMNDMQEETKTTIESLSYANESIDQSIINNTKLTDSLVDQHEISNQWSVKTQSLLEDLVENSEINESMHTNMKQLFERITEERETLDNTKQEHMDLLQRNVQELKYYWTQNSEALVGNREQFEALNNRLDQSMNDFADHMQRGVQRTFEQFDKELKTAVEYLARGVGGINQVVESMEQDIDSVNGQISRFNQSLEQIAAGVEKQG

SEQ ID NO: 4341 - protein, 236 aa, Paraliobacillus sp. PM-2
MARKRLERSRQVKRFEEGSNHYWMSFSDLMSALLLIFALLLMVNIFGNQTEMEAKDQMIEEVLGVKTRLIEELSESFSDSNLEMEIDPQTGAIRFSSGVFFSYDSAKVSEAGSENLKSFVPKYISILLSDEFREHISQIIVEGHTDQEGTYLYNMELSQDRSFAVVKEIYEDDFPDFEAKKELRQLITSNGRSFTVPMYNESGEVDSEKSRRVEFKFRLKDEEMIKNIQELVNDNE

SEQ ID NO: 4342 - protein, 898 aa, Paraliobacillus sp. PM-2
MALFKRNTVNIILNKNIESKGVIFSIQQDEKPLSLPIRLTVSEMKGLTNLDQLQLVEDLWLDEKIQEVEKYSYFLSYEMLYKLESEERAILTLPEQTTAVDIKIENESFVGSKNFKFIPRIHTEGYPNLHRVGTRKGAIFELPTKENILIEPEYYSLLENIANAPDPRDRDELFLYIAKIKKQAKALGVRVSEHIEREEYEFIDEVSIDLERSHNSITFSSSYKHDELAEEDLTELNKTRSGYTKLGTTRVFVDQNTREKAAKVQQIESIQGQDIPKFVQNPSAFIPEDIDISLEDFGERVKNLGIRVYKAQPFIHANKSENGWFEYETGYQVRDDQGNSISKELDDFFSEDNSGDFKQLDEDTFVAAPAHAEDFNHLATKIKEEAKQNPSSQVIPSNYILEIFENINNIEFNQPIQEVRETLNDEQVLNNQPPQGFTATLKSFQQDGFVWMKSLRFTGYGGLLADDMGLGKTIQVIAYLSYLKEMSRLTPTLLVLPKSLIDNWIKEMDKFAPMLSGNVYVHLGSNRIKDPTIISKFDIVLTTYQTLIRDQLVMGRVDWQMVICDEAQAIKNPSTGASVVVKALKNRGRIALTGTPVENNLTELWSIVDFVQPGILGSLKEFRNSYEPRLTDESAYDSIQQDIESKIHFIYKRRTKAGELKDQLPSKTEYKFPVPMGKQQKAVYKNILKQVEDKDMPPIQGIMRLKMLSSHPGLVDSSYKGTNIKNVPKLVKTLELLNDIKNKGEKAIIFTEYREMQVILKQAILNKFDLNPAIINGTTDRRQHVVDQFNQKDGFDILILAPKAAGTGLTITSANHVIHYTRWWNPAVENQATDRVYRIGQEKDVHVYYPIVTSDEGGTSVEEVVDKLLSKKKELAENVIVPSKDIDIEKEVLGQVVN

SEQ ID NO: 4343 - protein, 653 aa, Burkholderiales bacterium GJ-E10
MIAAIQVFLGQIYAPLGSLSGIPLLCFLLASFLTIAYVFGFLGKGFVVGSQLKKAVSAVEALSDGGKGVSPDRVAKAMEREPLRHLWNEYSDSLHEVKRGSGAAGALTEIRATQPAELFFTREALVDSRLLDDFVRHLPGLLTGIGIIGTFFGLLGGLSGFDASTSATAVAGLKPLLMGVAHAFLVSATAIACAMFVTSTSRFLLARCYQLVEKLNHKIDALYSTGAGEEYLSRLVHSSEKAEAHAAQLKQALIEDLTTLMTNLTERQIQAQIHSHQSLGTQLGETLSGPLKEMTNALQTTSQGNSQAVTGMLESMLAGFMAKLEDTFGGQMRGINEQIAHSVEVMNTAQSSLQKLIDDMGRANQQAANGLSGVLEEAIRQNSANQAAMVDQMRDFLQEMRSRATEEQDKAKRAMDEAVGSVLKQLSVAVEQMEEVRRGAVAQEQGRNQQLSQRTQELVSGLSGQVDTLLKSVGDIGAVSLRAVEGMNAGAATMESAARRFESAGGSVSTVFDKSQHVAEQLTTASGALQTAAAAIREGFQKYDSTRAAVDGHVASLTALVETAKREAGLSKVILTDLERIVEQLRRAESQSEAYLQGVNGALVEAFEKFGTALNNQLTKTIGATDSHMERGVQHLTGVVDEIAAAMSRLKKV

SEQ ID NO: 4344 - protein, 237 aa, Burkholderiales bacterium GJ-E10
MFGRVVLKRGGKAEGESPFWISFSDLMSALMVLFLVVMAVTLISVTKDVSSAERKKIRREQDIQALMAEIRQDSIEFPEVKVGGAPTYKIDLGDVVHFDSGSSVISPSGAAFLRKYVPVLLKVQATPRGQKWIRRIVVEGFTDQDGTYLYNLGLSLNRSKSVVCVLFSRPAGNEQPLSEQQKRQIQNLFLVGGYSFNSMKASKEASRRVELKLDFWGVDEDRDVNTAILDTKEIGQC

SEQ ID NO: 4345 - protein, 212 aa, Burkholderiales bacterium GJ-E10
MMQIGKYIVVEFSKKGNGAYVYESEGLRFNRHSGSFDGGTPDLRYGYYDGAVIKIIHRPQWEEWVEADLRRLGIYPDEDKRARKKPSTPHVTRVTNRQNTRSTPKLMSEDWAFPTPTLGAGAGEPVSEQHGEEATVETLRAAPHGAPFTMAELAKLLGRTPGSHIEDLRKEDGGGGRLWVIGALTNIPVSKKLVQWGFRWSGKRSGYYYPEE

SEQ ID NO: 4346 - protein, 1256 aa, Burkholderiales bacterium GJ-E10
MIRFVDPLEDASVEGLNALAGQSAKKEDELLVAYLAQLAIEERCSIAPDGVTILWSTIYDLQEDDSHQDVLHQLGLPAAGALRPVLDSSDTLADSTFEILVDGWAVDGTEVRVLRIDGAIAVLQDQSWLLGRSAWACYQAIKKFADRDADHRTQNENELGWGSIRQLADAAGAYYRSPYLETTYVLTPQSIRLPLQKQETSFGRVVTVEPTFEGAPSGWLKAFDGFNSVQPHYDLTSSGLGHVRVVVSEPVRKVLNVIKQEMPGRRVAGARAERFIHNPWAFLGDAAREVIKEEEFEEDRAGIGAIAAIFSIAPRIDNSRVTQVDLLITEHFHGGAARTERESFSTPAELQRFVQSIKSALEDERPRFPWNEYDLTVDGNSASTLELAQQMLCLWENQPQEIISFEDIYEIAGYSNRIEGIGVAKAIYVPVFQKETDDEETGWTPSDLTPMVKVTLTGHEGSVLIPLTREWVDKFQEQVAAAESTKAAEVRNESLPTPVETTQARALVDAFRTMLDGQEDIKKDRPRTPSKDSPKPEKILVKMNFSDIDYREERRLTLALPSEASPSLPKCLRPAIELKKHQLNGVAWFQHLVSRAPIDCRGALLADDMGLGKTLQLLTVLGSYYERHPNASPSLILAPKSLVDNWAGETEKFFTESYPKVLVLYGDELRKRKQPQSLIDERLRQRGIVDLLIPDWPGSAKIVITTYETLVNFEFSLARQPFAFVVCDEAQRIKTPGTQTSIAVRALKADFRIACTGTPVENTLSDLWSLFDFVQPGLLGSLEEFSRTYRRPIECNTEEQKAALKQLQEAIAPQTLRRTKQDISDELPRKYFAYRAGEDITPEFKERLDQGDRLLVPMSSYQNVLYLGGLKKLRDANQESDSIKRARLSFGALHLMKAVCAEPYCLPGMKFEIAKSGYETHLENSPKLAWLLKQLSQIKAREEKAIIFTELREVQLALFHFLKEEFGLKPFVINGDSQNRQRYIDRFSESPGFDVIILSTLAAGAGLNVTAANHVFHFTRAWNPAKENQATDRAYRIGQKKDVFVYCPIVATPDYPTFDVRLDELLKAKDKLANSTIDGSEMEVMLNGSGSDISKSELFAAEDGAEPQRRFLTMDDVDRMDGTRFEIFCRFLWEREGYLASITKKRGGDGGIDIVALKGRNGELLQCKSSLSDGLGWDAIKEVTAGSARYQAQHPGTLFRRIAVTNQTFTKGARSQAEANSVFLVERNRLEELLGKYPVDNFEFDLEVDRWIAWFQ

SEQ ID NO: 4347 - protein, 663 aa, Cupriavidus sp. SK-3
MTPDSFAFASTALHWVVGSLLSVALCAFFWQFLRPAWRTRGELRHALEQLSKLKAIGPVLDLDRVADEAMLSDTLRHCWDEYRDTLHGQKQATATGMMEVVRLRAGAMANGFFTEQALVDSPLRTEFYKHLPGILTGLGIIGTFSGLIFGLQSFQVSDDAAVVRGSLEALILSVGGAFVVSGIAIALAMIVTTVEKLMLNGRYTQVEALCGVIDSLFDSGAGEEYLQRLVEASETSATQAMQMKESLVTDLKQVLSELTQQQIATITSTSAQLGQSITSSLSEGLAEPLERISHAVQSVGNSQGEAVSKLLTDVLANFTAQMENMFGSQMRGMNDMLVQTANTIQSASQSFERLAGQIQQAGSGAADAMAKRMDEALQQMQARQAEANDQMRVFIDQLKQNVADGQSESAVLTRNMMRELSESTGALVKGLQEQAHNAQQAHTQHQADLAAHTSELVAQQSDQVTGLTNAVKESSAMMRQTIDRLESATNVNVERMGLGAERLQSASNRLSENLDAMKSASDGMASTTDKLNSSTNTLNTALIATQQALGEQKAVRDALTTMVTSLRDIVENAKREAGMTSELVSKLQVASQHLAEAQNTAGTYLEDLNEVLAEAHAAFAQQMEITLRQGNKVFHEELAQATGLLKGAIQDLADVLDAVPSAA

SEQ ID NO: 4348 - protein, 252 aa, Cupriavidus sp. SK-3
MIGIRMASRRRGREEGEKPFWISFSDLMTALMVLFLVALSVALLAVTKKISDDEREEKSRSEQISELMTEVQKVAAQFDGVRVIDRTIDFGPRGRFEREGQNTLSAQQRTLVRQFTPKLFEQLRTTEAGRKWFKRAVVEGYASQTGKYLFNLNLSLERSERVLCELLREPPHGEPALSEADRKLVATRFFVGGASFNSLRSTADDSRRIEFKLEFKTRQERQEELAHPAPPVDDDALTQALDLKERCPIADR

SEQ ID NO: 4349 - protein, 599 aa, Cupriavidus sp. SK-3
MPDRRPIDALRSRLAAEMGSEQVFRAPVWGNPHAMTEALRLLKRDLSEAEPSEPASDQVQASLRRFGATQQVQNFTELKYVCYGISVPVGEEQWRVIDNGPLFKRLLTLVDEQEVRPKQYRRCYQGLLNGYFSFTHSDTAAPSEVNWKTLRGFLGSKLEPIAHTASRRGVVPTWLQTLTLHRNLLTDDPCSRYANELVGGNTSELKELCTGLGIASNSWVWDEALMAYVRAVCASKDGAFHNGLSGVLQLVNGRSDLKLPHTLAKRATAMTVVRYSHCSEKPEHASLRDTCVNWIGNPWLKRVAWDAEVGHEPARKMVEGWVKRRQIKDFFQLLAEDGAADLRRLNYWLMWEPKITQMWFVLGSDARRNKSASFVKLRKSMEEQERTLIDNNDRNNAFVMRIGPLLIIEFGVTGNACYVFAASDFRTNLDAPTFSISDLKQRLHAKRLSHIANWEHRFDYELKSMLQSVPASKGELRGAGNDKSGVQQESAGRGFAAERSQQEAASWKVPQTAKPGTLPTPTRTGNSQTQARSLSDSDIEAICNLCTQHGIDWEDNRRRNGALWILIPDPQKHPTFAKRLEAHGFRFKQGTGFWLKGEG

SEQ ID NO: 4350 - protein, 1097 aa, Cupriavidus sp. SK-3
MFGAWFRKTQSEPHPVETAPQAAFDANGIRYRAPAGMAAEWLAAPFAFPKAADLGARLSQIQLEGLGECSGAEFFLPWDSVYAVLRHPELSAYREPLLFPPESDARPRLNSKGALADPSFTILLDEWVDPQWRPLQPTPKLVGRTLQTGNSVSLLSAHIHEILGELERFHATPAGERTQAFKEQVFGKMRRLATTIGCPVSDYVARTIVLTPERLELAMEQRGTGDAKVVEVIPGFAEAPAQWLPLFDRLPLQDSYDVPDGPSLVRVVLTPEVKAVLGEVKRMHGRRVSGPRAEAFVRNPFALLGECAHAVIDAGQFEESLAAADVRFKRFAPQVERSEAGQVLRVALLIEAIDDVSASAREPVTTWFASADELSRFTGKLSRCLDDGSQCVTWGEHDLEILGDTPSCLATLENWLRDWSHPALWTAAEVLDLSNYSERIEDIGVEKPFIVPVIAKNDEGGGWFETNTTVGVLVSRDAEGARNIVPIAFGEIPSLQEAVRAAEQAGHTKLHLPGLDDPVPVTDARHAVDALLKAQAALQRNDFKPPKENVANATRKRLVIKRNFEEIDYSESRAEALQMPEGRKARLPQTLKPEILLKDHQHVGVAWMQHLWEASPHNCRGTVLADDMGLGKTLQLLAFIASCFEQDPSLPPALVVAPVALLENWRNELSGFFLPGTLPLLMLYGDALKSLRVSKHELDAELKSQGVTRLLKKNWVGDARLVLTTYETMRDLEFAMASQPWSIMVCDEAQKIKNPAALVTRSAKKQKVRFRIACTGTPVENTLADLWCLFDFVQPGMLGALNHFSRTYRQPIEAKTDEQMAKVEELKAVIQPQILHRKKTDVAKDLPTPIEDPVCKQLPMSGYQQRLYEGALAVLREQRATNPSAQLQALLAIRQICSDPHGFAEPDIRQISIERLVNESPKMGWMVERLKTLAADGDSNHKVIVFCEFRELQLVLQRVIAAFFGFAPNIVNGDTSADPRTAGNRQQLIDAFQRKPGFNVIILSPLAVGFGVNIQAANHVIHFTRTWNPAKEDQATARAYRIGQTRTVTVYYPGVVSESFPSFDVRLDALLGKKRALASDMLNGCSDLKAADFADFG

SEQ ID NO: 4351 - protein, 706 aa, Vibrio metoecus
MTDSLNLSSLWPDLSSLNVMPPQTPEQLSALFVVILWGVALFFLIWSVAAFIRARQRVVWLNKSLDDAEKSTLSGVRNDLISRAEQKKDSVGHLWLEFDETLLEVKGADDVVRLHNTFDADYFFNSSSLAGGSTENRMIAAVPGFLTALGVIGTFVGLQLGLSDLNIAGNVDVNEMKNGVAGVINGAKIAFMTSVWGVLLSVAFNFIEKILEQIIRKKIKSLQNRIDRMFPRLSAEYQLQSIANNSQQSRESLQGLAEKIGEKMQESLIQATQGIQQGLESSLEKIMAPAINKLVDETSDGNQKALESVLQSFMEGFGQQGEQQRVAMDSASQNVNKTLESMSVSMAAFVNKLEVQQNASSEREKELISTISVQVSELVTQGNEQKRVLTEFVEKQVSELGEQLTKRELAASEREQKLASSMESTIKDLVENVSAQSQVLTDFVQNQVVQLTQTFSERDGMASQMEKERNDIFVNQTQAMKAGTDELLAQVKAATESQQITSNSIIEQGKQLQNSIDSSVSASARATESMQQSANELRVAADSMNVFGSNIKDAGNKLSGAVTEAVNSTKDLAEQNHLGAVKVQALREQLLEDTSKFSAIADQINNMLISAEQSFSTLRTTQNEFLAEQKGNLNELTSEMKRNVKELTEQMAQLLEDYAEQANGQTAEHLKVWANSSTQYAESMNTAVRAISSVVDEIQDKVSQHA

SEQ ID NO: 4352 - protein, 244 aa, Vibrio metoecus
MRRGVRSHTQNSVDEENPYWVSFSDLMSALLVIFILAAVALIIELTQKTNDVETGIEELKQAELARKNIIYDVRDELAKRNVIVEIADNDTVIRIPESTLTFASGKSSIPNDATIQQAVKDIGVVLHSAIQKKDRFQYLDTIFIEGHTDSDSIHYRGKGNWGLSTDRAISVWNVWQNELSLTPKLGDLENAYHAKLFSVSGYAATRRANLHESNQQEKSQNRRIDIRFTVKKPSIAELERIVGP

SEQ ID NO: 4353 - protein, 483 aa, Vibrio metoecus
MSLNIKKLKVSLPANPFGQAIKDFAHLSSQLEVLSKSAGIENNKFRTAYGEVCNALASKKRVEDVIDSSVHVRALALSLHTDAKKNVSFTRRLLNKITEIVKKPSSLVIESFYQHFLSEYDRLADLEATADWLLEAKRLRGNDEQFDENILSTNGPKWLAERAIQNNVDFDHLIAEMKLERYANGRYLTAAKGIYYIEQLNTIPLGQDHPLLEEVQKTVVFDSRYDSESLLGHQILRILIGRSIGSHISEPWMNVILAIGGDPRVPSSNPRYIKWWKSLEPNLVQAVRGWLSKLDLKLFLEALEDYSYSSANYELQRMYPSRKSFLEGMFDAGVISNTRLYLSLDAARYLKRNYDPKHLPNFSTVKDGDKSIIYVQMNGAHMVEGSHSCYLWLYRYLDPSVCVFNYNIDSPTYSQLTIGINNQMSRLSSGAVAKITHSPSGYAWQRKALIALRELGVKLTPKDVLSNEDYIDFKQRYGVREWS

SEQ ID NO: 4354 - protein, 1149 aa, Vibrio metoecus
MELTSLISKFFSSSDKTSQFELICDDSLDFATSRKTLEKIKAGKADEWITAQYVALKMLEEQGDVSSFPDGFIMPADTAVRLDSELRDLFSLPPVWKGVIDADIQGKASTPTFKIDLSVTTKQGRTTLNYTVDGPFIRFSQNEQYLLTPEQLMVFVAHKTHVKSDRSEYDNLLYLHSLQEAQKNGCKLNLKHFERLRILTPNKITVEAELNSQGELILTPNMGQSASHESIQKVLGQLQSDNAVTLKVGDEIVLFSEEKLMAVKEVISNRVIPQQQVKAFLENPTAYIDASLVDLDLGFSIRVHGATVFKHAYFGETDESGIDWFGASPTSDLINPISKLTDRVRDKTTLEDVAKKIEDARQTGATVFDYEGQSYDISDPAAVEKVLNEIGHKISSPNTDLSSYGEAEDAETESEGSEIHVVDIDLNDEELSENSPKVEQLISDISWDGELNWENHKRTPFPHQDIGVRWILGVEQKSLSDSKVSGALLADDMGLGKTFMALSAIEHIYQRQQISGETKKPALIVAPLSLLENWKDEVDKTFKHSPFKDVVILQSSAELNEYRMGGVEIRGQSASDDCLEPKYSLKVGKYFGPSRLDLPERLVITTYQTLRDYQFSMCLIDWGIVVFDEAQNIKNPNALQTRAAKGLKADFKLVATGTPVENSLADFWCLMDTACPGHLGSYQEFRARYISPILKAAGDEVEEIRARLGRELRIAVGALMLRRIKEDNLKGLPLKHMYAGGEFENWKYLEELKSTMVGYQRDVYEGAISHQLENEESHALTTLMRLRDSSLHPRLSDGGRLDIPKNAKSARALYGESGKLVSLLETLDRVRSKQEKCIIFAVNKRLQSFLSVTLGQIYNLGPLSVINGDAKAVAKRKSVPTRKSMISDFEAKEGFNLIVMSPVAAGVGLTVVGANHVVHLERYWNPAKEAQATDRVYRIGQEKEVHIYIPLLHHPEFESFDVNLHRLLTQKTLLKDAVVTPEDVIPQPAGVGGVVSGDLIDKRITAAELDKLSWQQFEALCVELLAKITDSESAWLTNNGADHGADGVLLNNSGNILLQAKFTQRQYDGYKGIQEIHSAKPIYESAMRSSFGRLIFVTNSPLLAKRTHEIAATCGIEVLGRTQLLTYLEEYDITLKDILSRLGKDRLRV

SEQ ID NO: 4355 - protein, 706 aa, Vibrio metoecus; identical to SEQ ID NO: 4351

SEQ ID NO: 4356 - protein, 244 aa, Vibrio metoecus; identical to SEQ ID NO: 2934

SEQ ID NO: 4357 - protein, 483 aa, Vibrio metoecus; identical to SEQ ID NO: 4353

SEQ ID NO: 4358 - protein, 1149 aa, Vibrio metoecus
MELTSLISKFFSSSDKTSQFELICDDSLDFATSRKTLEKIKAGKADEWITAQYVALKMLEEQGDVSSFPDGFIMPADTAVRLDSELRDLFSLPPVWKGVIDADIQGKASTPTFKIDLSVTTKQGRTTLNYTVDGPFIRFSQNEQYLLTPEQLMVFIAHKTHVKSDRSEYDNLLYLHSLQEAQKNGCKLNLKHFERLRILTPNKITVEAELNSQGELILTPNMGQSASHESIQKVLGQLQSDNAVTLKVGDEIVLFSEEKLMAVKEVISNRVIPQQQVKAFLENPTAYIDASLVDLDLGFSIRVHGATVFKHAYFGETDESGIDWFGASPTSDLINPISKLTDRVRDKTTLEDVAKKIEDARQTGATVFDYEGQSYDISDPAAVEKVLNEIGHKISSPNTDLSSYGEAEDAETESEGSEIHVVDIDLNDEELSENSPKVEQLISDISWDGELNWENHKRTPFPHQDIGVRWILGVEQKSLSDSKVSGALLADDMGLGKTFMALSAIEHIYQRQQISGETKKPALIVAPLSLLENWKDEVDKTFKHSPFKDVVILQSSAELNEYRMGGVEIRGQSASDDCLEPKYSLKVGKYFGPSRLDLPERLVITTYQTLRDYQFSMCLIDWGIVVFDEAQNIKNPNALQTRAAKGLKADFKLVATGTPVENSLADFWCLMDTACPGHLGSYQEFRARYISPILKAAGDEVEEIRARLGRELRIAVGALMLRRIKEDNLKGLPLKHMYAGGEFENWKYLEELKSTMVGYQRDVYEGAISHQLENEESHALTTLMRLRDSSLHPRLSDGGRLDIPKNAKSARALYGESGKLVSLLETLDRVRSKQEKCIIFAVNKRLQSFLSVTLGQIYNLGPLSVINGDAKAVAKRKSVPTRKSMISDFEAKEGFNLIVMSPVAAGVGLTVVGANHVVHLERYWNPAKEAQATDRVYRIGQEKEVHIYIPLLHHPEFESFDVNLHRLLTQKTLLKDAVVTPEDVIPQPAGVGGVVSGDLIDKRITAAELDKLSWQQFEALCVELLAKITDSESAWLTNNGADHGADGVLLNNSGNILLQAKFTQRQYDGYKGIQEIHSAKPIYESAMRSSFGRLIFVTNSPLLAKRTHEIAATCGIEVLGRTQLLTYLEEYDITLKDILSRLGKDRLRV

SEQ ID NO: 4359 - protein, 730 aa, Pseudomonas sp. WCS358
MDFSTLVHLWGAASSEQLIAPKMVVGLVFILCAWYFVRYFCRSFKLSAKLKRLTASLQSVKTLAPPLRRSELERLFSGGRLEHSWREYAETLHDQFELKEGEQVLVRSRATAGAAHFFSPQSVVDTPLGTEFYKHLPGILTGIGIVGTFFGLMLGLQHFDPSTPEQVNASVDKLLKDVLFAFIGSFISIMASIAVTLTEKWRLGHCYKLLEALNETIDGLFDSGVGEEYLAELVRSSAESSVQTRQLKDSLVTDLREMLQNLVDTQVRESLKLADTLSTTYRDSGQLLADQVSGAIENSLKSPLEAIAGAVQAASGDQSGQVQNLLQDVLVAFMNKLEGTFGQQFNGLHELMGQSVAAMQSMQQGFSTLIQDMRSASESSNQSSSTMIAQLLADMQAGQNAMQAGMNEMLANLQASVARIGNEGEGAGARMAEQLEKLFAQSEARQQAMAENLQAFVESIKQSIGQGQQETMAKIAGSVEVLGEQLSAVFKQLEQGQQQMDQSTRAAQADLHQGTRDLVGGLDEQVKALLQTVSEQQKSAQDTVNALSAQTEQHLHSMQLGADKMRAAAERFETAGQSVVRASESTAGLMSTVQGAGAELAQASRELNTVVADYRNNREALAKTLAVIEGVVASAQGEASGRSQYLQDLKVQSERMQALNREVYEYLENISGVLGNGFKEFGEGMDRALRQTLGSLDTELDKAVKSLAGGVEGVKESLEDFGDIMERIRR

SEQ ID NO: 4360 - protein, 247 aa, Pseudomonas sp. WCS358
MFGKQMPSAARSKDEGEKPFWISFADLMTAMMILFLVVMVAALSSVTQRINQSEQGEKQRSKDISQICEHLSLKAKTASKTIVVDCKDNRISFGDAGRFGHNQYALSNDGQSALQEVVPMILDAANSEEGRKWFKQVVIEGSTDTDGSYLYNLHLSLQRSEWVMCSLLDSRSPLQVGLSPEHQQQIRSMFLAGGVSFNNAKDTKEESRRVELRMQFFGLKEKEGNLKPDVPVFTNTDVEKCQLAMNR

SEQ ID NO: 4361 - protein, 542 aa, Pseudomonas sp. WCS358
MTSSIARLSAAISQSLSAHRTVQAPEPLERFPRLAAAGVDLYERFERAEKALPPPEEKRRAAISKFRNVLPLNASEWRLVFAGLSDKSERVGPILDDDQLYARVHEEVHQRIEKRRLSRRDWLALCFSYFGYDAAKPAQNANWCLLREDVQLGFECVRDQQKRVKEWVQIVQQHQELFSEQAGATLGDQMFKGEISDLSALQTIAQIPDNSWLWRRVFTVLISRIFMLDDAEFSQRLPDLVDIGRQHPRYMNDILSACLSRYHLAAYREKPSSLLKQLALDNWGSPQIRSRQNSWLQYVDKDVCAMVVAWFAKEDLEHFFNLLKGEAEVDQSRLHYWLRFANQMSYTRIVMGSDAWHDSGRDFVHFREKNKGRLSRLLGGPGHNNAVIMQIGNYFFVEFSGTGNACYVYQADKSPFNPDKMQLELASELKQPNRALDRMRHSPAPSRPDRIEGWLSKFDYALEQWGIRVQSQAAAAGSAKALPFEDQVRDALKSVKHKVYDQRERGGAFQVQLDDHDPAAVTALQRLGFRPVNNQPLRFWRQ

SEQ ID NO: 4362 - protein, 1082 aa, Pseudomonas sp. WCS358
MLKRFLKGIGLQPNSAAENTEPVFSIEEQGICYPLSLAESTESWSLASYLDQLEEEEFVSQLSDRWLLTWDELYRLLDEPEHETSLPLLGLPPQTALIPQLSSQGSLASDDFKVSISGWRDPQSNASVHVQRTGAIVQHQGATETLPEASWKLTGAIRQLYQAQQNEPGEVTNQIGWASIRKLARKAGAGMDGFLDKTVVIKPEKLRLNPRKSTLGDTPVIELQPSFDGQPANWLESFDGAKQVQDRYRITGDDGSLTHVLIEPEVKSVLEYVRSLPGRRVAGDDALSFVRNPYSTLGESAAHVLDAEAYEDELAEAGIFFHRFHLEPKLDEAGQRIEQVTLTLEPISPTPQAPIEIEFKAAHEFAPLVHELHLKLAACMPAGFWQGYELELSDFDLRQLAGINDLLKRWQNEAAGIEFESVLDLSLYGDRVTGIGEAQRITSPFLVKEATENWLPKDVAALGIDAEILGRWDPSDRAQFEAFGQRLDEARAAGDDTVCLPESETPLSIAAAEQLLDAWSKKIAPVETGQVEQREKVGRAVLQIGHNIDEPTYVQVRQAALRAALDATPELPGLLKPEVVLRDHQLQGVAWLQHLFRLSPTDVSGCLLADDMGLGKTIQLLTFLVWYLEQYPNDQPTLIVAPVSLLDNWERELHRFFFADALPVLKLYGSALSAVKFKKDEIPADLKAKGIKNLLRPGWMGDARIVLTTYETLRDQEFSLARQQWSIVVCDEAQKLKNPAALVTQAIKAIPARFRVACTGTPVENTLIDLWCLFDFIQPGFLGGLNQFGRDYQRPIEAALERDTDALERLRGLIEPQTLRRTKQDIAKDLPAKIEDAACRSLGMHVLQRNLYLSEVSVYSQKQQIEEQLDQKSSGMLGLLHKLKLICAHPYSVQPDTRLRDNSPKLQWLIQTLESIKRAGNGDKVIVFTELRDIQRELQHAIQQHFGFRATVINGDTSTSSQSANSRQRLIDQFQELPGFAVIILSTIAVGFGVNVQAANHVIHFTRCWNPAKEDQATDRAYRIGQQKDVYVYYPTVRDAAMPTFEATLDELLSKRRALARDMLSGASELHASDFEGLLGAR

SEQ ID NO: 4363 - protein, 616 aa, Paenibacillus sp. TCA20
MSVSSIFVIIVCVGAILILGIYQLIRRFKQNKEVLHESEMIQQKLIEIQKVDDITERFNQMNDWILNQESKYVKNYVVPAWKSFHQKYMSQGVSLKLVPDVYDFFVEEELVHKYGNRKFVELIPGMFLSIGILGTFASLAVGVGSLDLNANSENMRAGVSSLLSGMQSKFASSIFGIFASITWQSLDKKLFLPRLQHAYFRIRDSFDEAFPTQDQNTFLVQMLENQKNQMNDFQVFMSEQMIPQMINGFNQSLNQSLLPPMEKTQELMNELITSASVNQMDGVKQLTSEVMNSLNDLTGEHMKQLGEALEATVEWQKKVHEEMTGLVDSMQEAAKNQSEMVDKTTVLTQEIHNYTDNITNYQKVLEGTVAQLNDTTSTNSELQSATSSLLGKIIEERNVFNAHFDEHISKLQTNVVSIVDQTEKQVVVQELLGQNLERISEMTLSQEQLAVSLSEQASHTQSSSEELGKLLIHFENNAVQYNDLQEKMGDMLQQAEKDRRVFDQLVERIQTNLAEQVEDMDERVEYLGSLWSENKETMDKLSKQLSTSMSQFTDDMHRGIMRTFEKFDEELTTSVNLLAKGVDSMRDGLVDMPDVIQELKQSVIEINNQAKRATTV

SEQ ID NO: 4364 - protein, 258 aa, Paenibacillus sp. TCA20
MARGIRGAKGSNGVGEEKESSWISYTDLMSALLIIFALVIMITMYDTQNAYEQQQQAMDEAAEALKQKEEVIAQNNQLIEEVVGVKSKIIEELMLAFQDSNLDLQIDQQTGAIRFSGGVFFNKDSSTVSVKGTEYLEMFIPKYIEILLSDQFRDEIAQIIVEGHTDSDGGYLYNLKLSQDRALSVVEEVFAPTFPKFPYQEDLKAVITANGRSFSVPILDKNGKMDQDKSRRVEFKFRLKDEQLLEKLQGLMVEEDGG

SEQ ID NO: 4365 - protein, 424 aa, Paenibacillus sp. TCA20
MEDKSYIFHFAFTPSKLSAVRKKVEEKYRDVDMLTASQISYLRLPKILELIRSTSEDRLEQMASEFFRGRDYSVLTYSYPYTNESSDVEKKINMVLAYGYTPGNANMIWEKFQRDYKHIYTEDLLRRFLLKDEGISFIYSDYTDAELKELLIPAFMHKAGIAQGLLQVMIHKDPKIAEFLKKMKIKPETPLEDFLVYERLKEGLSREDFLEQNTIEYITRMFEKYPIEQYQELMKIYLEGRTFEQFHFQIMDQAIKRLHDPRERDEDWRFLSEQAREEVNKWLVEAELEDYFDTERFEYWKRYLRVMDNVKTLKRTNDPKVIFLYFENFVVVEFGENGKAVYFYYKTGFERFILPRTTSYEYMRKGTSDRESLLKERYETFNGEPLFIIKLHHTPKGMWMDRFTRYMQNYLSGNYSYTERNKGP

SEQ ID NO: 4366 - protein, 917 aa, Paenibacillus sp. TCA20
MSFWSKLKKRTKEPEYNAITWQLGKVPQGLSIQLFRDGGQTIVSPPLRMSVAEIRQQPNVELLELIESMWYEELLQESDNRYLLPYELLVEAPSEIRETLGVPEPVQLELFLGHEGFVGSPRFQFKLEKHLPAWRHIEKSSRQIGPWIQLPDRSYILMALEQYQLHRLISEETPDVMDKEQVFAYVAKVQSQARQLSIPVDDYLQKQNYKFADGLDLDVSYDGSEIEIIPKYLSSDEVPDKLLDEMAGNNSTYYSDSETGKIFVSTDVVQQAKVVKNRAPIRGQDIPRFAENPEAFLPELGELDLSLFGERVRSLGIRVYKAQPYVHAEEKGRGWFELNAGVSLVDSEGETNSNFSTEQFKDLINNAREAGAEFIELDGNWIKVPHDVEKFEEAVGRFHQALGDKPEVDVTKLPYVLEIFENITQLEYNQPILAAHQEMMDQGILDPAPPTYFNAQLKPFQQDGFVWMKSLHYRKLGGLLADDMGLGKTIQVVSFLSYLHEQNKLTPTLIVVPKSLIDNWVAEVHKFASPLASKIYIHTGVQRLKDPERLQQQPITLTTYQTLVRDQLVFGQVAWQALVCDEAQAIKNPTTAASKVIKAMNVKFRLAMTGTPVENGLSELWSIMDYVQPGLLGSLSEFKKEFMDKLEAEERDRETEQRLLARINMVYKRRTKSEELSGQLPSKSLIELPVSLGTEQKQLYSSIISQVQSKSLSGLQAIQQLRELCSHPALLVPTLKSLPVGAVPKLAQTMKLLREIQSKGEKALIFTELRLMQEIIRDAVREEFQIDPFIINGVTNRRQEVVNQFNEKAGFDVMILSPKAAGTGLTITAANHVIHYTRWWNPAVENQATDRVYRIGQNKPVQVYYPIVTAEQNFLSSGTVEEIVHRILSEKQELASSIIVSSRKLEIENEVLESAFQ

SEQ ID NO: 4367 - protein, 674 aa, Burkholderia territorii
MNIQSLLAGVPMPALITGAFLAILVVIVVVFFFGPAIRHLLRLRAIQRRIGSFESGDFSSQFEAVFASDRRLTHLWNEYAESLHVQREERDGQMVVRAVRATAPAEVYFNSQVVVDSRLRTEFFKHVPGIFTGIGIIGTFSGLIEGLHAFQVSENAATVRGSLESLMHSVGEAFLVSASAIAAAMLTTLFEKFLLASLYRRTEEIAHAIDASFEAGAGEEYLARLVKASEESASQSKILKDAVVKEMGELLRELTSAQIEASKEQHALAAEAGRQNNVALGQVIAESIQQGLKGPLDEIAATVKTASGDQSASAGRMLQDVMTSFSQRLNDLFGGQISGLTELNQQTAQSIQQAVSTLHTLVANIEASSQRSTDAMAQRMAEAIEKMESRQEAMNTQSAAFVEQLRQLVATSQSETNQKLQATLETLSTHVGEMLTTLSGAQKEVFENNRAREHAMSERASGVVTAMSESMDAVVKELGVATTQMAQSVNALTQSTTSSVDRMNAGAEALGTASRNFAAAGERVAGVMGQTADVSTKLAATAGNLTSGAGAIQELLSDYRAHRDSIGQLVTELRATVDAARREAALTGDILNRIETSTSHLGAAQKQADEYLAGVSQVLAEAHGAFATEVKRTLEKANAEFHTKLTSAVGLLSSAVGELEVTLASMSTLTPARN

SEQ ID NO: 4368 - protein, 236 aa, Burkholderia territorii
MFGTQIVVKRGSRDEAEKPFWISFADLMTALMVLFLVVMGVALLAVTKNVTEKEKREEQHRKDIELILDRFQTAAKRYDGIKIDRNRHVIDFGDRARFAFGKSNLTPEQEAVLRQFVPEILTLANDDLGKRVLKRVVVEGYTDRTGTYLSNLNLSLQRSERVLCSMFATTGTSVLDEAQKLDVRNLFLVGGYSFNDSKETDEESRRVEMRLEFLGVGEDRSPAPAQSGNFGDCALR

SEQ ID NO: 4369 - protein, 475 aa, Burkholderia territorii
MEDRPRLQHILDSVDGYITKTASYRRCYQGLAKSYFAFDVDACGVASSGRKNWLTLRDYLHDRNPKIRDSRSSPSWVDTAIENRQLFDESPCTRYVGELLEGDTSRIDHICEQLQIGKESWFLRQLVLTQVEGATKLDDDEFVRLLPRLLGLLAHNEVLRDRGTILVLDRYAEVSGTPLHPRLRDHAVAWWGNPWLPSNATRWGGVEPAARAMVSDWLKLEFIETFFTKLAEDGLADRRRMEFWKRYVKSIDDIEFALGSTARNSREPDLVALRKRMKGLTRELDASGANNAFIMTMGKLVAVEFSGLGNAFYGYDASRSLPFNTSQTLKLGKNERNSLKQSKSMLWLKHGDGIHGWNRWEEMFEATLRESFQILPSAETLPASGRAKAANEPTKSTSNVSSRENVGSSQNRTEAHESYSHVALKRFAATHGLQIEDRTALGGNLWVRGGEGDERVGRVLMEWGFRVKPGKGWWK

SEQ ID NO: 4370 - protein, 1263 aa, Burkholderia territorii
MFKLFKQAKARDVITWKRHWSDKGIVLTRRTQSPGATVDGDLVGGYLTQLTDDGLVSPVEDEFLLDWQSLYDILEQPDYGQLRDVLRIPPFTEFRQHLRSNHSLTDHEFSIAIDGWRIDGGREFRGTITGPVMLEGAVEMLMRPAQWKLFNAVIAFSRRGDEDHSDLANRQGWGRIRKLAVDAEARLDDFLYRSVVLSPEKLNIGLRRSVAVVDDHVVEIEPSFDGAPDDWLDTFDRAREVRDRYDITTQDGIVQVLVTPKVKTVLREIRRLPGRRVAGSRAQAFLLNPFAALGADAIDVIEESQFERAREDAGLDYERFVPTFERNAAGYAVRVGLLIESAVASGPTSSKTHWLDDDELSAFILALSRSLTQGHQLLAWQGYDLALQGDSEQQLKELSAALAQRRIPPTLVSYAQVHDLAGYSARIESIGVEKPYHSPYIAKKDEGEGWFPDNILPVIVYQSKDGGEPVAVPTNKLAIEKLKNDVQVADAKGMVQLDVPWLRDPISLADAKEIISTFESVFSDLESGKQFDPENARKRPSESVAKKQLVLRANIQALEYEELRREALQAVPARPKLPESIRTEFSLLPHQQAGLAWMQHLFSLQTDYQVRGAILADDMGLGKTFQLLALMAWLLERDPTMNPMLVVAPVSLLENWAEEANKFFQPGALPLLTAYGESLAAFRVPRSQIDQRLQTEDGLVKFLKPNWIGDAKVVLTTYETLRDLEFSFAAQKWSLMVCDEAQRIKNPAAMVTRAAKKQNVAFRIACTGTPVENTLADMWCLFDYVQPGLLGALNDFGERYRKPIEAKTDEEKARVEELRARISPQILRRLKTEVDTGLPPKIVVEDCRRLSISGVQRNLYAKAVDGFKRRQEPNHTTPFKNHLGLLHYLRLVCTDPRVHGLSVFKPEPLGDYRAKSPKLNWLLRQLSEIRAKGEKAIVFCEFREIQRLLQHYIEAEFGYRPDIINGDTSASSSHVASRQKRIKAFQETPGFGVLVLSPVAVGFGVNIQAANHVIHYSRTWNPAKEDQATDRAYRINQTKPVYVYYPTVWADDFMTFDVKLDQLLAHKRGLSEDMLNGAGDVAPSDFNLTDVVPHSQSDGLDERITLDMAQRMGWQLFECLVGALWSKRGYNCYRTPGTNDNGVDIVAIDGNRGQLIQAKSSGIDGTKLGWDAVKEVVAGEAFYRRRHPNVSFEKVCVTNQFFNAQAKENAHLNSVELVDQKHLGDLLRAHETTMLEVERMLFVEWQSADVRCRHPPVSRQSVV

SEQ ID NO: 4371 - protein, 674 aa, Burkholderia territorii; identical to SEQ ID NO: 4367

SEQ ID NO: 4372 - protein, 236 aa, Burkholderia territorii; identical to SEQ ID NO: 4368

SEQ ID NO: 4373 - protein, 564 aa, Burkholderia territorii
MSALNYLASLLQSSVSEETQPIRSGTEIDVLLEQLKARAKSRVGREPVHDHQLDAVRRYWQSHEVSTFRDAYLLSFGLCIPHRPQGECVMEDRPRLQHILDSVDGYITKTASYRRCYQGLAKSYFAFDVDACGVASSGRKNWLTLRDYLHDRNPKIRDSRSSPSWVDTAIENRQLFDESPCTRYVGELLEGDTSRIDHICEQLQIGKESWFLRQLVLTQVEGATKLDDDEFVRLLPRLLGLLAHNEVLRDRGTILVLDRYAEVSGTPLHPRLRDHAVAWWGNPWLPSNATRWGGVEPAARAMVSDWLKLEFIETFFTKLAEDGLADRRRMEFWKRYVKSIDDIEFALGSTARNSREPDLVALRKRMKGLTRELDASGANNAFIMTMGKLVAVEFSGLGNAFYGYDASRSLPFNTSQTLKLGKNERNSLKQSKSMLWLKHGDGIHGWNRWEEMFEATLRESFQILPSAETLPASGRAKAANEPTKSTSNVSSRENVGSSQNRTEAHESYSHVALKRFAATHGLQIEDRTALGGNLWVRGGEGDERVGRVLMEWGFRVKPGKGWWK

SEQ ID NO: 4374 - protein, 1263 aa, Burkholderia territorii; identical to SEQ ID NO: 4370

SEQ ID NO: 4375 - protein, 674 aa, Burkholderia territorii
MNIQSLLAGVPMPALITGAFLAVLVVIVVVFFFGPAISHLLRLRAIQRRIGNFESGDFSSQFEAVFASDRRLAHLWNEYAESLHVQREERDGQMVVRAVRATAPAEVYFNSQVVVDSRLRTEFFKHVPGIFTGIGIIGTFSGLIEGLHAFQVSENAATVRGSLESLMHSVGEAFLVSASAIAAAMLTTLFEKFLLASLYRRTEEIAHAIDASFEAGAGEEYLARLVKASEESASQSKILKDALVKEMGELLRELTSAQIEASKEQHALAAEAGRQNNVALGQVIAESIQQGLKGPLDEIAATVKTASGDQSASAGRMLQDVMTSFSQRLNDLFGGQISGLTELNQQTAQSIQQAVSTLHTLVANIEASSQRSTDAMAQRMAEAIEKMESRQEAMNAQSAAFVEQLRQLVATSQSETNQKLQATLETLGTHVGEMLTTLSGAQKEVFENNRAREHAMSERASGVVTAMSESMDAVVKELGVATTQMAQSVNALTQSTTSSVDRMNAGAEALGTASRNFAAAGERVAGVMGQTADVSTKLVATAGNLTSGAGAIQELLSDYRAHRDSIGQLVTELRATVDAARREAALTGDILNRIETSTSHLGAAQKQADEYLAGVSQVLAEAHGAFATEVKRTLEKANAEFHTKLTSAVGLLSSAVGELEVTLASMSTLTPARN

SEQ ID NO: 4376 - protein, 236 aa, Burkholderia territorii
MFGTQIVVKRGSRDEAEKPFWISFADLMTALMVLFLVVMGVALLAVTKNVTEKEKREEQHRKDIELILDRFQTAAKRYDGIKIDRNRHVIDFGDRARFAFGKSNLAPEQEAVLRQFVPEILTLANDDLGKRVLKRVVVEGYTDRTGTYLSNLNLSLQRSERVLCSMFATTGTSVLDEAQKLDVRNLFLVGGYSFNDSKETDEESRRVEMRLEFLGVGEDRSPAPAQSGNFGDCALR

SEQ ID NO: 4377 - protein, 475 aa, Burkholderia territorii
MEDRLRLQHILDSVDGYITKTASYRRCYQGLAKSYFSFDVDACGVASSGRQNWLTLRDYLHDRNPKIRDSRSNPSWVDTAIENRQLFDESPCTRYVGELLEGDTSRIDHICEQLQIGKESWFLRQLVLTQVEGATKLDDDEFVRLLPRLLGLLAHNEVLRDRGTILVLDRYAEVSGTPLHPRLRDHAVAWWGNPWLPSNATRWGGVEPAARAMVSDWLKLEFIETFFTKLAEDGLADRRRMEFWKRYVKSIDDIEFALGSTARNSREPDLVALRKRMKGLTRELDASGANNAFIMTMGKLVAVEFSGLGNAFYGYDASRSLPFNTSQTLKLGKNERNSLKQSKSMLWLKHGDGIHGWNRWEEMFEATLRESFQILPSAETLRASGRAKAANEPTKSTSNVSSRENVGSSQNRTEAHESYSHVALKRFAATHGLQIEDRTALGGNLWVRGGEGDERVGRVLMEWGFRVKPGKGWWK

SEQ ID NO: 4378 - protein, 1250 aa, Burkholderia territorii
MFKLFKQAKARDVITWKRHWSDKGIVLTRRTQSPGATVDGDLVGGYLTQLTDDGLVSPVEDEFLLDWQSLYDILEQPDYGQLRDVLRIPPFTEFRQHLRSNHSLTDHEFSIAIDGWRIDGGREFRGTITGPVMLEGAVEMLMRPAQWKLFNAVIAFSRRGDEDHSDLANRQGWGRIRKLAVDAEARLDDFLYRSVVLSPEKLNIGLRRSVAVVDDHVVEIEPSFDGAPDDWLDTFDRAREVRDRYDITTQDGIVQVLVTPKVKTVLREIRRLPGRRVAGSRAQAFLLNPFAALGADAIDVIEESQFERAREDAGLDYERFVPTFERNAAGYPVRVGLLIESAVASGPTSSKTHWLDDDELSAFILALSRSLTQGHQLLAWQGYDLALQGDSEQQLKELSAALAQRRIPPTLVSYAQVHDLAGYSARIESIGVEKPYHSPYIAKKDEGDGWFPDNILPVIVYQSKDGGEPVAVPTNKLAIEKLKNDVQVADVKGMVQLDVPWLRDPISLADAKEIISTFESVFSDLESGKQFDPENARKRPSESVAKKQLVLRANIQALEYEELRREALQAVPARPKLPESIRTEFSLLPHQQAGLAWMQHLFSLQTDYQVRGAILADDMGLGKTFQLLALMAWLLERDPTMNPMLVVAPVSLLENWAEEANKFFQPGALPLLTAYGESLAAFRVPRSQIDQRLQTEDGLVKFLKPNWIGDAKVVLTTYETLRDLEFSFAAQKWSLMVCDEAQRIKNPAAMVTRAAKKQNVAFRIACTGTPVENTLADMWCLFDYVQPGLLGALNDFGERYRKPIEAKTDEEKARVEELRARISPQILRRLKTEVDTGLPPKIVVEDCRRLSISGVQRNLYAKAVDGFKRRQEPNHTTPFKNHLGLLHYLRLVCTDPRVHGLSVFKPEPLGDYRAKSPKLNWLLRQLSEIRAKGEKAIVFCEFREIQRLLQHYIEAEFGYRPDIINGDTSASSSHVASRQKRIKAFQETPGFGVLVLSPVAVGFGVNIQAANHVIHYSRTWNPAKEDQATDRAYRINQTKPVYVYYPTVWADDFMTFDVKLDQLLAHKRGLSEDMLNGAGDVAPSDFNLTDVVPHSQSDGLDERITLDMAQRMGWQHFECLVGALWSKRGYNCYRTPGTNDNGVDIVAIDGNRGQLIQAKSSGIDGTKLGWDAVKEVVAGEAFYRRRHPNVSFEKVCVTNQFFNAQAKENAHLNSVELVDQKHLGDLLRAHETTMLEVERMLFAEWQSADV

SEQ ID NO: 4379 - protein, 711 aa, Halomonas sp. KO116
MFDLISHLWPQFALVLTPGLEMEEIAVWIWLLMMVIMAISVMSVIRHRLHFSRRLKRVQQLIQGEDRNSLAQNRFVTLEKALEQDPVVTGPLWREFDESLVYSADKSRLSNTLEAEHFFNNYTLAYGLTSSRLLAAAPAFLTAIGVLGTFLGLTLGLKGLQINAGDVETLKDGISVMINGAAVAFMTSIWGVALSLLLNLFEKLVERGALAKIRDLQQRIDFLYPRLPAEHSLVQIAAATDESKEALQELHERIGDRLQETVSGMSDSMQQAFTDAINTVMAPAIQSLVNNTNQQSTDVLEKLVSGFMDGMKTAGSDQSHLMKNAAEEVQQAVSGMAGQMEALFKQLDEQQSRAREQTEGTSREFAQLLEQHVADAAQRQQQMEQRFNQLMEQMEQKVSTQFDKAAEDERKRAAAQEHLHTQMVSGFQSQLEQFNSASSGQIQAINEASAKQQSEMGQTFESALGGLQTLISSQAAAASERESVIESRFNSQLERLAAEQQQLLSAVTQGAQHTQQQMLELTKQHQKLMTKMGEVSRSVEVSSQHMNNSSTQLGLLSANLKQAADVLDSRLQAVTETLAGASDQNRELAEQVSLQADTLRQLQAELTTATQHFEKAAVAAEQGFEVFANHQQQFLQGINTEFQGLGQALKEQVGGIEQQADEWLRSYSTEVRTQVGERMEHWNKNTLEFADQMRRTVSAISGIVDDLEQKV

SEQ ID NO: 4380 - protein, 254 aa, Halomonas sp. KO116
MRFLKKGPANVDEENPYWMSFSDVMSALLIIFILASVVLIIQLMEIQEELRKQQQEFNQEIQELRQAEQVRRTILHEAADLLQQRGIRVTVSENDTVLSIPNDILGFGTGAHEIGTAYQGTAVEIGRVLSDVINKDNRVDYLDTIFVEGHTDNRPLNGFMGKGNWGLSAFRAISLWQLWDELLPEQFSLDDIENKDNQPLFSVSGYGPTRPATRRQDTEEELSQNRRIDIRFTIRRPSSAEYRRVSENLEEAIR

SEQ ID NO: 4381 - protein, 530 aa, Halomonas sp. KO116
MNLPPPELLVIDWPEGTLESWPILTERLKRVAGAAGKNDLFYETSEDLKRLSRGMDGRALANLMRKRITARAITQLWLEDAEFRRRMLSPKILAILVKQQLGQLGVVPLQNLIALYFRMFDELNQHGENLREELQHLLEQQLSTRFAHNSKCSGHQRDLLSILYSEAKWLLSINGPKHLVDYVYEEGLELDRAFLYFELRGLDDGRYASICRAHYYLNTLRELPVGQYHEVLAELLKPAVSQAPFEDGNRIGHVALEILIDRAGDAPGDEWQNFIMDLAGDPRIASTAQNYREWWQPLGEDRIEKVRRWLYKEDLRLFLSALEQFGKESGDAAMQRMFPARKRFIEGLDRLKLVRKTRLMLGAKAAFAVKSILGDELKTNFVRLSNANGMSDKAVIYIDCGDFCLIEGSHNFKLWVYLRPPWERLYSYNTKELSHSELTIRAPSGYKGLYGVDAPYEAITHSPSTWHNRFFGFLADHGVSIDIEQLMFPDDYRNYLRRFGVPYVKPLKTRLDPLSAASPRNDNTDRHGLG

SEQ ID NO: 4382 - protein, 1010 aa, Halomonas sp. KO116
MKNHLKDLFGSLMFGRQATGIDGEPLQTQVDSSGLLFFASPQTIAELKAGKGSPIALLQMVVLQMLLEQGDAESLPNGYLVSSRVAAALDDEQADLLNLPGRFTHGFVANVKGHTRNSGFRVQLFASIDGKEYPILIKGPYLHVGQSQPYRLNPAEMSAFSALAGHSSLSPDETGEAANLRLMAQLQAARRSGMDLALGAFSNLDVVVPEGIGVVATRMPDGSLELCPSLGDGSTPDQLDKRWSQLDLTRDGGVLRVEERLVLLEPEKIAAVREVLGSRLIPANKVEEFIKTPSAFLDASLINLDMGFSVRVLGIGKMLHVDFGPLDDKKRDWFATSSRPQPPESLHKHVTCNEDLDAFKERLHAAQAQGAQIVEFEGEQFDISEPANVSSVLRNIEADLQHKPVKQEQEGNDQLATERVTLLLKDADELNRELLIKAQQQDRAPGVDASNLLRSPYPHQAQGISWMLDLLLKALADDHENMYRLQGALLADDMGLGKTFMTLVMVAEYLAIQTAAGKTQKPILVVAPLSLLENWEDEISKTFKTSPFRDVKVLQAGRDLSEFRIKGAQRESLQLADLLDESDAMSEADIRYSLQIGWEAGTQRLDMGGRVVLTTYQTLRDYQFSLCVIDWGVVIFDEAQNIKNPNTLQTRAAKGLKADFKLLATGTPVENSLGDFWCLMDTAQPGLLGNWAEFRSKWITPVTQATEETRDQMRIEIGSSLREAVGPFMLRRIKEQQLEGLPNKYIRSGLLQSEAGNLHRAPELAVAMKGGQLQAYDGVLDSYRRQRVEEDMRGQALSALQQLRSISLHPRMGDTGLLRVTGAEAARNAIAESAKLSVVLEQLDCIKAKGEKVILFMVTKQLQIALKMWLSQIYGLDIHIINGDTAAVQKKRDVLTRKKMIEQFESVAGFNIIIMSPIAAGVGLTVVGANHVIHVERHWNPAKEAQATDRVYRIGQAKDVYVHLPAALHPQFDSFDVHLDRLLSGKLMIKDAVVTPEPVDEKSMVTSMGL

SEQ ID NO: 4383 - protein, 723 aa, Mesorhizobium sp. ORS3359
MFVFFNWLTRSVLFWLIAAAAVLLAAKELPFINLPLVWGTILGATSGNIESISKPAFAYGLAGGLFFTGIGFAAAFYICHVFPVQIALWRATGQVTRAKGKERGRDAIRKSFASNFESLRQTLERNSLIGHAWLEFEETLFNTDGDRAIGNTVRPQTFFNLALARERLSGLKMMNAVPGYFVGVGLLLTFIGLVFALYKAGAAANAGDADKMAQEMGALLQIATFKFSTSIAGLGASIVLSVIFRWYFVLVESAFERFNATLERGLLYTAPQSISLEMNRTLQDQLVQLKDITQGEFFSRMGSELAPRLNAAIVEAMAPVTDQIGNAVGSLTANSQDGVQQMLHKFTDSLQHGAGTELRELAATLKQLQMSIVEMQGGLRGSGDEFATKLSDAADNLNRMVERAGQSFETSSGQSRDALATVMDLLRQTMEKANAEIDTALGTAASGASTKLEAAMGLVMDKLDKRIGELGDGLQTMQRTMGEHGDAARRQIEVSVSQSTDMQKAVLSELEATVQGISGRISSAVEDAVASVGRRFDELAASMRAIEGALIGQKAALEGASSEARKTAEALGKSAQSVQAATAPLVSVGDRFSLATEKMTEGVTATLDALKLAQSEMAGLAADLSAANKSSGDFWNNFAGKFDDVDTALGQAVSVLSRSTSDQQQRLETHVQSVDRGLSEAIGKLSGILTQMSDSAESIADSLEAAKVGGALSSSNGARGTQQ

SEQ ID NO: 4384 - protein, 302 aa, Mesorhizobium sp. ORS3359
MIVAEPDHRAVSHAEEDENYFVSMTDMMVGILFIFIIMLMVFALHFRQQTDETVKLTAEQQQQLQKANELAEQIAQLRRQIAAEIAELNKADQARARLLEKIQRKLDEVGLKVTIERETGVLRLTEEAIRFSPDSSALDDTAKRNVDAVAKVLLDVLANYAACPDTETCPGASGYVVETVFIEGHTDRTGDDGRNWQLSTERAVNTYRRIVDNFPGLRKLRNSDHREILSVSGYAYTRPATEQDDSEGFRINRRIDLRFVMEADRRERLTEVLDLLDKMEKKVGELSPTGTPVISTAPTARP

SEQ ID NO: 4385 - protein, 460 aa, Mesorhizobium sp. ORS3359
MSKHLKEAIAELLIRHGVPARASAPAQIEITAGKLRDTDGDAPRTKDYDAISEQLALTLSKGDSITGRQARDGAWCLWQTRFAIATDPAMLEPFLGQLRGLKHKGASRALALSYLISFHEDRPGLSAVAATLRDLAAVAGKPFDTLEEKYRIFDISDGPRRIGEAAFAHRKSPRTVLAEQGLQMELVLGGGFVEPCARRVLERVAEDKRLPSLERIDFVKLISVNGETKRLNFPGHKDLVANALLLPYANQRPDEAIRDRTLDLLISLEGVGDPRTRSGNWASMPRSRDIAVSWLTEQALRQFLDVVEEVNPNDYWHYRRTFWEAMHDSDAISAAWVVMDREGAREARRRFGKNTGFAQFTSGAVQAGHAVLLLRIGEGVCAEWSFNGKCRFWQDAQRQGAPRLYDDGYDAEFLRTGTRYPPILEITHYPHTGPNAWQHLAARQIQGMTGMRFSPKEYMP

SEQ ID NO: 4386 - protein, 992 aa, Mesorhizobium sp. ORS3359
MSLSFRHVSLPSGVQLKVLRRRLLGTQVVETSLWPHLTGKEGAAARYLLALADSGEADISATEVLVVHPAIAALPASVAEAVRLPPLGTLSVTLAFQGIMTDPRARIRVSWYDADTRRIRIERTGALARWGALEGRLSGPLYALTEAIDRYNATESSGSDIRIAAWAPVQNALKMTTGQEVSTEDRFLTSLTIYQAGAVALDVFATPYGPDFLPVVMGREKSATLNDDAPAPEGTEHAPAAPDLVSDALLPEPLQRRFASELFAAESTSRDAYVLDRNTYLVVDPALKSALDVIRTKRSAPREERISFLQNPRIEIARALGDETGEMAQTLLVETWQYSERILGLGVWEPPAMPWLKNKAGQWLPERFPVRIGDQIVEMDQRIFDGLKTAVAAADQQGDSKIQLGDRAFKVPEVQDAFERLGLDRQGNAPTQAVEEGNQLEQTQRDPHAGEQERLIIQQNFEGKEFAVSHNARQTVAGDEFPPTEVVTTRPKPHQKDGFDWLVGSYKAGWPGVLLADDMGLGKTFQALAFLVWVRQIRSKLGIDAGSQKKPVLIVAPTALLRNWVEEADRHLAPQALGERIDAFGSALRHLKMERLEHWTAETALDVARLRSADWILTTYETLADYHRAFARVPFSVAVFDEAQKIKSPGSINTQSAKAMNVEFALALTGTPIENRLADLWCIMDRVVPGYLGDLKGFVQSYEKGGGDDLRRLKASLDQPPRPETPPVLLRRMKAEILEGLPKREVSKRQMQMPPEQAEAYAAAVFRAQTGGTSQGDMLRAIHAFRGISLHPTGSSGCDPLDMTSVRDWIAKSARMVHAVKVLEHLNTIGEKALVFVEDLEVQKVFAAAIATHLQMPRQPAIINGTVPGEKRLEIVERFQSSSSRFDLLVLSPKAAGIGLTITAANHVIHLSRWWNPAVEDQCNDRCYRIGQQRPVTVHVPIAVHPEFGETSFDQTLDALLERKRQLSRDMLVPPVEDGDVEALFGRTLGRV

SEQ ID NO: 4387 - protein, 723 aa, Mesorhizobium sp. SOD10
MFVFFNWLTRSVLFWLIAAAAVLLAAKELPFINLPLVWGTILGATSGNIESISKPAFAYGLAGGLFFTGIGFAAAFYICHVFPVQIALWRATGQVTRAKGKERGRDAIRKFFASNFESLRQTLERNSLIGHAWLEFEETLFNTDGDRAIGNTVRPQTFFNLALARERLSGLKMMNAVPGYFVGVGLLLTFIGLVFALYKAGAAANAGDADKMAQEMGALLQIATFKFSTSIAGLGASIVLSVIFRWYFVLVESAFERFNATLERGLLYTAPQSISLEMNRTLQDQLVQLKDITQGEFFSRMGSELAPRLNAAIVEAMAPVTDQIGNAVGSLTANSQDGVQQMLHKFTDSLQHGAGTELRELAATLKQLQMSIVEMQGGLRGSGDEFATKLSDAADNLNRMVERAGQSFETSSGQSRDALATVMDLLRQTVEKANAEIDTALGTAASGASTKLEAAMGLVMDKLDKRIGELGDGLQTMQRTMGEHGDAARRQIEVSVSQSTDMQKAVLSELEATVQGISGRISSAVEDAVASVGRRFDELAASMRAIEGALIGQKAALEGASSEARKTAEALGKSAQSVQAATAPLVSVGDRFSLATEKMTEGVTATLDALKLAQSEMAGLAADLSAANKSSGDFWNNFAGKFDDVDTALGEAVSVLSRSTSDQQQRLETHVQSVDRGLSEAIGKLSGILTQMSDSAESIADSLEAAKVGGALSSSNGARGTQQ

SEQ ID NO: 4388 - protein, 302 aa, Mesorhizobium sp. SOD10; identical to SEQ ID NO: 4384

SEQ ID NO: 4389 - protein, 460 aa, Mesorhizobium sp. SOD10
MSKHFKEAIAELLIRHGVPARASAPAQIEITAGKLRDTDGDAPRTKDYDAISEQLALTLSKGDSITGRQARDGAWCLWQTRFAIATDPAMLEPFLGQLRGLKHKGASRALALSYLISFHEDRPGLSAVAATLRDLAAVAGKPFDTLEEKYRIFDISDGPRRIGEAAFAQRKSPRTVLAEQGLQMELVLGGGFVEPCARRVLERVAEDKRLPSLERIDFVKLISVNGETKRLNFPGHKDLVANALLLPYANQRPDEAIRDRTLDLLISLEGVGDPRTRSGNWASMPRSRDIAVSWLTEQALRQFLDVVEEVNPNDYWHYRRTFWEAMHDSDAISAAWVVMDREGAREARRRFGKNTGFAQFTSGAVQAGHAVLLLRIGEGVCAEWSFNGKCRFWQDAQRQGAPRLYDDGYDAEFLRTGTRYPPILEITHYPHTGPNAWQHLAARQIQGMTGMRFSPKEYMP

SEQ ID NO: 4390 - protein, 992 aa, Mesorhizobium sp. SOD10
MSLSFRHVSLPSGVQLKVLRRRLLGTQVVETSLWPHLTGKEGAAARYLLALADSGEADISATEVLVVHPAIAALPASVAEAVRLPPLGTLSVTLAFQGIMTDPRARIRVSWYDADTRRIRIERTGALARWGALEGRLSGPLYALTEAIDRYNATESSGSDIRIAAWAPVQNALKMTTGQEVSTEDRFLTSLTIYQAGAVALDVFATPYGPDFLPVVMGREKSATLNDDAPAPEGTEHAPAAPDLVSDALLPEPLQRRFASELFAAESTSRDAYVLDRNTYLVVDPALKSALDVIRTKRSAPREERISFLQNPRIEIARALGDETGEMAQTLLVETWQYSERILGLGVWEPPAMPWLKNKAGQWLPERFPVRIGDQIVEMDQRIFDGLKTAVAAADQQGDSKIQLGDRAFKVPEVQEAFERLGLDRQGNAPTQAVEEGNQLEQPQRDPHAGEQERLIIQQNFEGKEFAVSHNARQTVAGDEFPPTEVVTTRPKPHQKDGFDWLVGSYKAGWPGVLLADDMGLGKTFQALAFLVWVRQIRSKLGIDAGSQKKPMLIVAPTALLRNWVEEADRHLAPQALGERIDAFGSALRHLKMERLEHWTAETALDVARLRSADWILTTYETLADYHRAFARVPFSVAVFDEAQKIKSPGSINTQSAKAMNVEFALALTGTPIENRLADLWCIMDRVVPGYLGDLKGFVQSYEKGGGDDLRRLKASLDQPPRPETPPVLLRRMKAEILEGLPKREVSKRLMQMPPEQAEAYAAAVFRAQTGGTSQGDMLRAIHAFRGISLHPAGSSGCDPLDMTSVRDWIAKSARMVHAVKVLEHLNTIGEKALVFVEDLEVQKVFAAAIATHLQMPRQPAIINGTVPGEKRLEIVERFQSSSSRFDLLVLSPKAAGIGLTITAANHVIHLSRWWNPAVEDQCNDRCYRIGQQRPVTVHVPIAVHPEFGETSFDQTLDALLERKRQLSRDMLVPPVEDGDVEALFGRTLGRV

SEQ ID NO: 4391 - protein, 700 aa, Desulfosporosinus sp. BICA1-9
MIQKVRNFPMTIYLIMFSAVLFFYFYPPVSFIISDINASQLGNKVILIIFFVCMASITTYSLFIFDKSSKRNLKLFKDVLGKLESRPTLDFQGDVYKVRTLFSHSVLSAVWDKYENTIRRIESGSSDDGEVRVKYYSTIESNCFFNEEVVYSNLSYFKFINYAPQLLTALGIFGTFLGLVIGLLGVDFNDVTNTTNSIKLLLNGVQISFRTSIYGIAFSLILTVYQKILLGNQESLIVKISDKIDSIFPMNTQADGINQLHVELEKQTASIQRMGTEIAESVANKFESSLQNTLGPTLEKFSQTTEQLIEIVKNSNQSTIASLVDNIGTIISSSTSQELERLQSTIGTMAERNESLLSEFEKTIQTLQSLVESQKSVVSETNLSANSTKQMNENTSLLAGELVNIISGLNNFASVQQDSYDGHLELVKNVRETLEQQDKSMALFKETVQQTVYSAEVQKHANEKLSVTVGKLDEFNNNFQSVLDSIKKSVGEFEGASETICNKFNDTMANLGMTHASIGSSMEGLTTGLNQAIKSLDVIVSNDLREINDQYVVVVKNLNGFSEKSDKLVEQLAIFTDTNQGYVQLWGDYKESFDNLNQEINKGVVDYTSNVRQGLQNLFKDYDDHISKVLGEFKATIENFGNSIEELNEILDEKNLEGMHQKTSKIIQDGNTVLKAFVGKMDELKEVYQQQMAAVRMTSR

SEQ ID NO: 4392 - protein, 242 aa, Desulfosporosinus sp. BICA1-9
MSGRRLRKVKKHDEEITYWLSFSDLMSSLLIIFLLVSVYMLLDYKKAAAQAVAVSNELQDARSELEKFTSINDDIIKKIKEEFGDSLYIDDTGTLTLQSDLLFDSGKSELKAVGKEFIRKNMPRYFGILLKDPEIRSNIAKIIIEGYTDDLGDYHYGLDLSHDRALSVYTFIYNDPEFAGYREDLKNYIILTGRSETGFLKQMQDESVEDWRARNRRVEIKFELKYQEIFEYLKKSLDKEKI

SEQ ID NO: 4393 - protein, 1169 aa, Desulfosporosinus sp. BICA1-9
MRFGLERLKSMLKANKERSLTLDYSDSSVLRIYLQENGLNISFQGADDNIHLLVNMSNASLAEDKICLVIPYENMYEFYFDEEGNPIEDYRSLNLPALFDGFIYIENNGNFVEDDRVTYNFQFKDGREHDIKRFRENIVLVDGSERLLSPEMYDCLKLVTKYNQDERLSNNIASQFELLASIKDFAERTNLALNHRLSIEGKPVIVDKIKLDFNKTPRGLEIMPVIAGKDEEFNSSFVSAFDKYAEIKNFYTVKENGKDVKVIIKNKDSAKKVKQNRLLTGEKEQDFYRGQNELLEDENFDLSEYGPRVKGLGYLNYRAVASPSNNSDESWFDFSQAYQTPSLYTDELVHPWRPEDREILQEKLVAMDRDQRNLSELELQNEGEVFKVQLTREQLIDEITKISDAFIDPSQIKSIKDLKEIKEKCEANSDQRFIEHKGRFIKNYGKQEIERQIERLTEELKRPKSKQKDPMLLIKDNLTELEHTEGKPAPQSESASIPYENPASLQINLYEHQTEGVHKLQSLYHTSSTNGFLLADDMGLGKTIQILTFQAWLKARGTISPSLIVAPTTLINIWDNEDPNQIGEIQKFFRPQTFKTYKIQGIKRDSSRELETIRRCDLVFITYESLRLNHLWLGKVHWKCIVCDEIQAVKNPKTLVSVALKAQNGDFKIACSATPIENTTEDLWNIMDFAVPGVLGSLNQFKRQFVKPIDTLRPDQNDERKTINDILVQKIGNNFLRRSKEDKLKDLPNKKVVVQLIEASDQESKRIAEINRLRQQGEPSLPLIQKLIASCGHPKIDSNIDVNRISPKDLIAESSKLAYLKEILDPIRAKNEKAIIFTMFRQMQVILFKALNYWYGIQPNILNGTLSPDKRSHMLSAYRKSNGFDVIILSPLAAGVGITLTEANHVIHYTRLWNPAKEAQATDRVYRIGQTEDVHVYYPMLSFESTSTIKFETENKYLEYFLKEKTIGKTPDEKLNRLLVKKKNMLNNFFLAAGNPKADIIEDWEEEVSNPHQLTLNNIDRLLKPSEFEAACSVLYKKLGYHTFLTVSSGDFGVDVVIEKGGKYGLIQSKMVKELTRSALDEVNGAKNIYASQLGVNIDELIVISTAERITDSIKFSAEQNKISVILQNDLEKLFTENPIFYGEVENEAKDRFSLEHLKRELVCNGETR

SEQ ID NO: 4394 - protein, 669 aa, Achromobacter sp. RTa
MNEISKALGVVHPSLASLHGLPLYVFLLVAVLTLAFLIGYVVKGTQVWWQLRSALKAVRSLLKAGPAPNPTEVASAFRREPLKHLWVEYADTLHELRKAGSGETALTEFRATMPAEAMFTKEVLVDGRLFDEFTRHLPGVLTGLGIIGTFAGLLSGLDKFKVDPEKVQNTVNGLGPLLEGVQHAFVASGSAIACAMLVVFISRFTLAYFYRLVEHLTNGIDSLYRTGAGEEYLARLVKSSEQNAASTAQLKDALVEDLHKMMTNLVDRQIAAQETASLALGKHIGEAISTAIAEPMKRVGDAMEATSRGNGEQVNSMLETLLTGFMAKLEDTFGGQMRGINEQMQRSMDSMAAVQASLQGLLSDIRSTNEHAASQMSGTLEDAMKKAADNQQLLTEQMREFVQDFRSLVTEEQSKSKHAMNEAVMKVLGEVETAMEGLENVRKASAAEESGRNDRLATQTNQLVGGLTTQVESLLGAVSDQVSKTQRNIDALGDVSLRAIDGMNQGALTIGSAAQRFETAGGAVTDAFDRSTKVAETLATTAASLQAASTAVQRGFEQYDSTRKTVDTQVAALMGLIESVKREAGISQELVNSIKTSAEAMRQSEAEAREHLGQVNAALVKAFSDFGNALVSQVKSTIAETDRHLAQGTGHLNGVVQELANAVQRMKRA

SEQ ID NO: 4395 - protein, 234 aa, Achromobacter sp. RTa
MLARLVLKRGAKHEGESPFWISFSDLMSALMVLFLVVMAVTLVSVTQSIDAATRATVERSAAINRVMQMIAQDPKSAGVGVDQQNFRIDLGKEVRFDSGSYTINTTAGQFLRSYIPVLLRAKESDDGKRWIRSIVVEGFTDEDGTYLYNLQLSLDRSRSVVCSLFQTSGVADALTPEQLRKVQELFLVGGYSFNSIKIDKAESRRVEFKIDFWGLDERVPEASDVLKGKEFGRC

SEQ ID NO: 4396 - protein, 570 aa, Achromobacter sp. RTa
MLAVSALQRLTKDLAASLASMGLHAGEFGKPDLVEKPTREAEQLFQGYAKAKPSKEDAYAAARAFVRGQPLDAWQRDLVASAVAEPIREQSGAMALASKRFPALLKSYEDEAARGDLWRLTWHGLLYSYFNFDLEAGKDTATREGWEALRAFLEQTWPLMDKQAGEDLVPDWVKVLRHEVDVLTAKPVEKYSRAYLRGETESTDRVAADLGISPSSWFWHALVLGAVRHAAREIDSEFRRLVPQLIKLIQTKPGFRDEAIEVVLNRYHGCKGAPPDERLRDFVCQTTVWKNPKLKAAGIATAWNRVPDPVWQMVLGWVNERNLKDFFDILAARNNADEGRLAFWSKYLKQICWTRLVFGADTMALKRTNAGVRELIAREEGAYAQLTSKPEVDAFMMQLDSYIIIEFSKKPNACYVYQADQLPFEPYSRHYDGGTADLAAGFRDGCALRIVHREGWGARAEQELRQLGIIPDVADPRRVSSSATGGTDTAKNTGRAAERPESATPSPDMAKLNSLVARFRGASINDKRRTSSRGRLWVEDPLQRRQLASELKAHGFKWANSRQAWYFPER

SEQ ID NO: 4397 - protein, 1293 aa, Achromobacter sp. RTa
MGLFDFLKRAASSNGQAPALTTIWAAEGVRIKFNNDIADTTPEGLLEAIHQAGAEDSVLGAYLAQLASESRCRVDAHGVTIPWSDVYELQGSAEHAGALKLLALPPQSPLRPIIDGSGTLSSDDFTVEVSGWTDGAQQVQVDRLDGAVATVGGTTQMLSASAWAAASDIMALQSRPPEGRTQHAQEMAWGRIRSHADRAGALYASPYLETTLVLTPESLRLPLAKEETPFGRVLTVSPTFDGAPDGWLAAFDGFNSVQPHYDLTRGVGRVRVVISEPVRKVLAVIKREMPNRKVAGAKAEKFVHNPFSFLGETAHQVLKEGEFEADRAEAGAVAAVFSIVGRTEHGRINSVDLLITEHFGDGTARTDKKAFKTADDLDAFLGALKSALEQDREHFPWDEYDLTVDAESTVQLEQGLQVAHLWRMQPAQRISLDDVYQLDGYSGRIEGIGAAKPIYVPVFQRDKTQSEDESGWLPTDLTPMVKVTLQGHEGQVLIPLTKEWVNDFDKQVSDAEREGAAEVKNASLPTSLETAQARTLADGFKAMLGGQDRVKVEGESRPKEKKGPRETLLVKTNFHGVDYLEERRATLALPEGWEAQLPRSLRQSIKLKTHQLHGVAWFQHLVSKAPAECRGALLADDMGLGKTLQLLSLLGWYYEENPNAAPSVIFAPKSLLENWANEARKFFSDSFPEVLVLYGDTLKARKQPLSLIDSQLRDKGIVELLKPDWVGTAKVVVTTYEILTSYEFSLAKQPFTFLICDEAQRIKTPGTLVTLAAKKLKADFRIACTGTPVENSLADLWCLFDLVQPGLLGALEEFGKTYRRPIECQTEEQVTALQRLQAAIAPQTLRRTKGDIAADLPKKFFAYKKAAEAELQFKPHLSDDEMLEIPLTEHQRILYKGGLKKLQEAAHESNGRKRAQLSFGALHLMKAVCAEPYCLPGTKFIVDKSGREPHLANSPKLGWLLARLADIQRTEEKAIIFTELREVQAALYYFLKETFGLRPFIINGDSQGRQGYIDKFSAQPGFDVIILSTLAAGAGLNVTAANHVFHFTRAWNPSKEAQATDRAFRIGQERDVFVYCPTVVADDFHTFEVRLDQLMKRKAGLAGSTLDDGGLSGALTVMLNGSGKDATFTELVGDSGCGEALPKRYLTMDDVDRMDGDSFEVFCSLLWGKRGFQATVTPKRGGDGGIDVVALKGREGELLQCKSSKASDVGWDAIKEVTAGAAKYQARFRGTRFRRLAVTNQSFTTGAREQAAANQVELIVRSRLDEMLGAHPVTNHEFDTALQEQTLYSEVMA

SEQ ID NO: 4398 - protein, 595 aa, Thalassotalea sp. ND16A
MLTNMELSALVSTTSIYVYCGIILLLAIWHFIRFYFFTKPIISELKDAISRINKSAREKVAFPEDYYDFKEWMDNTNYLKDSWREFEETLLIPGEDFDDERQVILNTHLTSVHFNQKNILWHRVNMRFYNALPNMLTGLGIIGTFVGLAVGIYIAAPGLNSDSILDAKEALNRLLDGAALAFITSIVGLASSLVFSYLEKGRIHKFNTFCQSLVSEIDARVEYFSAERLASKSLNESQKQSFALETFANDLAVSLGQVIEQQVSRPVVEAINALKEEQKSANDETLEKLISEFSSSITGAAGEEMKAFATTMDSVSSNLEQQMTAMTENQSEMQESSKRAVEDMSDAMVQGSQKIRDEISGAVASLADGISKSLEAVSEKLNNAAEVLSEKLSDSINGFDTVLNKIENISEKYEAISTNTTELHSQLNNSIEKAGETVQLAGEINGAFNESITELTEFTNSVDRSASTIVKSTENMHSLVDQINGIQETLKTHWDNYNSRFESVDQSLSNSITSLSSGLDGYASATNDYILGLDKHAAQVVQDLASAVQEVNDAMETINETLDSQKTSFLDSVNVISNQALNNLQTLSDKSVQQL

SEQ ID NO: 4399 - protein, 261 aa, Thalassotalea sp. ND16A
MSEHHDLLEDEGAGYLISVSDMMSGLLFIFIITLVAFILNFQDAIQKQKKVTETRKEIVRKLTNTEQIRSELLKSIQEQLQRQNIIVEVDNEHGVLRLTEQAVLFETGKETLDEASHKNLQIIGMVMSKILPCYSQMPPDNSLCVDMLQFQGTLDSVFVEGHTDNVPINSWRYKDNWDLSAQRAISAYRYLVPGSVLNDLVNTSNQPIFSVSGYGEGRPVEGHKYSVATSDPTNRRIDIRFIMTPPSLTSTQRTLIQEGVQ

SEQ ID NO: 4400 - protein, 390 aa, Thalassotalea sp. ND16A
MKTQSLLKSIGNFSQVSPSLSESLLVNAAKKITEEFGFSAVEEPIRYSIEEVLDKLLQIKNKELTFEQLSRKEHRLAPWALFQTYNENEKLIDSQEFVKHFLAYTKLHTGQYTAPILIHLYLLYFPVQSAVFENLRTGIKEIIASYDSNKIALLKAWTEGTLILDPGATLNFARNCMTDGVEETFNKYKLSKSLATGQFACFGLSQLLTLLSSSLSNKNENEQTEIITSLLEQLISNDELHYPTLRADIADGLLQSYNINKPSHAIKKALKEFFITFYGDIRTEKTRWIGVSEEAKQVMQQWMVENTLNDFFALLSHVSRTDSQADHHWRYRKRFWNAYLQKGVITEAWVALGPVANDQARKFLKSDKNVYASLSGAQRNHSALIMVIGD

SEQ ID NO: 4401 - protein, 729 aa, Erwinia iniecta
MSWLNSLLVTLTSVEPHKVPVTVIGLVTFAVVCFIFFYLVRAIRIVSGLKKYTQSINSIEKSEPEVQLVHLQSLFQQPGLRHAWNEFEESLHPQRELEDGEEKIVRIRATAPSASFFSEQQIVDIPLNTEFFKHLPGILTGVGIIGTFYGLMIGLNHFDPNTPEQVTSSVNNLLHDVLYAFLGSAFAIFASILITWLEKLSIAKCYKYLEKFTAALDSLYDSGVGEEYLASLVKSSNESATQARHLKESLVTDLRDMLLHLAESQKVENERLATTLSATYRESGQHFAEQVSGAIENSLKSPLDKIAGAVQTASGDQSGIVQNMLQDVLTAFMAKLDTTFGQQFTNLNDMMGQTVGAIQTMQTGFATLLQDMRQVSDDSRQGSARLIEQLLSEMKSGQQAMQAGMNDMLSSLQVSVAKIGAEGEGAGERMARQLEKMFADSEAREKAQSEHMAAFIEAIQNSVQQGQSATMEKMATSVEALGEQLSSLFGQIDKGQQQISVNQQVNQQSLHEQTQRVMNEVDDQIKQLIETVSSQHQGTTETLNKLAEQTNRQIQDMQSGAEKMRVAAERFEHAGDRVSEANHLTAEVLNKAQSAGSSLSLATSELASVVADYRNNREAVSKSIAMLELLAANTQSEQTTRNQFIADLKQHGERLQSYNREAQAFMENVSDVLGKGFEDFSEGVLRSLDKTLGKLDVEMAKASSLLAGSVEQIGESVSELDDVLSRVRA

SEQ ID NO: 4402 - protein, 246 aa, Erwinia iniecta
MFGNAFGVKKRRSDEAEKPFWISYADLMTTMMVLFLVVMVASLSSVTQRIQRAEQGEKTRGQDISRLCERLELHARNVNKTIVVDCHDNRISFGEAGRFDHNRFFLNAEGQKALQDVVPLVLDAADSKEGKKWFKQIVIEGFTDTDGSYLYNLHLSLQRSEWVMCSLLDSRSPLQKSISAEQQIQIRKLFLAGGVSFNNAKESKEASRRVELRMQFFGLKDKRDEADEVDFPPVVNKEVCQLVMPQ

SEQ ID NO: 4403 - protein, 560 aa, Erwinia iniecta
MTPALNSLSQRIAARLSSSQRDDNYLHNDFHTLASAALDMEKRFDKAEKIPSPPQQMRLEALRRLRLAKELTEREWRMVFYGLADNDPLYPDRPILLEDDVFFPEVDNAIKIRLVSKELKRKDWAALCSSYFAYQHESPETNPHWCVLRGHIAQGYFVVKAAIRREKSWMKTIEFYHDIFTPQAGGMISRQLLAGESNSLSSLEKIAQIPESSWLWKRIFTVLLAQLDTLDDPQFLEKISWLLGLAAQWVRFRDDIITATLTRYYHSIYREQVHSALKQAALEFWDNPQLKSQQNKWHQYVSESVVAMVRGWLAKQDLTHFFELLRGNGDVDQARLHYWLRFANQMGFTRIVMGLDARQDRRSDFVKFREDNRGRLSHLHGGRSFDNAMIMQINDYLFVEFSGTGNAMYVYRIGHAPFNPESRILDINIHLKDQGRCALRLPHAPRAEGYNKVRITGWMLKYDDELRKLGIRWMAEEPVKFVDKKGSSTASLSAIKIMNPLRDTAIQHLVEGASCIVSDNRQKGGVLSVQLKMPDDAIERELLRLGFAPVAKEPHRYWIK

SEQ ID NO: 4404 - protein, 1083 aa, Erwinia iniecta
MLKRLLSKLAGNRQQIEHHLKNHYQVEENGLSFPLSLVDDSQLWALASWLEQLAEEDYLISLTDRWLLSWDALYRLLDDDEHASSLPLIGVPEILPLRASLSSRGALSDSDFRVWIADWATLPTRHPIRFSRTGAIFTFDNQQHLLSRENWVLIQATEQLSAQQSQAPGETTNQLGWATIRKCAKQASAKFDDYLEKTHVVKPTSLSLRLRKATVADTAVIEIEPHFEDQPANWLGNFDKNSQVHDSYRIPGENGELSHVIITPEVKEVLNSIHSIPGRRVAGSEALSFVRNPYTFLGEDAASVIDPEEHEQALFDAHIFFHHFRLQPRLNDENKIENITLVLEPVSPVQQPEVTFLFSAPWELDKFVQALGMSVAAQMPAGSWQGYELELSQFTEQQWHDCQSLLSRWQQEIEGKEFNDVLDIGKYGDRVIGIGKFEKISSPWLTKAQSENWLPDDIDFSAFSIETLAGWQPENLHHFDELQERITQAEAAGETHITPPWNDAVLQLYAAKTLSKNWKKQQNTANKSQGNVADKAARAVLKIEQNIEKAAYIKQRRDSLLNARHAEPEIPLSLKEHIRLKDHQSEGVAWLQQLFLRSPEETTGCLLADDMGLGKTLQILSFLVWFIEKFPDEPPSLIVAPVSLLDNWERELDNFFYTAGVPVLKLYGETIKAVKYPKQSIPAHLQSQGIKNLLKPGWRGEAKIILTTYETLRDQEFSLARQPWSIMVCDEAQKIKNPAALITIAANAVQARFRVACTGTPVENTLVDLWSLFDFAQPGLFGALNDFGKHYVRPIENEADRDTERLERLRALIEPQTLRRTKEEVARDLPQKIEVTSCKQLPLSGPQKQLYLSSIANWQQQQALSEGMQQAGAGMLGLLHRLKLICAHPAVVSPEPRYQEGSPKLNWMLKTLDEIKHTSKDKVIIFTELRDLQREIQHAIQKRFGFRPVIINGDISTKSHSQNSRQRLIDDFQTQPGFGVIILSTVAVGFGVNVQKANHVIHFTRCWNPAKEDQATDRAYRIGQTKDVYVYYPTVRDSEITTFEETLDELLQRRRSLARDMLCATPDLNGADFEAVVAKKASI

SEQ ID NO: 4405 - protein, 729 aa, Erwinia iniecta; identical to SEQ ID NO: 4401

SEQ ID NO: 4406 - protein, 246 aa, Erwinia iniecta; identical to SEQ ID NO: 4402

SEQ ID NO: 4407 - protein, 560 aa, Erwinia iniecta; identical to SEQ ID NO: 4403

SEQ ID NO: 4408 - protein, 1083 aa, Erwinia iniecta; identical to SEQ ID NO: 4404

SEQ ID NO: 4409 - protein, 687 aa, Acinetobacter sp. neg1
MSFLAIAEFLQGFYVIPIAMAIFVSVVMFFFVKEYWTPAKRLAKELDDIIKNVDEGVNFQESKNSLNSLLSANPTLKHAWENYKNSLHDIREEVDGEFQIISSRSTVSSDMFFSQIAIIDTPLKVDFYKHIPGIITGVGIIATFLGLLFGLLAFDPAGDPAKVQSSLALLLGGVGEAFMASGLAILIAMLITWKEKFWLRECYEKLEQLTTVIDLKFEPDETSEEYLSQLLKSSQANETNARQLKDSLVNDLKTMMTNLIDENKKNQLAFTAQLTESYSKTSKEMADQIGQSISDHLQAPLEKIASSVQQVSGDQSSAVQELMTDVLTAFMTKLESTFGSQMTGMSEMMTRSVSAMKEMQLGFTQLLTDMKVNSESSTKNLETQMNKMIEDIQSKQNAMAEQMNSMVDHLTKGAEKIGEQGQHAIDQLNGKVSELIEHMGGTMANVMADIAKQRIQQDQVIADNQQKLHDQSSTLINDLGSEIKELIVHSQNAVDAYKDNIQKLTHVTTESITGMNSGAEKMRLASEQFNSAGTSLISVTDKTSQLISEVTATSTHLTSASNNLLSLLSDYKNSQDAVNKAIGALEGLIQQAQSEAGMSTKMLDDMSQMTTALNQVKKEIQDYLEQVSGVLFKSFESFGASVETSLNHSLGIYDNTLDQAVKRLSSGVEGLGSFVEELEDLVRQKKS

SEQ ID NO: 4410 - protein, 243 aa, Acinetobacter sp. neg1
MLGNRYSKKARHKEEAEKPFWISFADLMTALMTLFLVVMAVSLMIVTKKINEATQAEDQRSAEILNICQSIKHSAKLKDAGIEVDCKNNRINFGEAGRFSHNDYRLNEVGQNRLNTIVPIILEEANNPQGEKWFKQIVIEGFTDTDGSYLYNLNLSLRRSEWVMCSLLDPKFSSGLSLTEQQKNQVKQLFLAGGVSFNSAKDSKEASRRVELRMQFYGLKEKESSEPQPHFVSAPIETCQLAR

SEQ ID NO: 4411 - protein, 472 aa, Acinetobacter sp. neg1
MPISEVMSVSIENLKLRLEQKLSDSYNEQYIHSKFLKPQRLIRTLHILEQKFDDLENAIPLDEKIFRTISKLEHSGFEQFTRRDWKNLAWALSKIVPDTNEKLLFSEIGKRIIHHFQQAEINLIGLVYFPLLYSYFALEDNDIKEKPAIWVQLREILKTHRSSVYKGLKRPKKWMNTLVDYSELLSESPTKAFVNRFIHDQDATGIQSDLESLKIAANSWFWDDLIKNSIQAVKVMGEDEYLRVIPRFLKLAEHNILYTTNILVALLERYARTAKRGAVHEDLKHLALNQWGNPQYDSSAGWNNVNIDTKKMVIQWFVRADLEAFFKLFSSSADVNRFDYWIKFIDQISFSQIFLGPSALQSVQPQHKKFRDLNRGRLKDLVDSTSSNNAFMLKIGNLYIIDFSDTGNACFISPKLPYKDNKRRVSIFELRADHIERLIHTNGWQKRFDESLAKRGIFAKSLEKSSRTSTYR

SEQ ID NO: 4412 - protein, 1069 aa, Acinetobacter sp. neg1
MKLAFWKRKKNTDVVKDDELKHISKLFSYNELGITFSSSQNAKTDADFYWQSLEEEELAYLVDGHYVLPWEELFQILQDEEHKNVISLLNLPKQTSFRPVIKSEGGLSDSNFKIILDGWLNENNVKIRNILQRKGSILIIDGVEYLLNEQSFRLIEQLKEFSRLENKDKELNQKYWAKIRNLAHKANANLDEFLRKTVVLAPEKLQLNLRKNLISQESVVEIQPTFDEAPSKWLNTFDQYNHVQDQYSISLPDGGIAHVVIPSTVKQVLTEIKKMPSRRVSGERAQAFLHNPFAQLGDDAVDVISPESFETSKQEAEIYTYTLQLEKKYDELKHYISAKLELYENSEREQNPILLELHNLDQTLYFIEAYEKKSPFFLWAGYEIERNNYLDHQIQDLKNDLNVIKQYEDELQTKQVLDLSNYSDRVIGIGEAEKLNSEFIKRDSGESEWLPQHLMDLEQQLQDKNIEQNIEQLEKSIRHAEKNNLNEIIVPNTDTKLSLEHARTLLNQLRTSKSKDQDERLEEQETTQPKKKKDTLLIANNIDEAEFTKQRSNLLIFDEHNSPSARLPTSFRNTEFSLKRHQAYGVAWLQNLHKYAPEQVSGCLLADDMGLGKTLQLLCFISEYLENAEAKKPVLVVAPVSLLENWEAEASRFFSNRFPKILSLYGDKLKERKIPKHLISAQLRENHGITNLLEEDWRGEADIVLTTYETMRDLEFSLAREDWSIMICDEAQKIKVPTAMVTKAAKAQKADFKIACTGTPVENSLTDLWCLFDFIQENLLGPLNEFGKVYRKPIENVDGTDETALIKLREIIAPQVLRRMKHDVADLPAKVEINSCKDIPISILQRQLYIDVVNRFKKLTAEGNQGAMLSSLHSMRMICAHPLHFYPTAGLKDSPKVDWLFKTLESIKQKNEKVIIFTEFRDIQVFLKRILMERFGLNITTVNGDSNTSSKKGLTRQNLIDKFQEKSGFNIIILSTTAVGFGVNIQRANHVIHYTRSWNPAKEDQATDRAYRIGQDKEVFVYYPTISAAKDFDTFEVKLDRLLESKRELADDMLKPKTDVGKELMQLID

SEQ ID NO: 4413 - protein, 730 aa, Pseudomonas endophytica
MDFSTLLKLWGDASTAQLIAPRVVMVAVAVLCLWYIGRYFIPSFVLSRRLKSLTSSIATIKAKSPDQLQAELSKVFNATKLKHLWKEYSETLHNQFEYHEGEDRLVRSRATTVAANFFTGQSVVDTPLATEFFKHLPGILTGVGIVGTFFGLMLGLQHFDPSTPELVNSSVDKLLKDVLFAFIGSFLSIMASIIVTVSEKWRLGRCYKHLESLNEAIDSLFDSGVGEEYLAALVRSSAENSVQTRQLKDSLVTDLREMLQNLVDTQVRESLKLADTLSTTYRDSGQLLADQVSSAIENSLKSPLEAIAGAVQAASGDQSGQVQNLLQDVLVAFMNKLEGTFGQQFNGLNEMMGQSVAAMQSMQQGFSSLIQDMRSASENSNQSSSAMIAQLLADMQTGQSAMQAGMNEMLANLQSSIARIGTEGEDAGARMAQQLEKMFADSEARQLAMAESLQSFVESIQKNMGQGQQETMAKIAGSVEVLGEQLSTVFKKLESGREQMDQSTRVAQAELHHGTRALVGGLDEQLKTLLQSVAEQNKASRDNVKALSAQTEQHLQSMQLGADKMRAAAERFENAGLSVSKASESTASLLGTVQGAGAELAQASRELNSIVADYRNNRESLSKTLTVIEGVVASAQVEASGRAQYLQDLKQQSERMQSLNREVHEYLENISGVLGNGFKEFGDGMDRVLRQTLGSLDTELDKAVKSLAGGVDGVKESIEDFGDIMERIKQ

SEQ ID NO: 4414 - protein, 247 aa, Pseudomonas endophytica
MFGKQMPSVARAKDDAEKPFWISFADLMTAMMILFLVVMVAALSSVTQRISQSEQGEKQRSRDISQLCEHLQLKAKHSNATIVVDCKDNRISFGEAGRFGHNQYSLSDEGQSALQGVVPLILDAADSEEGRKWFKQVVIEGFTDTVGSYLYNLHLSLQRSEWVMCSLLDSRSPLQIGLSAERQQQIRSMFLAGGVSFNNAKDTNEASRRVELRMQFYGLKEKEENLKPEVPVFASTVSEKCQLAMTR

SEQ ID NO: 4415 - protein, 549 aa, Pseudomonas endophytica
MTSALAKLSSAIALRLDARRIAISSEPLARFPRMEAASADLYDRFERAEKALPPPQEKRRAAINKFRNVLPLSSSEWRMVFAGLADKVESVGPILEDERLYGRVHIEVSQRIEKRRLSRRDWLALCFSYFGYESDKPDTNPVWCLLQGDIRNGFACVKAQQTREKEWIRIVQYHKQLFSEQAGVTLGEQMFNGEISDLSVLQTIAQIPDSSWLWHRIFNVLLSRIFNLEDDEFSKRFPDFIEIGRQHPTYMNALLSACLTRYHAASYREKPSSLLKQSALDNWGSPQIRSRQNSWLQYVEKDVCAMVVAWFAKEDLEHFFNLLKGDRDVDQARLFYWLRFADQMSYTRIVLGADAKTDAGSDFVDFRRKNNGRLSYLAGSKSSNNAVIMQIANYLFVEFSEKGNACYVYKADSAPFNPDQIYLDLNSELKQKNKSAVKPMGHMAMPSRPNHVSGWLAKFDETLAELGIRADGHIDSRGDHPFRSPPKTIAFEAQLAEALKGISHRVYDSRAKGGALQVQLESHEPAAMASLQRLGFKPVNNQPLKFWRQ

SEQ ID NO: 4416 - protein, 1082 aa, Pseudomonas endophytica
MLKRFLSGKGLLPKSGEFNNLPLYSIEEQGLCFPLSLADSTEFWSLVGYLDQLEEEEFVSQLSDRWLLPWDELYRLLNEEGHVSSVPLLGLPKQSNLTPQLTSQGSLASNDFKVSIGAWRDSESAATVQTKRAGAVLTHGDKIELLPEATYQLVSAVRQLHLSQQESPGELTNQIGWASVRKLARKAGAGMDGFLDKTVVVRPENLRLHPRKSSVGNTPVIELEPTFDGQPENWLENFDAHKQVQDRYRVIGADGSLTHVLIEPEVKSVLDYVRSLHGRRVAGDDALSFIRNPYSALGDSASQVLDADTYESDLADAGIFFHHFHLEPELNDTGLRIQRINLTLEPISPTPQVSIELPFNEAHKFAPFVHELQLKLAAGMPAGFWQGYELELSDFDLRQLAGISELLRRWQNEAAGAEFDAVLDLSLYGDRVTGIGEAERITSPFLVKEATENWLPKDLADLGSDAEILGRWDPSDRAQFDEFEQRLGEARAAGDDTVLMPLSDTPLSIAAAEQLFDAWSKKISTPETKISSFEEKVGRAVLQIGHNIDEPTYVQVRQEALRAALDAQPELPSLLRPEVILREHQLQGIAWLQHLFRLSPTDVSGCLLADDMGLGKTIQLLTFLVWYLEQNPQDKPTLIVAPVSLLDNWERELHRFFFADALPVLKLYGSALSAVKFKKDEIPADLKAKGIKNLLRPGWVGGARIVLTTYETLRDQEFSLARQQWSIVVCDEAQKLKNPAALVTQAIKAVPARFRVACTGTPVENSLIDLWCLFDFIQPGFLGGLNQFGREYQRPIEAALERDTVALERLRGLIEPQTLRRTKQDIAKDLPAKIEDKGCRSLSMHALQRNLYLSEISAYSQKQQIEEQLDQKTSGMLGLLHKLKLICAHPYSVQPDKRLRDNSPKLRWLLDTLESIKKAGKGDKVILFTELRDIQRELQHAIQEYFGFRATVINGDTSTSSQSANSRQKLIDQFQDQPGFSVIILSTIAVGFGVNVQAANHVIHFTRCWNPAKEDQATDRAYRIGQEKDVYVYYPTVRDAAMPTFEATLDELLSKRRALARDMLSGSGEIQASDFERVLGVC

SEQ ID NO: 4417 - protein, 236 aa, Rhodocyclaceae bacterium PG1-Ca6
MIGTRIIIKRGSSDEAEKPFWISFADLMTAMMVLFVLVMSVALLAVTKTVSEAERKKAEREQDVQRLLDKVEKAAAPFGVTVDRKRQVVDFGDRARFDTGSYQLTRDQAKLLRAFVPKVLDIARDDLGKRVLKRIVVEGYTDQRGTYLYNLNLSMQRSQRVLCALLDKPGSEERPLEGREQEEVRELFLVGGYSFNSSKPTLDESRRIELRLEFLAVDEARPKADVAQGNFGVCAI

SEQ ID NO: 4418 - protein, 553 aa, Rhodocyclaceae bacterium PG1-Ca6
MNHIDQLRRLLQRTNQSLFDVEHWGDLASIQNAGRAVRKQFGELSSAGPGDERSIGVSVLAYHRSGDLPNYREAKYVCFGIANSYGRDEYCLIEDRKLFPRLITHVDQYKQEPRKFRRCYQGLLSGYFEYPGLVSPSQDGKSNWTDLQGYLKGNLTFVQRQEPPVEWTKTLGEHANLFTDAPCLRYGDALLMGDTRDIDTLREKLALTDRSWVLQEIIIAQIEAATKKSDADFKEHIRRLLALIDPLELLRSKGLARLLQRYHKCSEPLENIDLRDFSLKHWGSPMLQVKRQTWSAWVQEPVIKMVDTWLKLRSIEDFFALLAQDGQARRDRLEFWLRYVDAIDDLYFALGTNARQNNTPDYKRIREHMKGHWMSLGGAGVSADNNAFLMRIGNSLFVEFGKHGNASHVFQYDNLPFRLGSGFVDGTGDGLKNTYHPGHQAKMTHHQGWESEFEWTIKRLTGARPIAPKIKTPQPIAQNTYRVEQPSTPHPSSFIETLRKLASANGYTVVDHTSKGGNLWVEAPYSVNNSFRQLLEKWGFKFKSGKGWWREIE

SEQ ID NO: 4419 - protein, 1254 aa, Rhodocyclaceae bacterium PG1-Ca6
MMWTWFSRQSPSGDVSSPSDNRLTLTISNEGVTFRPDTSIPEWLYNPLQFGRSSETVSFLGQIEERGFAEFDGNAILLSWDSYYRLLPECDADELNSLLSLPKERKLRPSIQSQGALEDPDFRVVLGDWFDERDIALTVPPDFVGGLAKLGSEECVVPEAVWRLVSSIKHINTATGRSGLENRRLWSDIRIHAQAADAELSDFLRRTVVLTPERLKLGLRKTDIGDAKTVEVLPSFEGAPNKWIEFFDRFPNVLDRYDIPDGEGITQVIIDPQVKTVLREIRRWPARLVSGQRAEAFVRNPFAALGEDASKVIDEKEFEMSRAEAGITFQNFTADIQRNSTGAVVAVSLLIEETDATTVIGERYEFPDIDQLDRFIAKLAGRIESNHQCCVWEGFELEIIGDTEAQLEILREARKEWGKPQVVISYAEVHDLSRYSSRIDGIGVEKPYCSPFIARKSDDAGLIPENVVFGLWYTPTGSEQPIAISLDERQQSKLKSTVEEAKRAGEDTISFPGLEKQISVSDAENIIEILGEATKDVKNGVYKAPKIGEGETKPPTERKSLLLKPNIESLEYVESKSRRIEALSLPPSASPALPSSLKKSTQLKEHQRLGIAWLQHLWKNTPEYSRGALLADDMGLGKTLQLLCFIASCIETDPKIDPVLIVAPVSLLENWKEEVEKFFEPGTLPVLMLYGDDLKSKRISKSLIDQQLLQEGILRFLSPGWLGDAKVVLTTYETLRDLEFSLAAQKWSIMVCDEAQKIKNPNALVTRAAKKQNVRFKIPCTGTPVENTLADLWSLFDFIQPGLLGALNEFGTRYRRPIEAETDEEKERVQELRALVEPQLLRRTKADVAKDLPKKIVVDSCKSLNISQHQRDLYSHAVRLYKQRFNGGDSPFKNHLGLIQYLRHLCTDPRPIGQRSNLTESFEDYSRKAPKIGWLMNALEEIKSRDEKAIVFVEFHDLQRLLQRFIAHRFDIVPDIINGTTSASSKSSDSRQKRIKAFQQDDGFGVIILSPLAVGFGVNIQGANHVIHYTRTWNPAKEDQATDRAYRIGQSKDVFVYYPVVTADFTTFDMKLDALLEWKRGLSNDMLNGCGDLSSGDFDELESPDGDGAFDDVLVDEDDIATFDGRFFEAFCAALWAKQGYTTYRTPDCGDGGIDVVAIKGSNGYLLQCKSSMNDGASLGWEAIKDVVAGEALYQKKHPKVAFSKVAATNQRFNSTANSQAQANGVTLFDRHDLVQLLRSFAVKRIELEKFLLT

SEQ ID NO: 4420 - protein, 666 aa, Thauera sp. SWB20
MLKEFLASLHPSLAVLDGVPMWVFAIVVVLTAVVLLGYLLKGGQVGWQLWMSVRRIGALTRTGSGPVKPEDVAKVLRWKPASHLWDEYSDTLHELKRASNGELSVTEIRATVPAETYFTRDVLVDSRLLDDFSRHVPGVLTGLGIIGTFAGLLDGLASFNPSSPEAAVAGLKPLMNGVEHAFIASATAIGCAMLVLFAGRLMLAWLYRLVEKLVHGIDALYATGAGEEYLSRLVHASEKNEAHAAQLKEALVEDLSKLMTNLTERQIQAQSSASQLLGEHIGNTISNSLAEPLQKMTESMTVTSRGNSEAVSGMLETMLAGFMAKLEDTFGGQMRGINEQMSQSMAAMASVQASLKELVEDIGRTNKTASEEMSNKLADAMKDATANQNLLTEQMRQFVTEFRGLVNDEQEKARAAMDASVQEVLSKVASAVEHLEAVRTAAAADEQRRGERLVQESTSLIEGLSGNVDNLLQTVSEQVLQTQRNIDELAKVSMTAISGMNQGASQMETAAERFKQAGSAVTGVLEHSAHVSQQMSSTASTLQSAAAVAKQGLDQYEQTRRAVDGYVATLAGLLENAKQEAGLTKEMLRDLERIVQELRKAEEQSKEYFQHLNGALEGAFRTFGSELTTQVKDTIATTDRHLSNGVGQLTGVVQALQMALARLKKA

SEQ ID NO: 4421 - protein, 235 aa, Thauera sp. SWB20
MFARIVFKKNGKQDGESPFWISFSDLMTALMTLFLVVMAVTLVSVTQGISAELKRKVQRENDIRSVMAMIREESKAFPAVKFDDSTYRIDIGEVVRFESGRFDIKPEAATFIRRYIPVVLNAQSSDLGRRWIRRIVVEGFTDQDGTYLYNLGLSLNRSRSVVCALFAPPGQSEPPLTDIQKRQIRDLFLVGGYSFNSIRANKEESRRVELKLEFWALDEEPIENKGLDEKEFGQC

SEQ ID NO: 4422 - protein, 595 aa, Thauera sp. SWB20
MLMGPVEDLKRKLSLAIESSGVRDGAFGQPQLVEAASQEAERVFQGIAKSRPSKEDAYAAALAFMRGHRLEEWQFDLLASAVCTPIREQRGATLLGHERFGELLAWYERECAAGELWWLTWYGLLGSYFEFRMESATEAERTGWKTLRALLQKTWPKIDRQFAQGPVPDWAKVLRGEPQLLTEKAADNYGFAYLEGDQEGLEHLKRDLGIPAHSWFYHLLILAAVRAATTCPDGTFKKHLPQLMSLIDRQPAFRDEAIELILSRYFKCSDRSVHPQLRDYVVRKDVWRNPKLKSVGLATAWNRVPDAVWKMVLGWVNEGNLRDFFDILAAKNKANQDRLAFWSQYLEQISWTRLVFGNATLQLAQKNPSVRQLIAREEGAYALLTGTKDVDAFMMQIGDFIAVEFTKTGHAAYVYAVNALPFDQFSRDYTGGTDDLRAGFKSLPAARITHHAGWEDSARSDLARLGIHPDKRGGSTYGTRSHQAETAAGSNRPGTRTERTPATGSPRDQFLSGGAPRPPSTKPVARAPLGANFTMTTLQECLSGYDGARIDDKRGVNGGRLWVQDPKHQYELSKKLVGFGFKWSEKRQAWYHPEA

SEQ ID NO: 4423 - protein, 1285 aa, Thauera sp. SWB20
MGLFDFFKRGKASAAPRLLPTWREEGVLFAFAERPAELDVEGVLNHFDGASTEESLLGAYLSQLVMDGDATLGDDGLFISWGTVFELLKSSEHSGAVDYLGLPAIGSLKPILTHDSSLSNPDFEVRIDGWVDAQGTVRVDRRVGAVAQANGQEVLLGEYAWRLADELSRFSARSRDFRTQHENELGWGRLRALAHEAGAFYASPYLETTIVLTPQSLRLPLSKVETQFGRVVTVAPTFEGAPDDWLKTFDGYESVQNHYDLTQGGRGRVRVVISEPVRRVLEVIKRDMPGRKVAGARAEKFVHNPWAFLGDTAREVIKEEEFEQDKAGAGALSAVFSVVPRLTDGRIERVDLVVTETFSGGMASTDTKTFKGPDELAQFVATLETALMSEREWFPWDEYDLTIDAESSLQVEQARQVLCLWRNQPAERISLEDIYEMSVYSERIEGIGEAKAIYVPVFQKPSAEDDSGWLPTDLTPMVRVTLQGHEGQVLIPLTKEWVTAFAEKVEAAAAEGHREVSDPLLPAAVELKQAKLLADSFLAMLGAKDKVRGDQPGKPTEKREKKETLLVKTNFHAVDYAEEKRLALELPPGTQPILPSTLRPELELKKHQLYGVAWFQHLWSKTPVACRGALLADDMGLGKTLQLLTLLGWYYEKSPDAAPSLILAPKSLMENWENESKKFFNPSYPEVLVLYGDVLAERKQPLGLIDEALHQRGVTDLLRPGWVGSAKILVTTYEVLTNYEFSFARQQFSFVICDEAQRIKTPGTQVTLAAKKLKAHFRIACTGTPVENSLADLWCLFDFVQPGLLGALEDFGKTYRRPIECETEEQRSALERLKALIAPQILRRTKADIADLLPKKLYAHGNVQRGIEFKERLAVDERLEVPASEHQRVLYKGGLKKMQDASSEQDSRKRARLSFGALHLMKAVCAEPYCLPGTKFLPEKRGLEAHLSNSPKLRWLLDQLEQVKVQGEKAIIFTELREIQSALYYFLRERFGIMPFIINGDSQGRQRYIDKFSGSPGFDVIILSTLAAGAGLNITAANHVFHFTRAWNPAKENQATDRAYRIGQQKDVSVYCPTLVADDFISFEVRLDELLKRKAGLADVTIDGDLMTSMLNGTGGDVPITEFVASGGKGTELPRKILTIDDVDRMDGFGFEVLVSMLWAKQGFQAFVTPKKGGDGGIDVVALKGRVGELIQCKSSVKADVGWDAVKEVFAGAAKYRAMYAGTKLSTVAVTNQRFTSGAVSQAEANRVRLVQRSELEELLASHPVVNLDFDAEVFEWAPKAGVAA

SEQ ID NO: 4424 - protein, 583 aa, Fusobacterium hwasookii ChDC F174
MKNEKKFIYFLFAITCILSLGGQFYLMDFKIFQLFNFFNINVVFFWLIFGIFIYFTLFNKKIKNQERTIKELDDINIFFEAENLADKNITEKEILKIKNEFFYKEDDIEKYPLLSKVWKEYSSTMLKTDRDNYYQIIDAEDLFNENSLVKEKMNMKILNYIPQLFVGLGIFGTFLGLSLGLSQINLKDTGDLGQISNLIEGVQTSFYTSLYGMFFSISITLLFNNYMSQIEKRIFILRNKLNNLFFLNNGGELIQDMRTELKEIRAYNSDMASQITNGINKELVQMTSVLDNKISGFTNGITGTFQQTMSENLEKIFSEDFIKNFANIKDELLETSRENNKFIADYKNEMKEIVTTTKSLKDEFLVFADEINQKYNDTNENLKENFEKISIVLNDIKEIHSSINEFTENVQFIATENKQIISDFKDVSINLKEFSKGQDTILELWEGYKDSFAGFEDSINSNFENYQSILEDVSDKYGNTIDKLTTEYVKTMNMGMEDVFRGYDNHLTEIIEKFQGVLRNFKENLELSDENLKVNVELLQENLENQSILGELNKDISEKNRILLEKIQKTQQHLEFLEKKGDQ

SEQ ID NO: 4425 - protein, 232 aa, Fusobacterium hwasookii ChDC F174
MFFINKKKKEIQIEETNYWLSIGDLMASILMIFMLLFIVKTIEAGQELRKKEEIIEGFTGLKKNIISKIQKDFEERGIKVDLDPQTGTIKIDDKILFNTGEYLLKPEGKKYLNEFVPIYINLLLNDEQVKKELSQIIIEGHTDDVGSYIYNMELSQKRAFEVIKYIYDEMPNFKGKEELKSYITANGRSNIKVLRDESGNIDRDKSRRVEFQFKLKEDETLMKIEKTLKEGN

SEQ ID NO: 4426 - protein, 402 aa, Fusobacterium hwasookii ChDC F174
MNEINFKKFYPVNLEKKKDEINNFWNQIFKVVRDEKIFELIERVLKKKNLKVDEIIILLFNIKKVHDYLIHKNVELADFIMNIKFDLSEKKVKRKECMMDIYQAIVSYFNENDVELALNLFVDENINFEKEDESEIIQVYQEYSKSKKDYTLFLYDETVKAIKNNKLKDTLDRLFISEEREVFLNIMNKVLFDIVYFVKLEKDYINKILADFFDRVTHEVRIESFKKVLNYYVEEYEKTDDISVCSRAIMEKIHEYLKDPHKNSPKWQWGDFTEAQIEIMRIWLVSADLEKYFSIEVKDKIRLKFWKRYIKYIKEVRYFERLKQAIVMLTDEHIFIEFGEKGNAAYCHRKDYISFNEINRLSTNSKLKDRDEAVFFIPHSGNWEIKLKTRLYELGYCVKIWR

SEQ ID NO: 4427 - protein, 1163 aa, Fusobacterium hwasookii ChDC F174
MGIIERLFKKIKETDKKLKLSLEYEEKYIKIILKVADKIVSLKDLKDEVDISSLSKSDIFEIDENGDTLLLDYDEIYSLDRSTLKLLKLPNFFPGVVYIDNKGYFGSSKVEFHYKISFGLDEYHIVNANYVESISSSERYILTKEQYDLIKLINQYNNDDSKNKEANEQYRMLNAIKDVSHKTNLLLNETIKKEDDLVLLENIELDFLESDEDYLEVVPQSSQLSKEQNESLKKAFKNANLSQNFYLLNIDNKKVKVVVNRELKDALKVVKNNEKISKKDFVKRESPIFDDIDSEKVEFNYGPRVIGLGYLNYRPSPTPNISEIDWFSKEFPKIMTDTAITLKPEHLGYMQGKFNDLDEFEETELKFDVEGEEKKFFISKENLANEIKKLETSIKDITDYNKSKALDEIIELAEAYNYKPDYIEYKGNYIKKFDKNVAEQYRDDLREIEIEKREEKKNSKKEKEKVLLTEDNLNEEGYAEGTEQITQKEEVELPKSLRYSEGIDLKEHQKEGLLRMQSLYKKSNVNGLLLCDDMGLGKTIQILSFLAWLKEKDALKPSLLIMPTSLITNWYDEKNIGEIQKFFLDGTFKVKILDGKKTRDEIFELRNYDLVLTSYESLRINHKETGYIEWKVVVCDEAQKMKNPKTLLTRAIESQNALFKIACSATPIENSVLDLWCLTDFVKPGLLGSQKDFSQKYMKPLSSNDINDEKRQEINNELSDKLGDFYIRREKEKVLTSDFPKKIVIYDKIRPSSQQEDIIEKLKNTGKAALAIIQGMIMTCSHPQLVDRDIEEVPLGSEESLIEEAYKLGHIHTILKEIKMKEEKAIIFTKYKKMQKILWNVIKYWFGIEVGIVNGDADKTSRRRILDDFRKKEGFNAIILSPEAAGVGLNIVEANHVIHYTRHWNPAKEEQATDRAYRIGQKKDVYVYYPIISNVENIEREEYRTVDEWIRKQLEIDMTDSSPEEKLNRIIVKKKRMLKDFFLTCGGEFDDDMAKEFAAMSSGVEKDLSIEMIDNIPYQEFEKLAVVLLEKEFNSKYGLVTVESGDKGIDGLIFSENGNILIQAKHTKRLDSNAARDLFFGEKFYSEALNKSFPKLIVFTSASKNNISEDIKKLEVKGEIEIYYREKITELLNKYPTKITELIDRDIRYSIENIKSYIKTMCI

SEQ ID NO: 4428 - protein, 737 aa, Aeromonas sp. L_1B5_3
MNFTLLFDWLKHLEPSSVPTIVFCLVVLFSAFFCVFYLGPSFLVANKLKQASKGLEIQHELPASEKLEQATAMFAEPKYRAMNHAWKEYADTLHRQSELVEGESRLVAVRATSLSATFFSVPSIVETPLRTEVFKHLPGVLTGLGIVGTFLGLMSGLMSGLMHFDVSDPAKVTESVSRLLNDVLFAFVGSSIAIFASIVVTGLEKWRWGRCLQLLEKLTESIDELFKGGVGEEYLADLVKASNESAVNARQLKDSLVSDLRTMMQNLVDTQVQENLKLANTLSTSYQEVGTSLATQIGRSIEDSLKDPLEKIAGSVKQASGDQSGQVQHLLTDVLSAFMSKLDASFGQQFSGLHEMLGQSVTAMQSMQQGFVALVDDMRRAGESSSQQSATVIAQLLTDMQAGQASMQNGMNEMLSKMQAAVERMGSSGEDASERIAHQLERLFAESEARQQQIAEHLNSFIEQSQRSIGQGQEEVMTNMSTNLTQLGSQLNQMFQTFNANQEGMDAQHRLAQADIRNTTETVIGGLDKQLRETLQLVEQQRKEAQEVIDLLGLQTREHLQQMAQGADKMRLAADRFDTAGSSVVQAGETTAKVLGSVQQVGGELAVASRELTTIIGEYRNHRESAAKVLATIESVVAGAQSEQSQRAQLINDLRQHGERMRDLNREATEYLDQIGNALAKGFNEFADGLNRNLVKTMGSLDSELDKAVKGLASGIVDMKEGIEDLSELFESIKVRR

SEQ ID NO: 4429 - protein, 247 aa, Aeromonas sp. L_1B5_3
MFGMKGAPASRRNDEAEKPFWISYADLMTAMMVLFLVVMVASLASVTQRIREVEAGEKQRGQDIARICQSLEILARKKSNIIKVDCRDNRISFGEAGRFGHNQYFLDPQGQQALQDVVPLILDVTDSPEGQRWMKQVVVEGFTDTDGSYLYNLHLSLQRSEWVMCALLDGRSQLQQSLSAEHQQQIRSLFLAGGVSFNNAKDSKEASRRVELRMQFYGLKEDKQQAAESAPQFSGLMTAERCQLEMR

SEQ ID NO: 4430 - protein, 586 aa, Aeromonas sp. L_1B5_3
MVDAISRLTAILESSVERVNGRYQERTLHSFSALKRARSEVEARFDQAEAAPEPPKEKRHAALAAFLRNEPLTRRQWRLVYAGLVDCVEAGKQLLDDEKVFPRVSRHVSAHIDSRELVRRDWTALCFSYFGYEAIEPEKSQNWQQLRTYIRDGYRVLRNPEKLKAWMRVVDEHQELFQSEAGLRLGQQVFEGTVTDLTQLQTLAQIPAESWLWHQVIAVVQKKIAELDEATFLDRLSELLALMAINNRRYSDEIMAACLTRYHGCSCHVQPQANLIQAGLEIWGNPQLKSDQNRWRHHVDKPVCDMVGAWLAKQDLQHFFSLLKGEGEVDQARLFYWLRFADQMSYTRIVMGRDAQLNRDGEFVRFRDQNKGRLGDLSGGSPADNAVIMQIGDYIFVEFSHTGNACYVYRANSCGFNPDASTLHLTHDLKQKNLAKGRWIHVPKPLKPDAMEGWQQKYDDELRLLGIVPNPQGANQLWNRVVKPKIVKPSVPSFQAPLGNNSESKSQVVNTPADRTVVIHSGGKGKVDFALLLEQLGENLRHYTDHREKGGAFHIEIKQRNTDDILLLRRNGFVVKTGSPFMFWKK

SEQ ID NO: 4431 - protein, 1078 aa, Aeromonas sp. L_1B5_3
MLGRWFSKFGKNKHDPVDLSPCWQADERGIVFAERIQSEPERWALVAYLEQLAEEEYVAVLSDRWLLTWRDMYRLMADADHESSLALLSLPHCTDLRPKLECRGSLVDPQFTVAITHWSDEVTGEHVELKRQGALVTTKKGQRLLNEASWQLCESLRDLARCQRDEPGEATNYEGWAVIRSVAKAANADMDGFLAKTVVVKPQRLALRPRKAEIDSCPVIEVGVDFPEQPVGFLSSFDATQRVQDRYRITQPDGTIAHVLIEPEIKQVLEAIKAIPGRRVAGDSALSLLRNPYALLGEVTSVVLDPEQHEQSLVDAGIYFHHFRLEPKCEAESGKIATVLLHLSPISREPLPDETLSFNSPGIFAPFVQELRFKLAAGMSAGFWQGFELELGDFDEQQLLDIEKLLDRWQREVSGELFDSLFELSRYGDRIIGLGEVVPVSSPFLTRTTGQDWLSSESNGIEESVGDVVAQINFDDAAALDELSKRIDEAFAEGAGHLCLPGSEQPVPLRLAEQIQKEWRKQIRSEEPTVQESMRKNSIGLLVEENIDEVGYAKWRQDAIQQARLSSPSLPERLKPEISLREHQLHGVAWLQHLFELSPEHVSGCLLADDMGLGKTIQLLTFVVDYLERQPSGDPVLIVAPVSLLDNWEAELRKFFYADDIAVMRLYGDALSEAKFRSYEIPESLRQQGVTNLLRPGWLQEARIVLTTYETLRSQEISLGRQSWAMVICDEAQKIKNPAAMVTRAIKAMKSRFRIACTGTPVENTLIDLWSLFDFVQPGLLGALNQFGREYQKPIEEGECKDLEALARLRSLIEPQTLRRTKQDVAKDLPSKIEDRTCRNLTMVSRQRSLYNQQIGEYRQRQLVQEAAGSKESFILPVLHKLKLVCAHPYCVEPDLWLREHSPKMRWLLEQLDNIRCSGDKVIIFTELRDVQREVQHAVKVRFDISPTIINGDTSTSSDSLNSRQRLIDRFQAVSGFNVIILSTVAVGFGVNVQGANHVIHFTRCWNPAKEDQATDRAYRIGQTKDVFVYYPTIRDADIQTFEATLDDLLDQRRSLASDMLQGKNDLQLSEFDGVLNK

SEQ ID NO: 4432 - protein, 730 aa, Pseudomonas sp. DSM 28142
MDFSTLLHLWGAASSEQLIAPITVVGFVFILCAWYFVRYFCPSFKLSSQLKKLTKRVHGVKALAPSQRRSELEQLFNGSKLEHSWHEYAETLHDQFEFQEGEQVLVRSRATAGAAHFFSPQSVVDTPLGTEFYKHLPGILTGIGIVGTFFGLMLGLQHFDPSTPEQVNASVDKLLKDVLFAFIGSFISIMASIAVTITEKWRLGQCYRLLETFNETIDGLFDSGVGEEYLAELVRSSAESSVQTRQLKDSLVTDLREMLQNLVDTQVRESLKLADTLSTTYRDSGQLLADQVSSAIENSLKSPLEAIAGAVQAASGDQSGQVQNLLQDVLVAFMNKLEGTFGQQFNGLHELMGQSVAAMQSMQQGFSTLIQDMRSASESSTQNSSTMIAQLLSDMQAGQNAMQAGMNEMLANLQASVARIGNEGEGAGARMAEQLEKMFAQSEARQQAMAENLQAFVESIKQNIGQGQQETMAKIAGSVEVLGEQLSAVFKQLEHGQQQMDQTTRAAQADLHQGTRDLVGGLDEQVKALLQTVSEQQKSAQDTVKALSAQTEQHLQSMQLGADKMRAAAERFETAGQSVARASESTAGLMGTVQGAGTELAQASRELNTVVADYRNNREALAKTLAVIEGVVASAQGEASGRSQYLQDLKVQSERMQALNREVYEYLENISGVLGNGFKEFGDGMDRTLRQTLGSLDAELDKAVKSLAGGVEGVKESLEDFGDIMEKIRQ

SEQ ID NO: 4433 - protein, 247 aa, Pseudomonas sp. DSM 28142
MFGKQMPSAARSKDEGEKPFWISFADLMTAMMILFLVVMVAALSSVTQRINQAEQGEKQRNKDISQICEHLSLKAKTASKTIVVDCKDNRISFGDAGRFGHNQYALSNDGQSALQEVVPMIMDAANSEEGRKWFKQVVIEGSTDTDGSYLYNLHLSLQRSEWVMCSLLDSRSPLQVGLSPEHQQQIRSMFLAGGVSFNNAKDTKEESRRVELRMQFFGLKEKEENLKPDVPVFNNTDMEKCQLAMNR

SEQ ID NO: 4434 - protein, 542 aa, Pseudomonas sp. DSM 28142
MTSPIARLSAAINLSLSTHRAGPAPEPLARFPRLGAAGIDLYERFERAEKALPPPQEKRRAAISKFRNVLPLNASEWRLVFAGLSDKSERVGPILDDDQLYARVHKEIHHRIEKRKLSRRDWLALCFSYFGYEAATPDKNANWCLLREDVQLGFECVKGQQKREKEWVQIVQQHQELFSEQAGARLGNQMFKGEISDLSALQTIAQIPDNSWLWRRIFSVLISRIFMLDDAEFSQRLADLVDIGRQHPRYMNDILSACLSRYHLAAYREKPSSLLKQVALDNWGSPQIRSRQNSWLQYVEKDVCAMVVAWFAKEDLEHFFNLLKGDSEVDQSRLHYWLRFANQMSYTRIVMGADAWNDRGRDFVHFREKNKGRLSKLVGGPGHNNAVVMQIGNYFFVEFSGTGNACYVYKADDSPFNPDKSQLELTAELKQANRALDRMRHSPAPSRPNRIEGWLSKFDDSLGKLGIRAQSQAGTPGSSKPMAFEDQVRDALKSVKHKVYDQRARGGAFQVQLDDNDQAAVAALQRLGFKPVNHQPLRFWRQ

SEQ ID NO: 4435 - protein, 1082 aa, Pseudomonas sp. DSM 28142
MLKRLLKGIGRQPNSAVENTEPVFSIEEQGICYPLSLAENAQSWPLASYLDQLEEEEFVSQLSDRWLLTWDELYRLLDEPEHLTSLPLLGLPPETALIPQLSSQGSLASDDFKVAVSGWRDPQSNANVQVQRTGAIVQRHGIMEILPESSWKLTGAVRQLYLAQQNEPGEVTNQIGWASIRKLARKAGAGMDGFLDKTVVIKPESLRLNPRKSTVGNTPVIELEPSFEGQPANWLVSFDGANQVQDRYRVIGDDGSLTHVLIEPEVKSVLDYVRSLPGRRVAGDEALSFVRNPYSALGDSAAQVLDAGTYEDDLTEAGIFFHRFHLEPKLDEAGQRIEQVNLTLEPISPTPQPPIEVEFSAAYELAPFVHELQLKLAAGMPAGFWQGYELELSDFDLRQLAGINDLLKRWQNEAAGIEFDSVLDLSLYGDRVTGIGEAEKITSPFLVKEATENWLPKDVAALGIDAEILGRWDPSDRAQFEAFEQRLDEARAAGDETVCLPESETPLSIAAAEQLFAAWSKKISPVETSLVQPQEKVGRAVLQIGHNIDEPTYVQIRQAALRAALDATPELPSLLKPEVVLREHQLQGVAWLQHLFRLSPSDVSGCLLADDMGLGKTIQLLTFLVWYLEKYPQDKPTLIVAPVSLLDNWERELHRFFFADALPVLKLYGSALSAVKFKKEEIPADLKAKGIKNLLRPGWMGGARIVLTTYETLRDQEFSLARQQWSIVVCDEAQKLKNPAALVTQAIKAIPAQFRVACTGTPVENTLIDLWCLFDFIQPGFLGGLNQFGREYQRPIEAALERDTVALERLRGLIDPQTLRRTKQDIAKDLPAKIEDTACRSLSMHVLQRNLYLSEISAYSQKQQIEEQLDQKTSGMLGLLHKLKLICAHPYSVQPDKRLRDNSPKLQWLMQTLESIKRAGNGDKVIVFTELRDIQRELQHSIQEHFGFRATVINGDTSTSSQSANSRQKLIDQFQEQSGFAVIILSTIAVGFGVNVQAANHVIHFTRCWNPAKEDQATDRAYRIGQEKDVYVYYPTVRDAAMPTFEATLDELLSKRRALARDMLSGASDIQVSDFEALLKAR

SEQ ID NO: 4436 - protein, 772 aa, Geminocystis sp. NIES-3708
MIENNDIKKYQTKDSQLISKVIDFLENEKKQNTKIINLKDCNKDIKEWIFKHLKGNNEGSIFTPKLENNYYILSSYPSLLSNSVPRSPVYYAPTLLTALGILGTFLGIFLGLQEIGISGINNTQSLLDSSTKLLEGMKTAFSTSLAGMSGAIFMMGYLAKGAKSRQKIRNDLRLKLSKIAFLESPQKLLSRLDNSSMEDVAQNLEIAANNLSSLGDLTPENIALAIQKAIISDESILIKQLQLQTQSLDGLSNLTPENIASTIQKVIALEKSVIFAELQKQNDYLQHLTPANIQQVVRDAIAIEKVAIVEELQAQNRYLQNLTPVTIANVIQPLVKPIQEELTALKQIQIEQESTIQSLIKQLRNELIEPVVQRLDQSAKLTEEASLAVRELKDELGGIAESLSGAVKTIQEFQRDTLIKLQEFAQSLQQILNQFSGDTKDVLQQVAEEINNAVAESITGMEAQRKAFEESANSAANTFRGIREDLQEALTTQATQQKEMLEGVKNSTESILEKTTIAFTQQTETIKNVGEEASQLMSQAKENLLETLKNIDTILDQTRITLQEELERFRLEYQVSLTEFFTQQNNLLEETLGKQKEGLAEVVNNLQTTFKEEAEMRKELSHEVNQSLGKIQETVKIVNNLVNVVGMNSSERFAQLQELAYTIGNEAQKVENSYQKMNEKVNNNVEVMTNKFEETITKIVEEFNQLSTNTNTQINNYLTNASNSYNESFNDADKAMANICSKLSYTSHGLMNVAEYLVASVNDLKQNNLSNN

SEQ ID NO: 4437 - protein, 222 aa, Geminocystis sp. NIES-3708
MSEFLEYETEEELLEEQDSGVWLSVGDLMSGLLMFFALLFIAVSAQLVEYDNIIKKIPLAIIQKTKEIPGIGDSIKVDPNGDLSLDDKILFDEGKAILKPQGKRFLKDFIPLYADTIFSDERFDNQVSRIIIEGHTSLKGSQKDNMELSFQRALAVTEYIDTINFSNQDKFRKKLLAAGRGNIDANKAFDDPKDRKVMFRFQFKREDLGQVFKNKVKDKNNN

SEQ ID NO: 4438 - protein, 503 aa, Geminocystis sp. NIES-3708
MAFFTAKFQPLEFQKPEPKELFKLGYGIQGEIIIPPPLPNGIEFDKNKKVRNIDQIINEIENNNLENISLLEWVYCLFSKHSWDIENPNKSLPTSQKIWKFTKESDALKLRLFWRLVLYTFNPNEKILPFSLADTCPSFEPQTEFDKSLIKILNLLIKNAYKELAEICLNKLIQPDKLLTQYSLPYKINIDDNLTLVEAIQLSFPLALKTIQNINEKQINFLIETLNILSPYPQLKTVENLLNNISADVGGKYPKLVNWLKNNYGLTGNNSRWNQLSIEAKKALKQWIGAVNYRDFEKLVDLIINRLNLEDWEIRQLRNRKVFWSNYTDRFDRIRILLPASSIQIVGNNINQEDITSLIYDGSEATEVCIFDFDKWFIVEFFRGKGSETRIFPKSNELENLFFNSDDISLKQLRSLSIARNNVHDHRYCWQSDCETLLRSKNILPNQGTRYFKIVERQPGFPYNFNSGMPPLKQSQINDRNRQLIDWKRDIQQLEAEAKNKIF

SEQ ID NO: 4439 - protein, 698 aa, Pseudomonas sp. BICA1-14
ASNVGMLWREFDESLVQSSDQQKLFNTLDAEHFFNARTLASGLTASRLLAAAPSFLVAVGVLGTFVGLTVGLEGLVGTSDEIEALKGGINKLISGAAVAFMTSVWGVAFSLLLNIIEKMFERSALNDIQRLQHDIDFLYPRIPAEQSLVHIAEYGKESKEALQELHERIGDRLQETLNGMNEAMQTALTDALNNIMAPAIQTLVSTTSQQSTQVLETLVGSFMDGMTSVGREQGSQMQQAAADVNAAVSGMSERLNQLFTSLSEQQGRQMEVAQQQSSQFEAQLQRIAGSADQRQEQLEQRFSELMAGLSSQLQGQLGSAQRRDEERQAMFERLLSESSANQAALLEKFSSSTQDQMRVMAEAGNERHNNLEKVFSRLMMNLNTQLDTQMGAAEQREQARAQRHEEQQAAALAQQQQLIGNLGQTSQQQIGAIAEAAAMQQRNLEETVSKLLGSFNEQVSGYGVQAEQREQSRQQRFNEQLENMAAQQQELLAGIASAVQVTQQQSRQMAEQHQQLMTRLQQATEAAATSSKHMDSSANQLGLLSANLRQAADALGQRLEAVTQSVEAASTQNAALAAQLQGQASSLSQLQAALLEGAQRFEQAASEARNGFGDMKQTQQEFLSGVRHEFTTLGETLRAQVEAIEKQAEEWLRSYASEVRMQTEDRMNKWNEVSLAYADQMHRNVQAVSGILDELEAR

SEQ ID NO: 4440 - protein, 254 aa, Pseudomonas sp. BICA1-14; identical to SEQ ID NO: 1278

SEQ ID NO: 4441 - protein, 752 aa, Pseudomonas sp. BICA1-14
MRLPPVEFPAVSWSAQMLERWTVLAKKAATMEASVGNNDVYERTCAELHRMAQTLRFDALPEMLKRRITARTLTSLWLKNEVIELLNARLLTTMLRAQQPRLTPMTLRQLAQLYFRRFDRLDEKEGVRELLERSLLQQLDLIPPSKIQTSRADPLVTLKREGHWLLGLDGPRHLAERVRQGGRELGETFMELGLHGFDDGRYGDICRAHFYLETLRHLPLGESDPVLDELLKPTVAKAPFEGTRRIGHVALEILIDRAGQEPGEVWQNFILNLAGDPRISSTNERFVRWWRPLGEERIQKVRGWLSKEDLRLFLQAVEQYGLETANTEMQRMFPARKRFLEGLFKLKLIRNTRLLLGGKAQQSVKRILGKDVKTSFARMDGQMTDKAVIYLDCGDFHLVEGSHSFKIWVYLAAPGEALRTYERNTFSHYDLTTTVPGTYKKLYPGLPYDAFVHTPHAWQNKVFTFLAENGIALDVEQLLSAEDYRLQLRKFGIPAVSAKRTVVPAPAKEGAKAVTRAPTAAQQGTEHAAAPMSRNADVPTPARRSADVESVAANGAMRSSTIASGRDNPVPQRTKLPPFSSLQLAALRYLETHPRCGFYALLDAVSNQGGNVLNVKTMLESSLSQYVQQDGEGHWLLSTHGAQLVAELARSEPSDASQSVPSAANMNANENAGSRVARLEPFALAVLRYFAANPGDKVRYAANVLEVDARLVNQALYGPLKGICTQDDKYGWQLTGAAQRELETFDAQGEES

SEQ ID NO: 4442 - protein, 729 aa, Enterobacter sp. 42202; identical to SEQ ID NO: 1868

SEQ ID NO: 4443 - protein, 245 aa, Enterobacter sp. 42202; identical to SEQ ID NO: 1869

SEQ ID NO: 4444 - protein, 504 aa, Enterobacter sp. 42202
MRLAALRRFRLAEELTEREWRMVFYGLADTDPLYPDRPVLLEDDTLFPRVDSAIQKQIQSRTLKRKDWAALCSSYFAYKHESPEINPHWCVLRGHIAHGYSVVKAAIRREKPWMKTIEFYHDIFTPQAGGVISQQLLSGESNSLSSLEKIAQIPDSSWLWKRIFTVLLAQLDTLDDPQYLDKISWLLSLAAQWVRFRDDIITATLTRYYHSTYRDQAHSALKQAALEYWDNPQLKSQQNKWHQYVSEPVAAMVRGWLAKQDLMHFFELLRGNGDVDQARLHYWLRFANQMGFTRIVMGPDAWHDGSSDFVKFREENRGRLSHLRGGRSFDNAMIMQINDYIFVEFSGTGNAMYAYRVGQAPFNPESHSLDINIQLKDKYRNVLRLPHTPRAEGYNKTRITGWMLKYEDELRKLGIRWMAEEPVKFVDKKAPSPASVSDIKIINPLRDTAIQRLVENTSCIVSDNRQKGGVLSVQLKAPDDTTERELLRLGFAPVLKEPHRYWIK

SEQ ID NO: 4445 - protein, 1080 aa, Enterobacter sp. 42202; identical to SEQ ID NO: 1871

SEQ ID NO: 4446 - protein, 685 aa, Burkholderiaceae bacterium 26
MSVQAFLASAPTAVLVTGTVLAVLIGIFFVLFLAPALAHWNRLRAVQSRIARFETKDYPAEFKKAFAGDEQLTHLWKEYQESLHVQREERDGQMVVRAVRSTAPAELYFNSQVVVDSRLRTEFFKHLPGIFTGIGIIGTFSGLIEGLRAFQVSENAATVRTSLESLMHSVGEAFLISASAIFAAMVVTFIEKLLLASLYRRTEEIAHAIDACFESGAGEEYLSRLVKASEESASQSKILKDALVKELGELLRELTSAQIAAGQEQQTKVVDRLVQASQEQVEAARQDNVALGNTIAESIQQSLQGPLADIAATVKTASGDQSATATRMLQDVMVSFSQRLNDLFGGQISGLSELNQQTSRSVQEAVSTLQMLVANIEASSQRSADAMAERMADAIEKMEARQEAMNAQSAAFIEQIRQLVATSQSETNHKLQTTLETIGLQVTDMLATLNGSQKEVFESNRAREQSMADRATGAVTAMSESVDAVIKELGTATNQMAQSVATLTQVTSSTVEKMSLGAEQLGAASRNFATAGERVSSVMSQAAGVSAKLAETSGSLTSGAAAIQELLRDYRNQRDAIGQLVAELRATVEAARKEATLTSDILGRIEGSANRLGAAQKLADEYLEGVSRVLGEAHTSFATEVKRTLDKANTEFHTKLTSAVGLLHSAVSELEVTLASMGTLAPARV

SEQ ID NO: 4447 - protein, 235 aa, Burkholderiaceae bacterium 26
MGAKVVLKRGGRDEAEKPFWISFADMMTALMVLFLVVMGVALLAVTKNVTEREKREEQHRKDIELILDRFVKAAKRYDGIKVDRDRHVIDFGDRARFAFGKSNLTTEQEAVLRQFVPEILTLADDDLGKRVLKRVVVEGYTDKTGSYLSNLNLSLQRSQRVLCSMFATSGPSLLTSEQKESVRNLFLVGGYSFNAAKDTDEESRRVEMRIEFLGVGELRSEASKQSGNFGECALR

SEQ ID NO: 4448 - protein, 558 aa, Burkholderiaceae bacterium 26
MSALDHLASLLRPAVQEGAKTMTPSIGIDAVIAEMETRTKSRKGGLFAEDLQLEAVRRFWKSQEVKTFRDAYMLSWSLCLPYRPQGPCVMEDAPRLRLVLDGVDGWTTRPSAYRRCYQGLVKSYFTYDPLADGAVPAGRKNWGLLREYLHERSQLIKDRNINPEWVNTATDNKQLFGEQPCEPYVEALLRGDAAHIDRICEQLGVGKASWFLRELILAQVKGATRLDHPQFQALLPRLLQLLAANEVLRDRGMILVLDRYAQVPGTALHQGLRDHSVAWWGNPWLPSNQTRWGGVAPEARTMVADWLKLEFIETFFTKLAEDGLGDPRRMNFWKRYVKSIDHIEFALGSFARNSREPDFVALRKKMAGLVCELDASGANNAFIMTMGSVVAVEFSGLGNAFYGYDASGSVPFDTTQPLRLEVNGRNSLKHKTGNILRLRHQDGIHNWDNWEDMFEATLSQQFGIKPSTEASPTTRVLTQPSPVVHSSKDSAQSVATRASAQYSRSVLTKFAQEHGLEIDDKTPYGGNLWVRSATFVVIVHQALARWGFQYKPGKGWWK

SEQ ID NO: 4449 - protein, 1260 aa, Burkholderiaceae bacterium 26
MVEVGGNVLKLFKKTKAPNSISWQRQWSPVGVTLKAGTAASDGATIESPLLGGYLTQLVDDALAVELENGFLLGWDSMYAALEKPAYDALPDILQLPSFTDARPNLQSSHSLTDRDFSIALASWRGDDGVQFDGVLTGPLMVQGGQQALMRPEQWQLFKAVVAFSKRGEEERGDLAHRQAWGRIRKLALDAGAGLDDFLYRSVVLTPEKLQIGLRRSESVSDDHVVEIEPGFEGAPPDWLEAFDRAREVRDRYDIVTPEGIVQVLVTPKVRTVLQEIRRLPGRRVAGSRAQAFLLNPYATLGADAVDVIEESQFEQAREDAGLDYERFTPLLERDAAGYPVRVGLLIETAVASGPTSSETHWLSDAELSSFTGALSRALKLGNQLVAWSGYDLLVQGDAEQHLKDLTDALEQRLAPPALVSYAQVHDLSGYSARVESIGIEKPYYSPYIAKKKEDDGWFPENVLPMVVYQPQDGGEPIAVPTSKPAVEKLKKDVQAAEAKGESNINVPWLPRPISVEEAKKIVTTFEDVFAAVNSGKPFDPEKRPSRNDIGPKKQLVLRANIQALEYEEMRREALQSVPAEPRLPKSIRPEYMLLPHQRIGLAWLQHLFSLQTDYQVRGAVLADDMGLGKTFQLLALMAWLVEQDPNMAPILVVAPVSLLENWAEEAGKFFLPGTLPLLTAYGDSLSDLRVPRSQIEQRLQTEDGLVKFLRPNWVGSAKVVLTTYETLRDLEFSFAAQKWSLMVCDEAQRIKNPAAMVTRAAKKQNVAFKIACTGTPVENTLADMWCLFDYVQPGLLGALNEFGQRYRKPIEAKTDEERARVEELRLRIAPQILRRLKGQVDTGLPPKVVVEECRRLPLSSVQRNLYAKAVESFKKRADPKHTTPFKNHLGLLHYLRLICTDPRPHGLNIFKPEPVSQYREKAPKLDWLLSQLHGIKAKGEKVIVFCEFREIQRLLQHYIEAEFGLRPDIINGDTNASASHAASRQKRIRAFQDAPGFGVLVLSPVAVGFGVNIQAANHVVHYTRTWNPAKEDQATDRAYRINQKKPVYVYYPVVCADDFTTFDVKLDQLLTYKRGLADDMLNGAGDVMPGDFNLADVVPESEGKDIDERVTLDMALRMGWQHFECLAGALWSKRGYDCYRTPSTNDNGVDIVALAGDRGQLIQAKTSGTDGATLGWEAVKDVVTGEAFYRRRHPAVEFGKVCITNQFFNRQAHENAALNLVELLDQTHLTSLLEKHVVTMLEVERMLFTEWQQAEVAGQ

SEQ ID NO: 4450 - protein, 706 aa, Vibrio sp. S457-15
MTNSLNLSSLWPELSSLNVMPPQTPEQLSALFVVILWGVALFFLIWTVSAFARAWQRVAWLHKSLGEAEKSSPSGVRSDLISRAEKKKNSVGHLWLEFDETLLEVKGADDVVRLHNTFDADYFFNSSSLAGGSTENRMIAAVPGFLTALGVIGTFVGLQLGLSDLNIAGNVDVNEMKNGVAGVINGAKIAFMTSVWGVLLSVAFNFIEKILEQVIRKRIKSLQNRIDRMFPRLSAEYQLQSIANNSQQSRESLQGLAEKIGEKMQESLVQATQGIQQGLESSLEKIMAPAINKLVDETSDGNQKALESVLQSFMDGFGQQGEQQRVAMDSASQNVNKTLESMSTSMAAFVNKLEVQQNASSEREKELISTISVQVSELVTQGNEQKRVLTGFVEKQVSELGEQLTKRESAASEREQKLASSMESTIKDLVENVSAQSQVLTDFVQNQVGQLTQTFSERDGMASQMEKERNDIFVNQTQAMKAGTDELLAQVKAATESQQITSNNIIEQGKQLQNSIDSSVSASARATESMQQSASELRVAADSMNVFGSNIKEAGNKLSGAVTEAVNSTKDLAEQNQLGAVKIQALREQLLEDTSKFSAITDQINNMLISAEQSFSTLRTTQNEFLAEQKGNLNELTSEMKRNVKELTEQMAQLLEDYAEQANGQTAEHLKVWANSSTQYAESMNTAVRAISSVVDEIQDKVSQHA

SEQ ID NO: 4451 - protein, 244 aa, Vibrio sp. S457-15; identical to SEQ ID NO: 3894

SEQ ID NO: 4452 - protein, 483 aa, Vibrio sp. S457-15
MSLNIKKLKVSLPANPFGQAIKDFAHLSNQLEVLSKSAGIENNKFRTAYGEVCNALASKKRVEDVIDSSVHVRALALSLHTDAKKNVSFTRRLLNKITEIVKKPSSLVIESFYQHFLSEYDRLADLEATADWLLEAKRLRGNDEQFDENILSTNGPKWLAERAIQNNVDFDHLLAEMKLKRYANGRYLTAAKGIYYIEQLNTIPLGQDHPLLEEVQKTAVFDSRYDSESLLGHQILRILIGRSIGSHISEPWMNVILAIGGDPRVPSSNPRYIKWWKGLEPILIQAVRGWLSKLDLKLFLEALEDYSYSSANYELQRMYPSRKCFLEGMFDAGVISNTRLYLSQDAARYLKRNYDPKHLPNFSTVKDGDKSIIYVQMNGAHMVEGSHSCYLWLYKHLDSSVCVFNYDIVRPTYSQLTSGINNQMTRLSSGAVAKITHSPIGYSWQRKALTALRGLGIKLTPKDVLSNEDYIDFKQRYGVREWS

SEQ ID NO: 4453 - protein, 1149 aa, Vibrio sp. S457-15
MELTSLISKFFSGLDKTSQFELVCDDSLDFTTSKKTLEKIKAGKADEWITAQYVALRMLEEQGDVSSFPDGFIMPADTAVRLDSDLRILFGFPSVWQGTIDADIQGKASTPTFKVDLSVTTKQGRTTLNYTVDGPFIRFSQNEQYLLTPEQFMAFNAHKAHGNSARSEYDNLLYLHSLQEAQKSGCKLNLKHFEKLRILTPNKITVEAELNSQGELILTPNMGQSASHESIQKVLGQLQSDNAVTLKVGDEIVLFSEEKLMAVKEVISNRVIPQQQVKAFLENPTAYIDASLVDLDLGFSIRVHGATVFKHAYFGETDESGIDWFGASSSSDVINPISKLADRIRDKTTLEDVTKKIEDAQQTGATVLDYEGKSYDISEPVAVEKVLKEIGHKISNPDTDLSSHGEEEDAETESESAEIHVVDIDLNDEELSENSPKVEQLISDISWDGELNWENHKRTPFPHQDIGVRWILGVEQKTLSDSKISGALLADDMGLGKTFMALSAIEHIYQRQKISGETKKPALIVAPLSLLENWQDEVDKTFKHLPFKDVVILQSAAELNDYRMGGVEIRSQSTSDDCLEPKYSLKVGKHFGPGRLDLPERLVITTYQTLRDYQFSMCLIDWGIVVFDEAQNVKNPNALQTRAAKGLKADFKLVATGTPVENSLADFWCLMDTACPGHLGSYQEFRARYISPILKAAGDEVEEIRARLGRELRIAVGALMLRRVKEDNLKGLPIKHMYAGGDFENWKYLEELKSIMVGYQRDVYEGTISNQLENKESHALTTLMRLRDSSLHPRLSDGGRLDIPKNAKSARALYGESGKLVSLLETLDRVRSKHEKCIIFAVNKRLQSFLSVTLGQIYNLGPLSVINGDAKAVAKRKSAPTRKSMISDFEAKEGFNLIVMSPVAAGVGLTVVGANHVVHLERHWNPAKEAQATDRVYRIGQEKDVHIYIPLLHHPEFESFDVNLHRLLTQKTLLKDAVVTPEDVVPQPAGVGGVVSGDLIDKRITAAELDKLSWQQFEALCVELLAKITDSESAWLTNSGADHGADGVLLSNRGNILVQAKFTQRQYDGYKGIQEIHSAKPIYEAAMRSSFERLIFVTNSPSLAKRTHEIAATCGVEILGRTQLLTYLEEYEITLKEILSRLGKERLKV

SEQ ID NO: 4454 - protein, 706 aa, Vibrio sp. S512-13; identical to SEQ ID NO: 4450

SEQ ID NO: 4455 - protein, 244 aa, Vibrio sp. S512-13; identical to SEQ ID NO: 3894

SEQ ID NO: 4456 - protein, 483 aa, Vibrio sp. S512-13; identical to SEQ ID NO: 4452

SEQ ID NO: 4457 - protein, 1149 aa, Vibrio sp. S512-13; identical to SEQ ID NO: 4453

SEQ ID NO: 4458 - protein, 720 aa, Hoeflea sp. IMCC20628
MKVLSWVFGHPWIRVILFWTLFALTMVGLDLVSTRLDLGLIFERFGLGGDLLGGQFTDDAAAKEALNQLSQLDFIFSLAYAIGAVALSFAICFLLLHVLPIFFALRHHRRKIDQLAGLEAFAAEYDQSIYENFKQSRLIGHAWREFDETLVKPVAGERPVIRNTVRPQSFLNTGMAREKFIGLKMIAGIPGYFVALGLLLTFTGIVLALYKAGEASAGEDVKAMQDAMTELLQIASFKFATSIAGLGASLVLSIVFKTYIICIEASFSSFCEALELRLKYVPPQSLAIEMNEAAKEQRDQLKEINSDKFFAQMGAQLEPQIQSAFTSAMTPINTSISAALDRISETSQTGVTDMLSQFTNTVQGSAGTELRELAETLKAMQVTLAETQSGVKGSGEDFARRMSESAENLNRLVSDAARTLDTGASQNRDDLAEIMSSMKATFENANAQIETQLGNAAGGASSRMEEAMGRVLEKLEGQVNNVSSNLTSFDEGLRKGLAQTQEEIQNAQKSAAETVASMAQSSAEAIRDGLADAISTIRVEVDRFESALSNSGSALTAQASAIGDATSQTRLVSDSFAKTANDVRVASAPLIQSGEKIAAATSSFEQSLSAAVQALSAGQDASGELATSIKQQGENLVETWREYEQRFVRIDEALAKAVNDLAGATERQGETLGRYTSDVDKGLAQAVTQLSSSLTDIQESVEEFGESVTELKAALRTSGQ

SEQ ID NO: 4459 - protein, 302 aa, Hoeflea sp. IMCC20628
MLAFDDDTNHKIEEEEENYFVSMTDMMVGILFIFIIMLMVFALQFQQQTDTSESQIEEVLKRVEEVASQLKVLRDQIDSELASLNQSQKERTALLNDLKDELKAVGLEVQIDPENGVLRLTDNAIRFDSDKSGLNSAASENVSKLAQVLLHVLPKYVRSCDDADLVDCNSANKPSSTIDTVFIEGHTDKTGADERNWVLSTERAVSTYRAITTLQPGLRHLKNRGEKEILSVSGYSSTRPIPESTDGIESDEARRNRLASNRRIDMRFVMEVDNSVRLNEVLELTGAMEKQIEILRREVIAK

SEQ ID NO: 4460 - protein, 473 aa, Hoeflea sp. IMCC20628
MTGALREACEGWSSSVAGTRSTVVLPAESFTTKAAARIGAAEMNIIARTDTKSMNEISMDLLKLLHSGGSLSSKQLRDAIWCLWGTTPALADYPEVFSGIMKMVEASPKRKPFRNLATVYLVQFSPKRQSFIEASSALQRLAIQWGKPWADHQQLHSLYDCVAGPRMIAKSALQQNQSATQALQAMGLGALNAQSGFAEAITRELLVNLANGAESDHETRLARVQAYAMDSVGVPLFNTLDLELAEALMKPFEARAPEKRIKDIFLNFILSIFGDPRIHPGRWERFPHIKTMVIAWLTEQSLRQFLDIVSRSMNSESDERMWKYRRAFWEAAHQKGLIRGAWVVFAEEGAALARRSFGKNVAFARFSSRGGKQVHRTHAVLLLEVGNGIVADWSHSGKVNIWSNAQDRSAPQMYNHSYSSDDVQIRSRGGDMENNEYLVKSHVSPSTYSWQRAVAQRLYLLTKTKLQQSDYQA

SEQ ID NO: 4461 - protein, 989 aa, Hoeflea sp. IMCC20628
MNFFCTPLPSGALIELEQRGLLGKKSIPFSQWKEKAGQLSSKVRFIEHALADGLITQEGSGINAPSEWVLSLPASQIEALNIPPLAGISVGVSMRGRIDSDDSVLQLVWQDQNLRVISPEIMGPFIKVSGEWCRLSLALHSINDAARAFNQSAGTDFESRLPHWQAVQDILQTTIGHEIAADRFVGTLTIYQAGAFALDVRETSNGPDFVPILMARGLPPELGEIDDTVDAPETDGKIAAEWAEDDEKKSNEDDALLTPLLQSRFSDEVSNRPGNAKPAYVLDRNTYLLVDPALRTALDVVKRIRSSPDTERKAFLRNPRSLIAETLGEGGDAIVSSLFVETQQYSDRIEGLGLWEKPKLPWITRKSSQWLPEKFTVQVGAKKLEATPEKIEELYVLCEKAELEHADDIAFEHDLLPTPDVRNMLDRLEASGPPVKLDQPSDEHSERPERDQDVLQIKQNLEEIDYASKLVKRGNLVPFGFPSNHIKHTVPKEHQLQGFDWLCKCWKQGWPGVLLADDMGLGKTFQALAFLAWIKGNQMARKGHYRPLQGPFLIVAPTALLDNWKKEADIHLKPNTLGSRVDAFGNDLKYIKTAKRAGWTEEDALDVEQLRHADWVLTTYETLALYHRSFARVAYSVAIFDEMQKVKSPDSINSHAAKTMNIDFVLGMTGTPIENRLEDLWCLMDRIAPGYLGDMKTFSKTYGEEDPAALTELKHKMDHQQGDAPAIMLRRMKDDVAKDLPRKDIRTYQIEMPTVQAAAYDEAVAVAKAAKASPKSMLETLHLLRGISLHPLRSSDTNAYDPEWRQNWINGSARLQKTFAILEDIQSRSEKALVFLEDRSMQKVFASSVAEHFRLHAKPPIINGEMSGRQRLQAVDDFQGRPTGFDLLVLSPKAAGIGLTITAANHVVHLSRWWNPAVEDQCNDRAFRIGQTKDVTIHLPMAIHPTYGEASFDNKLHGLLERKRTLSRDMLAPPTSERDIDNLFAGVVT

SEQ ID NO: 4462 - protein, 578 aa, Nitrospina sp. SCGC_AAA799_A02
MSILENLFPFLFVFFNPTSQSVFSSIWILAIFGVASFYGLRFYKKDYLFCSSQLKEVNEKLSSLKETKSSFEEIRKSLTKDEVIGHYWSEFWETVVVTKNQNGEDQVFNTIDAHHFFNEDNLINHQIDTRLYNTLPGILTGLGILGTFLGLIFGLSQINLTTTDPDQLRDGIKGLLAGATIAFSTSIWGIFLSILFNILEKWGIKKLSVEVDFIQRKIDTLFDRKTTEDWLSEIKHESVQQSIQLKKFNDDLAISIASALEEKLAEKLSPSLDKLLVAIENLNNAGVQSISESITKSAGNEFERVAQVMRNVGDSMKTTADHGQKIQEDLEKSLNQNIDQFSSKIDEVFAGLSQSTEEHSNNIANQINDLNTTTIDTTSRVSRLVEDLADKFSENMNQAIQSISEERENVGVMLGKVNESISRITNLIEEAGLVADTFKESSDPVKEAVETLRTQVNEISNMQDEFMESSRRSSENWNNTIVKMENIFDQIQSESSETRELWSGYKSNFDKLREDLNAVFQNLNEGLEGYRKQTGEGLKSYLQQFDQSFSKGLTGLQGGIEALSELVESINEKNNGNQ

SEQ ID NO: 4463 - protein, 471 aa, Nitrospina sp. SCGC_AAA799_A02
MKISDSFLFHFDNRVSKSLLPINFGNPEYCAKVEKEILDKFDSDLGKPSHTDLDELYVRLQRGNASSFSQKEKKWLPWILYFGEYPQFIENPTQTKDILKLLNNPFRISFLRGLIHAYLENYDPGQGGCDLVRRFIWDKFESLSDEKIVPSIRFWKERKTPVFLPNGHHQTANIFLREKGEIHQTLLDYGFDNDLSSSKFIKFVSTSMIDAIVKNFPSHIEKCLSINETAAHPPSPKFKDLIVKMASTFLSKAGIDIEVPIKEGLSSYFLRHLNDPRIPGNDIYWEGVDEKSKKIFCQWLSSKDLEFFFNIVDEVSTDTKWKYRRKFWEAYLPYIENTWVILGRRAKEIAEQVDSSHLNLDLNRYGLLTGGDSIQSAFLIQMRGYIFVEWNNSGACRVWNYKKCPFKFSKESYSSDELRGPNFEDRFHHRSPEKYKWQDEMRGWIRDNTTIFVESYEYRLPGNDFDPYQNL

SEQ ID NO: 4464 - protein, 1132 aa, Nitrospina sp. SCGC_AAA799_A02
MISIHIKICDKGYSFSLDGEGELIDISGWDRNIKNKEDTAALQLLSQLIDDGTAYISGNQIVVPHETVSILLQDERDLLDLPEPFPFDIEISGLGNLTDSDFKYQYRFLNGGSRGFISPERIGSFLRISEEEGYSLVGNQYRILESIDDFNGISSDKKDLKSNYLSFGSIKDLEGEAGIKLDNYLNSENVVTPKNICLRLNPLEDGDVEILPIFCDEDESDVGIKCNKNILSKDQTQNFHKHFKKLKEKGIYTVPNGPKVILNDKQKESLGKIKENSKVDSSNRIILKEPQSFFDPEVIDFDNPVFEDGELVTWSDRVKEIGEYRYKAIPFVRKAKESWLPPEGGIILDDEIINVPEEDREKLKEKLEEAIKEKKIFIEHEGRKIPAKPEVLDAVNDLIKEYPKGKASKDKKESEKTRDNNASKILVIKDNIDKDEFGIPVQKRSGNIEAPIPLKEGVKFLGHQEEGVRWLQNCWLKGYRGCLLADDMGLGKTLQSLSLISWIGKISGANKKKKILIIAPVVLLENWKNEYGRFMEPIFGPFYELHDKGLRNIKMKEVSQSLDINKEIDVRNKDDAEKIIKMGRGLLLNPHELAKHQVILTTYETARDYQFSLGLINWDVLVLDECQKIKTPNAMVTSAIKAMKYEFALVLSGTPIENSWVDLWSILDFVQPGYLGSLREFTKKYQTPLKKEGTNREELGNELKKKVDPIIKRRMKEDSLEGLPRKIVKKHDYNKMPEIQLQRYLDIVKNARSKSPENESKKNHIFNTIRILSDISLHPDLPYLSDIGFAEKSDEEIINSSSRFITTFSLLSEIKKNDEKVVVFLLSRKMQRVVKRLIDNKYKIKTHIINGQVKGSERQVMIDSFQRTPGFNVIILSPEAAGVGLNITEANHAIHMSRTWNPAKEDQASDRIYRIGQKKDVFVHIPMSVHSTFDNDECNGSFDQKLDRLLDEKRDLHKRILFPANVEESELRGIGEEILGIDLSKGEEAGIKLTDVDGLSSENFEKLIAELFRSPDKSTVYQTQVNGGPGDQGADVLCFPHGTDGKGIIIQCKHSANVSKRQGNAGVQEVIGAKGVYEARFSREFDLIVATNSTGFTRNAEEIARGNGVRLVYREVLANMLNTQKISLVSLV

SEQ ID NO: 4465 - protein, 781 aa, Pseudomonas sp. BRH_c35; identical to SEQ ID NO: 3990

SEQ ID NO: 4466 - protein, 254 aa, Pseudomonas sp. BRH_c35; identical to SEQ ID NO: 1282

SEQ ID NO: 4467 - protein, 754 aa, Pseudomonas sp. BRH_c35
MRLPPVEFPAASWGAQMLERWTVLTKKAAAMETEAGNNDAFERMLAVLRGMASSGRFDGLPALLRRRITARALSWLWLNDEVIGSRLLNTRLLAALLDAQQPRLTRMTLQQMAQLYFRRFDRLDEKEGVRELLERSLLQQLDLIPPSKIQTSRADPLVTLKREGHWLLSLDGPRYLAERVRQGGRELGETLMELGLHGFDDGRYGDICRAHFYLETLRHLPLGESDPVLDELLKPTVAKAPFEGTRRIGHVALEILIDRAGQEPGEVWQNFILNLAGDPRISSTNERFVEWWRPLGEERIQKVRGWLSKEDLRLFLQAVEQYGLETANTEMQRMFPARKRFLEGLFKLKLIRNTRLLLGGKAQQSVKRILGKDVKTSFARMDGPMNDKAVIYLDCGDFHLVEGSHSFKIWVYLAAPGETLRTYERNTFSHQDLTTTVPGTYKKLYPGLPYDAFVHTPHAWQNKVFTFLAENGIALDVEQLLSAEDYRLQLRKFGIPAVSAKRTVVPAPAKEGAKAVARAPTAAQQGTEHAAAPMLRNADVPTPARRSADVESVAANGAMRSSTIASGRDNPVPQQTKLPPFSSLQLAALRYLETHSRCGFYALLEAVSNQGGNALNVKTMLESSLSQYVQQDGEGHWLLSTHGEQLVAELARSEPSDASQSVPSAANMNANENAGSRVARLEPFALAVLRYFAANPGDKVRYAANVLEVDARLVNQALYGPLKGICTQDDKYGWQLTGAAQRELETFDAQGEES

SEQ ID NO: 4468 - protein, 1012 aa, Pseudomonas sp. BRH_c35; identical to SEQ ID NO: 3993

SEQ ID NO: 4469 - protein, 700 aa, Peptococcaceae bacterium BRH_c23; identical to SEQ ID NO: 4391

SEQ ID NO: 4470 - protein, 242 aa, Peptococcaceae bacterium BRH_c23; identical to SEQ ID NO: 4392

SEQ ID NO: 4471 - protein, 1169 aa, Peptococcaceae bacterium BRH_c23; identical to SEQ ID NO: 4393

SEQ ID NO: 4472 - protein, 851 aa, Enterobacter sp. GN02174
MFSLTSFLDTLTSVNPENVPKYVALVVAVLLVCFIARYAIPSFVISARFKQKARAIQLIAKDKPAQQLEKLDALFSGKFFAHPWSEFKESLHRQFELDEDSGQKRIHSIRSTAPASAWFSEPLLVEIPLYTEAFKHLPGILTGIGIIGTFSGLMIGLHHFDPSTPEQVSASVANLLRDVLYAFLGSAFAIAFSILVTMFEKWRLARCYKNLESLTASIDQLFEGGVGEDYLSQLLSSTKENTTHAKQLKDGLVSDLREMLQNLVDSQVRENQKLAETLSSTYRESGQQIAEQVSGAIETSLKSPLDKIAGVVQTASGDQSHRVQSMLENVLTAFMNKMDNTFGQQFTTMQEMMGRSVEAIQSMQSGFSTLLQDMRQAGDDSRQGSAQLISQLLSEMKSGQQEMQAGMNDMLQSLQESVARIGAEGEGAGERMAQQLEKIFADSEAREKAMAEQMRAFIEAIQSSVQQGQNETMEKMAASVDTLGSHMATLFAQLENGQQQLNQQQNQAQNLLMSNMSKGVEDLTQNLAGVFSQLESGQKQMSQTQEQGQRALYEETQQLLARSEAREQAAAEQQQDFMAALQHTMHSGQDALREKMTSGIDQLGSQLGTLFGQLEEGQKSLSQQQQSAQNALQQEAQRIIGQLESQVQALMQMLREQQSASGDLLQRMAQNTTRHLEEIQTGADKMRVAADRFETAGNRVAEANHLTAEVLNGTQQAGRTLSSASSELGALIADYRNTREVVANAISALETLINSSHDEQTSRSRFVEDLKSYSERLQQYNREAQEFLHNVAEVMGTSFESFTTGVESGLNRSLQEMDTQLTKAAGALSSSVEIIGESVDTLETVLRSRRA

SEQ ID NO: 4473 - protein, 245 aa, Enterobacter sp. GN02174
MFNRAFNSRQRRSDEAEKPFWISYADLMTAMMVLFLVVMVASLSSVTQRIQQAEAGEKSRGHDIARLCERLELQAKNLNKTIHVDCHDNRISFGEAGRFEHNRFSLTPEGQQALQDVVPLVLDAANSDEGKKWFKQIVIEGFTDTDGSYLYNLHLSLQRSEWVMCSLLDSRSALQQRITADQQIQIRKLFLAGGVSFNNAKESKEASRRVELRMQFFGLKDKKQDESMDVVPGISQETCQLGVVQ

SEQ ID NO: 4474 - protein, 597 aa, Enterobacter sp. GN02174
MTSAIEKLKSRLLPYREKSVGPVVGHPFTYLQRVISQLERKVDARTVQMVPPKEKRRQAISRLRSGDTPQPSEWKMIFFGLNDVAEGDLFDTALIDDAVNFAKISAEIQSKIAQQRLTRREWLALCTSYFGHVSDTPEENPQWLQLRKQIAAGFKQLKESSPRPLSWMTVIDTYGDIFTDNAGFLLGQQLGRGEITDISVLEKVAQIPQTSWLWRKIVNHLVSEIFRQTDDEFEQQINELIALSRQLSRFKDNILAAALTRYYQSIFKHRTHLELKLLALEYWGNPQLTSRNKGWQVHVDNAVLLMVQGWFAKDDLKLFFELLKGNRDVDQARLFYWLRYANQMSYTRIVLGEDAQRSKDTDYVEFRAKNAGRLSRLQGPGSRDNNAMIMRIGNYLFVEFSKVGAMYSYHIDNAPFNPETGILDIDYDLKDKRNNRRKVRLRLPHLSPVTHYSLNRIEGWMSRYDEELRRLGISYVAEDSNQPSATIDISRFNAVQSGGRSVSSPAKSEANESRSNREEQIKIIAASLKAKKVDQNFTTREQQIREVIRSVDCKVMDKRGMGGAIHIQFNEPDHEAAKKLLSLGFKPVLGKFTYWSK

SEQ ID NO: 4475 - protein, 1079 aa, Enterobacter sp. GN02174
MFKKLLGKFINDNKAVTASLVPLYAIKAEGFVFPFSLADTQDNWLITSCLEQLHEEDYVSHWSDCWFISWDDFYRILNNEDYASSLAIFSFPQQRNLTAHLAATGSISDDTFRVFIDKWTQPDDYRPVEITSRGASFSSPEGTFVLSEENWQLLDSLQQLRLQQRQTPGETVNQTGWAKIRRQAKKAGAKLDDYLAKTIVIRPESLQLKLRKSLVADTRVLEIEPVFDEQPAKWLQSFDRTQQVQDRYRVLGDDGELSHVILSPEVKDVLTSVHAITGRRVAGDDALSFVRNPYTWIGEDASQVLDPDVYEQNLQDAGIYFYDFRLEPRVDENMQVVSVSLILIPRTEQPVPDETYVFNRPIELAALITELEQKLAAHLPAGVWQGYDLELSRFTQDELQEYQALLEGWQQQAAGLNFSHVLDLNKYSDRVIGIGEFEKISSPYLVKSESENWLPDNLVKEMCEAMFSGWDLDNHQHFHELETRLEDAKASDAPEVAMPWNDNLLPREEAEVFHEKWKKKIDAETSITANTEPVSRAVLLIEQNIEQALYVKQRRTSLLEAHLAEAELPMILKDSIQLREHQCKGVAWLQQLYLKSPTETTGCLLADDMGLGKTLQILTFLIWHRERFPDAPPSLIVAPVSLLDNWEREVGNFFLREQVSILKLYGNELREKKCAKESIPFELKSKGIKNLLQNDWVGEAQIVLTTYETLRDQEFSLARQPWSIMVCDEAQKIKNPAALITQSAKAIQAQFKVACTGTPVENTLVDLWCLFDFVQPGLLGALNNFGKDFLRPIEQQSDDKVLESLRKLIEPQTLRRTKEEVAKDLPEKIEDKSCKHLSMLPLQRDLYTHSVVSWQNQQEISEGLAQRGAGMLGLLHRLKLICAWPYSVSADLRLRNDAPKVKWLLDTLNNIRQSSDDKVIIFTELRDIQRELQHLVSQHFGFKPFIINGDTSTKSGSHQNRQSLIDNFQSSPGFNVIILSTIAVGFGVNVQKANHVIHFTRCWNPAKEDQATDRAYRIGQQKDVYVYYPTVRDSQLMTFEETLDELLNRRRALARDMLKASTDLTAADFEAVLTRANTN

SEQ ID NO: 4476 - protein, 729 aa, Enterobacter sp. GN02204; identical to SEQ ID NO: 1868

SEQ ID NO: 4477 - protein, 245 aa, Enterobacter sp. GN02204; identical to SEQ ID NO: 1869

SEQ ID NO: 4478 - protein, 560 aa, Enterobacter sp. GN02204; identical to SEQ ID NO: 1878

SEQ ID NO: 4479 - protein, 1080 aa, Enterobacter sp. GN02204; identical to SEQ ID NO: 1871

SEQ ID NO: 4480 - protein, 729 aa, Enterobacter sp. GN02225; identical to SEQ ID NO: 1868

SEQ ID NO: 4481 - protein, 245 aa, Enterobacter sp. GN02225; identical to SEQ ID NO: 1869

SEQ ID NO: 4482 - protein, 504 aa, Enterobacter sp. GN02225; identical to SEQ ID NO: 4444

SEQ ID NO: 4483 - protein, 1080 aa, Enterobacter sp. GN02225; identical to SEQ ID NO: 1871

SEQ ID NO: 4484 - protein, 641 aa, Erythrobacter sp. s21-N3
MEITEWLGHGLIYFFTEVPLIGDAMAAFLAIVLVGTAFAIAYRYKREYHAPLAVAIDARVRLLDEITGGSTADVDQARLEFAQRFNDIDAQMMEANHSEALPLRRTWEEYRETIVDPSAEVLQNSARPEHFFVNLGERHRGLNWFANIFIALGLLITFLGIIAALSTLDFSGDTAAMQDKLNSLMKVAGAKFWASVGGIIASIILRSYDYRFGKRINDGLSMLCDKLEHGMAYLPPQRIASDQLEQLKEQTPALRTFSEQLAAALDGALEKQMAPMITHLGSIQQGIDKISGGGGEAVRDAIATGAGAEMAGLADAIGAMTASMATMSERLEKQTGEADRQIEEAVKRFGQASEEMRSAFGELNRNFGVVADRMREENEQASELARQRMDELLSNLGNTLDDMKSGLASAASQMGEASARAANDAARIGQEAMEKSFSEFVDRFNQTGAPLVGSMKDAGNAISTSADHLSSAQSAIGDHTRAIEQVAARSNDLATAFGTVANDVEAATAPVRQSAVSIAEAVKSVELIVSKNADSSESARDEMRQLAAALNDTATAASSAWSEYRARFEDVDRALGDAIDKISDAAGNHATNLNERVGQIDQALGDGVAQLAGALEPLTTLRDTVEELAGILASQNQEAAE

SEQ ID NO: 4485 - protein, 242 aa, Erythrobacter sp. s21-N3
MEGAVRRRPAEEGESYFMSMTDMMVGLLLIFIILLAYFALNLQTKTEELTGANRTRAEILNDLQQSLKDRGLQVEIDTKSGVLRLPDDVLFDKGEWELTGRGQEAISKVANAMVAVLPCYTTSDLCEGERSPHLIDAVFVEGHTDSDMMSGGMNNYGLSVRRAETTFTMLQRNQPALRGFLNRPAGEDGSAPILSLSGYGPDRPVDRGESEEAKKRNRRIDLRFLMATPTSGLDPDILRQEQ

SEQ ID NO: 4486 - protein, 440 aa, Erythrobacter sp. s21-N3
MQRQLAKLDASVGEAEPVIELKPFLREATNRGAGGLPRFQLNRVLRGAWCDSEFDDLGVAALERADSEHRRSSDQAMIDGYLTYFPTERPIMPQLAEAASRAAGRHEWAWRERSSRWDLFLPQAGPAKVARDFVSRNADQISLLMRETGLGANLAASGFGQAVFYETCIATAELQPDKAVSAQRNILRMFDTEAQAGQLELVVRALLEPWIKTKPEPEHRKAISELLLDQIGDPRLQRTRWDRIVRSLAESIGEEKAREVTQVFKRWLTEVAMREFFRAIAKTTDRPDQWAQREKFWMAYLDEGLVTDAWPALGIRARNRIEDLIRQSGERPEYGIIRGGPSSSSSIIMQIGDLRISEWSDNGSCRFWSDSDPGAPKLYAKTYEGGKLRTTAGRADFEYESHVPASPGWEGKFAGIIHRRTSIAHPHFGRGRGRNWNDRW

SEQ ID NO: 4487 - protein, 1243 aa, Erythrobacter sp. s21-N3
MVTTKFIATSHENGGETIALLREQPGGLFRRASSEMVPVSDWPRFAPQAGQASLALARVLDDESRISEEKDGIVLPPEIVAQLDEADAFALGLPPTTPLTLQLNSGGSLADGTIKVDTKWVRRGGLPVRADIAGARVREGGKVGRIPEPIYSAFQAALLVNAADDPDERRAAFADLRATLGDEIGAGIEADGFLERVRIAYAANFSLNAKTDHGRFDFDPVLFSRNASENADGDLVDEEEASLLTPQDNQHFQRRFKGQEGGRRSYLLSDGTLLFLDPLLGKALDIVRAKQTGSSPEKREFLRAPQRVLREELKLDAGGDDEAADRLFIETQQFSERVSGIEVWQKPVLPWIKPKPNSWLPEGFGLRIGDPPDARHVELAPGEAETLAGEVETAIASGKESIAWRDESIPATPATLQAARAIADLEHQITAESEEQSSERSEREAVDTFFLQVGENFEQLDYARLPRPEISAEVFQAPGLPEGLKSEPKPHQIEAFAWLTEAWQRRMPGVLLADDMGLGKTFQALLFLLWLRRSSAHPKPVLIVAPTGLLRNWQAELAQHIEADLMGPVVEAFGTNLRDFRLEAGSDIRGGTSRLDVSQWEEAGIVLTTYETMRDYHMSFARIPFAAIVYDEIQKLKNPASQMTRAAKALNGRLQIAMTGTPVENRLQDLWSIADTVYPGFLGSSREFENSFPAHDLERLGDLQQRLIEREEALPAFMLRRMKDEILTGLPEKTARKYPVEMPPAQAQAYDLVLARARALRESGEQGAMLKVLHMLRGTSLHPSPPRGITDINGYIDQSARLKKTFEILEEIEQRGEKALLFCEDLEMQAFLAMAIQDRFSLERRPMCISGKVAGHKRQDMVTAFQTSPTSFDVLILSPKAGGVGLTITAANNVIHLSRWWNPAVEDQATDRAYRIGQTRPVTIHIPMAVHPDEAIGPSSFDQRLDALMERKRSLSRGLLMPPESARDVDDLLSDVLDGRKTLSEEDAESAPSSILLSSDAQASDVENVAQEESDAESQIGPENTAHAASSSPAPVPLPTPVAVEPEPKPPVNAPQRPVLSVRTPVEAAEARTPSVQRVVYEQYGPRDWTIFEQFVREARINRLEIQDPYCCADEQARGRLLNFVNRFCELAAKLDEVQIVTFDADSVDKRMPETNGDQRADLENRWRNTIGSTALHLAQRSRRSRGDLHDRFVRAQLEDGDAVIWDLGRGIDGVMSAKWSCVVNAFHDKRSAGIGARGHRVQ

SEQ ID NO: 4488 - protein, 729 aa, Enterobacter sp. GN02275; identical to SEQ ID NO: 1868

SEQ ID NO: 4489 - protein, 245 aa, Enterobacter sp. GN02275; identical to SEQ ID NO: 1869

SEQ ID NO: 4490 - protein, 560 aa, Enterobacter sp. GN02275; identical to SEQ ID NO: 1878

SEQ ID NO: 4491 - protein, 1080 aa, Enterobacter sp. GN02275; identical to SEQ ID NO: 1871

SEQ ID NO: 4492 - protein, 729 aa, Enterobacter sp. GN02366; identical to SEQ ID NO: 1868

SEQ ID NO: 4493 - protein, 245 aa, Enterobacter sp. GN02366; identical to SEQ ID NO: 1869

SEQ ID NO: 4494 - protein, 560 aa, Enterobacter sp. GN02366; identical to SEQ ID NO: 1878

SEQ ID NO: 4495 - protein, 1080 aa, Enterobacter sp. GN02366; identical to SEQ ID NO: 1871

SEQ ID NO: 4496 - protein, 851 aa, Enterobacter sp. GN02454
MFSLTSFLDTLTSVNPENVPKYVALVVAVLLVCFIARYAIPSFVISARFKQKARAIQLIAKDKPAQQLEKLDALFSGKFFVHPWSEFKESLHRQFELDENSGQKRINSIRSTAPASAWFSEPLLVEIPLYTEAFKHLPGILTGIGIIGTFSGLMIGLHHFDPSTPEQVSASVANLLRDVLYAFLGSAFAIAFSILVTMFEKWRLARCYKNLEFLTASIDQLFEGGVGEDYLSQLLSSTKENTTHAKQLKDGLVSDLREMLQNLVDSQVRENQKLAETLSSTYRESGQQIAEQVSGAIENSLKNPLDKIAGVVQTATGDQSHQVQSMLENVLTAFMNKMDNTFGQQFTTMQEMMGRSVEAIQSMQSGFSTLLQDMRQAGDDSRQGSAQLISQLLSEMKSGQQEMQAGMNDMLRSLHESVARIGAEGEGAGERMARQLEKIFADSEAREKAMAEQMRAFIEAIQANVQQGQNETMEKMAASVDTLGSHMATLFAQLENGQQQLNQQQNQAQNLLMSNMSKGVEDLTQNLAGVFSQLESGQKQMSQTQEQGQRALHEETQQLLARSEAREQAAAEQQHAFMAALQQTMHSGQDALREKMTSGIDQLGSQLGTLFGQLEEGQKSLSQQQQSAQNALQQEAQRIIGQLESQVQALMQMLREQQSASGDLLQRMAQNTTRHLEEIQTGADKMRVAADRFETAGNRVAEANNLTAEVLNGTQQAGRTLSSASAELGALIADYRNTREVVANAISALETLINSSHDEQTSRSRFVEDLKSYSERLQQYNREAQEFLHNVADVMGTSFESFTTGVESGLNRSLQEMDTQLTKAAGALSSSVEIIGESVDTLETVLRSRRA

SEQ ID NO: 4497 - protein, 245 aa, Enterobacter sp. GN02454
MFNRAFNGRQRRSDEAEKPFWISYADLMTAMMVLFLVVMVASLSSVTQRIQQAEAGEKSRGHDIARLCEKLELQAKNLNKTIHVDCHDNRISFGEAGRFEHNRFSLTPEGLKALQDVVPLVLDAANSDEGKKWFKQIVIEGFTDTDGSYLYNLHLSLQRSEWVMCSLLDSRSALQQRITADQQLQIRKLFLAGGVSFNNAKESKEASRRVELRMQFFGLKDKKQDEGMDVVPGISQETCQLGVVQ

SEQ ID NO: 4498 - protein, 597 aa, Enterobacter sp. GN02454
MTSAIEKLKSRLLPYREKSVDPVVGHPFTYLQRVVSQLERKVDARAVQMVPPTEKRRQAISRLRSGETPQPSEWKMIFFGLNDVAEGDLFDTALIDDAANFAKISAEIQSKIAQQRLTRREWLALCTSYFGHVSDTPEENPQWLQLRMQIAAGFEQLKESSPRPLSWMAVIDTYGDIFTDNAGFLLGQQLGRGEITDISVLEKVAQIPQTSWLWRKIVNHLVSEIFRQTDDEFEHKINELIALSRQLSRFKDNILAATLTRYYQSIFKHRTHLELKLLALEYWGNPQLTSRNKGWQVHVDNAVLLMVQGWFAKDDLKLFFELLKGNRDVDQARLFYWLRFANQMSYTRIVLGEDALRSKNTDYVEFRAKNAGRLSHLQGSGSRDNNAMIMRIGNYLFVEFSKVGAMYSYHVDNAPFNPETGILDIDYDLKDKRNNRRKVRLRLPHLSPVTHYSLNRIEGWMSRYDEELRRLGISYVAEDSNQPSATIDISRFNADQSGGGSISSPAKSEANESRSNREEQIKIIAASLKAKKEEQNFTTREQQIREVIRSVDCKVMDKRGMGGAIHIQFNEPDHEAAKKLLSLGFKPVLGKFTYWSK

SEQ ID NO: 4499 - protein, 1079 aa, Enterobacter sp. GN02454
MFKKLLGKFINDNKAVPASLVPLYAIKAEGFAFPFSLADTQDNWLITSCLEQLHEEDYVSHWSDCWFISWDDFYRILNNEDYASSLAIFSFPQQRNLTAHLAATGSISDDTFRVFIDKWIQPDDYRPVEITIQGASFSSPEGTFVLSEENWQLLDSLQQLRLQQRQTPGETVNQTGWAKIRRQAKKAGAKLDDYLAKTIVIRPESLQLKLRKSLVADTRVLEIEPVFDEQPAKWLQSFDRTQQVQDRYRVLGDDGELSHVILSPEVKDVLTSVHAITGRRVAGDDALSFVRNPYTWIGEEASQVLDPDVYEQNLQDAGIYFYDFRLEPRVDENMQVESVSLILIPRTEQPVPDETYVFHRPIELAALITELEQKLAAHLPAGVWQGYDLELSRLTPNELQEYQALLEGWQQQAAGLNFSHVLDLNKYSDRVIGIGEFEKISSPYLVKSESENWLPDNLAKDMCEAMFSGWDLDNHQHFHELETRLEDAKASNAPEVTMPWNDNLLPREEAEIFHEKWKKKIDAETSDPVKGEPISRAVLLIEQNIEQALYVKQRQTSLLGAHSAEAELPMILKDSIQLREHQCKGVAWLQQLYLKSPTETAGCLLADDMGLGKTLQILTFLIWHRERFPDAPPSLIVAPVSLLDNWEREVGNFFLREQVSILKLYGNELREKKCAKESIPFELKSKGIKNLLQNDWVGEAQIVLTTYETLRDQEFSLARQPWSIMVCDEAQKIKNPAALITQSAKAIQAQFKVACTGTPVENTLVDLWCLFDFVQPGLLGALNNFGKDYLRPIEQQSNDKVLESLRKLIEPQTLRRTKEEVAKDLPEKIEDKSCKQLSMLPLQRDLYTHSVVSWQNQQEISEGLDQRGSGMLGLLHRLKLICAWPYSVSADLRLRNDAPKVKWLLETLTNIRQSSDDKVIIFTELRDIQRELQHLISQHFGFKPFIINGDTSTKSGSDQSRQSLIDNFQSSPGFNVIILSTIAVGFGVNVQKANHVIHFTRCWNPAKEDQATDRAYRIGQQKDVYVYYPTVRDSQLMTFEETLDELLNRRRALARDMLKASTDLTAADFEAVLTRANTH

SEQ ID NO: 4500 - protein, 245 aa, Enterobacter sp. GN02457; identical to SEQ ID NO: 1869

SEQ ID NO: 4501 - protein, 560 aa, Enterobacter sp. GN02457; identical to SEQ ID NO: 1878

SEQ ID NO: 4502 - protein, 1080 aa, Enterobacter sp. GN02457; identical to SEQ ID NO: 1871

SEQ ID NO: 4503 - protein, 729 aa, Enterobacter sp. GN03191; identical to SEQ ID NO: 1868

SEQ ID NO: 4504 - protein, 245 aa, Enterobacter sp. GN03191; identical to SEQ ID NO: 1869

SEQ ID NO: 4505 - protein, 560 aa, Enterobacter sp. GN03191; identical to SEQ ID NO: 1878

SEQ ID NO: 4506 - protein, 1080 aa, Enterobacter sp. GN03191; identical to SEQ ID NO: 1871

SEQ ID NO: 4507 - protein, 674 aa, Burkholderia sp. HB1
MNIQSLFAGVPTPALVTGASLAALVVAVIAFFFGPAIRHLLRLRSIQRHIKAFESGNYPSQFEAAFAGDRRLTHLWKEYAESLHVQREERDGQMVVRAVRATVPAELYFNSQVVVDSRLRTEFFKHVPGIFTGVGIIGTFSGLIEGLHAFQVSENAATVRGSLESLMHSVGEAFLVSASAIAAAMITTLFEKLLLASLYRRTEEIAHAIDACFEAGAGEEYLARLVKASEESASQSKILKDALVKEMGELLRELTSAQIEASKEHYALAAEAGRQNNAALGQVIAESIQQGLKGPLEEIAATVKTASGDQSATAGRMLQDVMTSFSQRLNDLFGGQISGLTELNQQTAQSIQQAVSTLHTLVANIEASSQRSTDAMAQRMAEAIEKMESRQEAMNAQSAAFVEQLRQLVATSQSETNQKLQTTLETLGTHVGEMLTTLSGAQKEVFENNRARESAMAERTTGAVTAMSESVDAVVKELAAATKQMAQSVNALTQSTASSVDRMNAGAEALGTASRNFAAAGERVAGVVGQTADVSTKLAATAGNLTSGAGAIQELLSDYRAHRDSIGQLVTELRATVDAARREAALTGDILSRIETSTGHLGAAQKQADEYLAGVSRVLADAHGAFATEVKRTLDKANAEFHTKLTSAVGLLSSAVGELEVTLASMGTLAPARR

SEQ ID NO: 4508 - protein, 236 aa, Burkholderia sp. HB1
MFGTQIVVKRGGRDEAEKPFWISFADLMTALMVLFLVVMGVALLAVTKNVTEKEKREEQHRKDIELILDRFQTAAKRYNGIKIDRDRHVIDFGDRARFAFGKSNLAPEQEAVLRQFVPEILTLANGDLGKRVLKRVVVEGYTDRTGTYLSNLNLSLQRSERVLCSMFATAGASLLVEDQKEDVRNLFLVGGYSFNDSKETDEESRRVEMRLEFLGVGEQRAAAPVQSGNFGDCVLR

SEQ ID NO: 4509 - protein, 564 aa, Burkholderia sp. HB1
MNALNYLASLLQSSVSEETQPIRLGGEIDALLEELKARAKSGSGREPVHDHQLDAVRRYWSSQDVPTFRDAYLLSFGLCIPHRPQGECVMEDRPRFQRVLDSVDGYIARTASYRRCYQGLAKSYFTYDVDAPEAAPAGKKNWLTLRDYLHDRNREIRDSKPGPAWVDTAIENRQLFDEAPCTPYVSQLLRGDESHIDRICEQLQIGKESWFLRQLVLTQVEGATKLGDDEFVSLLPRLLGLLAHNEVLRDRGTILVLDRYARVSGSPLHPRLRDHAVTWWGNPWLPSNATRWGGVAPAARTMVSDWLKLEFIETFFTKLAEDGLADRRRMEFWKRYVKSIDDIEFALGSTARNSREPDLVALRKKMKGLTRELDASGANNAFIMTMGKLVAVEFSGLGNAFYGYDASRSLPFNTSQTLKLGKDERNSLKRSNRMLWLKHGDGIHGWNRWEDMFEATLRESFQIVPSVGASRASVKTQAANERAKPTSLASPRENARSSQNRTQTHESYSHVALKRFAATHGLQIDDRTALGGNLWVRGDEDDEHIGQVLADWGFRAKPGKGWWK

SEQ ID NO: 4510 - protein, 1252 aa, Burkholderia sp. HB1
MFKLFKQAKARDVATWKRQWSDKGVFLTRRIEGPGATVDGDLVGGYLTQLTDDGLASPVEDGFLLDWQSVYEILERRDYGQLREVLRIPPFTEFRPYLRSGHSLVDREFGIAIDGWRVDGGREFQGTLTGPVMSEGTAETLMRPAQWKLFKAVVAFSRRGDEDRSDLANRQGWGRIRTLALDAEAGLDDFLYRSVVLSPEKLNIGLRRSVEVADDHVVEIEPSFDGAPDDWLDTFDRVRDIRDRYDITTREGIVQVLVTPKVKTVLREIKRLPGRRVAGSRAQAFLLNPYAALGADAVDVIEESQFERAREDAGLDYERFVPTFERDAAGYPLRVGLLIESAVASGPTSSKTHWLDDNELATFVTALSRSLALGHQLLAWQGYDLALQGDSEEHLKELSGALAQLRNPPTLVSYAQVHDLGGYSSRIESIGVEKPYHSPYIAKKDEGEGWFPDNILPVIVYQPKDGGEPVAVPTNKLAIEKLKNDVQDADAKGVAKVDVGWLKDPISLSDAKEIVSTFESLFSDLESGKQFDPENQRKRPTERATKKQLVLRANIQALEYEELRREALQSIPASPKLPQSIRPGFALLPHQQTGLAWMQHLFSLQTDYQVRGAILADDMGLGKTFQLLALMAWLLEKDANMNPMLVVAPVSLLENWAEEANKFFQPGALPLLTAYGDSLAEFRVPRGQIDQRLQTEDGLVKFLKPNWIGDAKVVLTTYETLRDLEFSFAAQKWSLMVCDEAQRIKNPAAMVTRAAKKQNVAFRIACTGTPVENTLADMWCLFDYVQPGLLGALNDFGERYRKPIEAKTDEEKSRVEELRARISPQILRRLKTEVDTGLPPKIVVDDCRRLPISSVQRNLYAKAVDGFKRRKEPDHTTPFKNHLGLLHYLRLVCTDPRVHGLSVFKPEPMGDYRAKSPKLDWLLKQLSEIRAKGEKAIVFCEFREIQRLLQHYIEAEFSYRPDIINGDTSAASTHVASRQKRIKAFQEAPGFGVLVLSPVAVGFGVNIQAANHVVHYSRTWNPAKEDQATDRAYRINQKKPVYVYYPTVWADDFTTFDVKLDQLLAHKRGLSEDMLNGAGDVAPGDFNIADVVPHSQTSDLDERITLDMALRMGWQHFECLIGALWSKRGFDCYRTPGTNDNGVDIVAIDGKRGQLIQAKTSGIDGTKLGWDAVKEVVAGEAFYRRRHPNVSFEKVCVTNQFFNAQAQENAILNSVELIDQAYLADLLRTHETTMLEVERMLFVEWQSADLAD

SEQ ID NO: 4511 - protein, 648 aa, Geobacillus sp. PA-3; identical to SEQ ID NO: 4104

SEQ ID NO: 4512 - protein, 223 aa, Geobacillus sp. PA-3; identical to SEQ ID NO: 3684

SEQ ID NO: 4513 - protein, 426 aa, Geobacillus sp. PA-3
MKYEYEPVLLKRWLREPRPPLLEKTIENSNEKYRGVLERLSDQFAGLVHAPASAFQQWVKQLSRREKLLLPNLYKKELPEEIKKAMIDVIQQHVQHERRLFRVLVDVMYETCDLDEIWKLLRYAYASHIEKIEKRMEKEKREKWRRYLLSKDPIVYLATEVYESEKGILEELETFYLTKNFPLFKLVLMEIFQLADESFFLKEQDLYREMFVSSTNEQQQKMAHELIKKCKLNHVKPLGRLIFEKLQTYRRKPMLWKYVGEEEKRRFAQWIMKLELKDFFGGVNKNHERFQYWEKFIPKLEDVVVTDERTTLIMYFRDVVIMEVLGTGAVYIYPADVFQRHFQPKIDRMLAERERFVNKAWLKVREVKRTELMDRNLTIPGGWLRHNVGWQWKFDEWLRRELGWEVRRDVLLQKETEDDESSLDAE

SEQ ID NO: 4514 - protein, 874 aa, Geobacillus sp. PA-3; identical to SEQ ID NO: 3686

SEQ ID NO: 4515 - protein, 688 aa, Psychrobacter sp. P2G3
MDLLGLAQFSQKFFILPLSMCAFVLIIGTIFYFNYTRPAKLLKIRLSKLASDLEKLDKESMTDKDSLDASFTDDPALKQAWLNYKHTFHNVYEVVDGEDTLAHSRATAPSEIFFSESVVVDVPLKVEFYKHLPGMITGIGIIATFIGLLSGLLAFDPAGNPDKVQDSLDLLLNGVAEAFMASAVAILAAMVITWREKSWLRQCYAQLQRLNTAIDNAFTPDDSGEEYLAKLLKSSQANEANARQLKDSLVNDLKTMMTNLVEENKRNQAAFASQLSESYAKTSQSMATQIGESITDNLQGPLDKIASSVQQVSGDQGSAVQELMTDVLTAFMSKLETTFGGQMTGMSDMMTQSVTAMREMQSGFSQLITDMQTNSEVSTKTLETQMAKMMEDIHQKQNEMSTQMNEMVENLSAGSAKIGDQGLYAVEQLNSKVSELVSGLGTSMSELLSSVAEQRIEQDRQISNNQQKLHEQSSVMIDSLGSEIKELITHSKEAVQTHKENIQKLSQVTTDSITGMNNGAERMRLAAEQFTTAGSSLSAVTGKTSELIAQVNTTSTNMTSASSNLIELIRDYKNSQNSVNLAIETLETLIQQSKSEAGMSSQMLNDMQNMTTALSQVKMEMQEYLAEVSDVLVKSFDSFGTSVESSLNQSLLSFDNTLDQAVKRLATGVEGLGNVVEDLEDLTQKTRR

SEQ ID NO: 4516 - protein, 243 aa, Psychrobacter sp. P2G3
MIGNRYAKKPRSKDEGEKPFWISFADLMTALMTLFLVVMAVSLMVVTKKINEATQAEKERSSEILDICTSIKDDLTLKNQLITVDCRENRINFGEAGRFGHNDYRLNSEGIQALSALVPVVLEAANSENGKKWFKQIVIEGFTDTDGSYLYNLNLSLRRSEWVMCSLLDPTFNQELTLTNEQKNQIKQLFLAGGVSFNAAKDSKEASRRVELRMQFYGLKEKDSAEAQPIFVSAPIETCQLAR

SEQ ID NO: 4517 - protein, 473 aa, Psychrobacter sp. P2G3
MSIAILKQRLNQSIDKFSEPAQLHNKFARPNKLIKTLGLIERKFDDMENAQPIEEKMVNSILKLEKHGTDYLTKRDWKNLAWSLSKKLLSYEDKILFTFIGGQLIEQFSKMEPESLKPIYFPLLYGYFAVEQDEINKRPNNWIQLRNILNNNRSTLFQATLKPKKWLTTLTAHPEVLSLDPSKRFIRDFLQNSDDSRVSNQLESLSIAPNSWFWDSLVNSSIKSVKTMKEEDYFKVIPRFLLLLERNPIYTTAILTALLERYAATSKRAVVHGALKHVCLTQWDNPQYDSSAGWRNVSSDTKKMVIQWFVRADLEAFFKLFSQTADVDRFDYWIKFIDKISFSQIFLGPAAVQSRHAEHRKFRELNHGRLKNITGSTPSNNAFLLKIDNVHIVDFSDTGNACYGYSDLPFNLSKKNITVHELKSKQHSIFKSDSGRAMSLSHSGNWEAKFDEKLAELGVFASQSSSLKYKKRY

SEQ ID NO: 4518 - protein, 1075 aa, Psychrobacter sp. P2G3
MKLAFWKRKKSVEHASEEDAVESILPLQLQYDDIGLKHCYTSAAKTDADFYWESLADEEVAYQSDDNYILPWEELFQIRQDSEHDGVINLLNLPLSNDLYPVIRSENGLSDSNFQIILDGWCDNNKVKFKGSVKRTGAIISLASKEHLLSEATWKLLEKIKEFSRVTDKDKSLNQKYWAQIRSLANKSEANLDEFLRKTIVLAPEQLQLNLRKNLVSTESVIEVQPDFKDSPSNWLQTFDKYNDVQNEYTISLPEGGLAHVIIDPQVKNVLNEIKKMPNRRIAGERAQTFLHNPFAQLGEDAVEVISSEGFEQSKEEAEIYSYRLLIDKTYNELSHFSLAQLTLHENSSREQDPILLELSNLEQAQHFIATYERSSPVFLWAGYSIDRTNYLDNQMEELKSDLEKIQQYDDELQAKTVLDLSNYSDRVIGIGEAEKLSSEAIQKDSGESEWLPQNFIDESANLSQFPFENTDASTELLEQRIQHAEAEGEDFVLHPDSNVSIGLEDAKNLLDELRESKGEGTAENDVEQEQPDIDEKKKKSTLLIANNIDEADFTKKRAEILTFDESNRPPARLPSSFRSQEFSLKKHQEYGIAWLQNLYQYAPIQVSGCLLADDMGLGKTLQLLCFIGEYLETTEDKKPALVVAPVSLLENWEAEINRFFSAKFGKVLSLYGDNLKQRKIPKHLISSQLRNDYGITNLLEEGWLDGADIVLTTYETMRDLEFSLGRVDWSVMICDEAQKIKVPTAMVTKAAKAQKADFKIACTGTPVENSLVDLWCLFDFIQENLMGSLSEFNKEYRRPIEKKDDEDNTIIDELRQLIEPQVLRRMKHDVAELPAKHEVNDCKNIEISTLQRTLYKQVSNDYRSLSEQGHKGVMLKALHDMRMICAHPLKFQQQANINDSPKAEWLIKTLETIKQKDEKVIIFTEFRDIQVFLKRLLLERYGLSVTTVNGDSNTNSRVGLTRQGIIDKFQETDGFNVIILSTVAVGFGVNIQKANHVVHYTRSWNPAKEDQATDRAYRIGQDKEVYVYYPSIAATDFETFEIKLDKLLSSKRSLADDMLKPNVELTQELIQSIY

SEQ ID NO: 4519 - protein, 715 aa, Chelatococcus sp. CO-6
MVKFFISLLRLAFFWAIPVLAVACTEIFFPLVNYRLAASTIVDAIRGNIDLVSEPAFAYALAAILACFAAGLAVAFFLLHVVPVLFTLWRATRLVSTAQGRDRKRAETRRSFAINFESLNQRLESNWLIGHAWIEFEETLFDKDSDRAIGNTVRPQVFFNPGLARERLGGLKMMNAVPGYFVGIGLLLTFVGLVFALYKAGAAASAGDADIMAAEMAGLLRIATFKFSTSIAGLAASIVLSIFFRWFFILIEGSFGRFNALLERGLLYAAPQAISMEMSRTMQEQLVQLKDITQGEFFARMGSEIAPRLNAAIADAMAPVTEQIGNAVGNLSASSQDGVQKMLESFTNQLQHGAGTEMRELAATLKQLQMSMVEMQGGLRGSGDDFSAKLSEAAENMNRMVERAGQSFETSSGQSRDALTAVVETLRQTMEKANAEMDASLGAAAGGASAKLEAAMGLVMEKLDRQIGQIGESLTNMQRTMGEQGDYTRQQIEASVSHSAEIQKSVLADLQETVGSVSAQLRNAVEEALASVGQRFGELSTSMRAIEGALMNQKVALETTAGEARKTAQAFGESATSVRTATAPLVTVSDKFSGATERMATGVESTLKAIEAARDAIATLAAGLGAANERSSDFWTEFTAKFDAVDTALGRAVETLSRSTSEQQDRLQSHVRGVDQGLSEAIGKLSPFLAQIKDSAEAIADSLEAAHSHREAARA

SEQ ID NO: 4520 - protein, 306 aa, Chelatococcus sp. CO-6
MIIADSGDKDNSHTEEDENYFVSMTDMMVGILFIFIIMLMVFALNFRQLTDETVLLTAEQQEQLNRANELAEQIAELRRQIANEITELNKADQARNELLEAIKAKLDVVGLKVTIDKDTGVLRLAEDAIRFAPESSRLDAEAQRNVDAVAKVLLDVLPDYTACPGGMTCNPSTGYVVETVFIEGHTDKTGSDSLNWQLSTERAVNTYRRIVDNFRGLRALVNSQGREILSVSGYAYTRPAIEQDDAEGYRINRRIDLRFVMEADRRERLSEVLILLEQMEKKVSELQNPMGAALDAPTQPERVVPQ

SEQ ID NO: 4521 - protein, 432 aa, Chelatococcus sp. CO-6
MLRAARRLPAMIGDEPSAKDYDEVSGDLARRLARGERLTGRQARDGAWCLWTTRTQLAADAATLSPFLEQMRSLRHKGASRALALSYLISFHPDRPGLRAVAGALRDLASAMGKPFDDLNKRFHIFDVDEGPRRVGDTALAERKSPRQVLEENGLLMELVLGGGYVEPCARRVLERAVEDRRLQPGDRLEFIETISVKSGTRQLNFAAHKGLVANALLLPSRDRPPEKAVKDQILNFLISLEGLGDPRTRPGNWVNAPDARDVAMLWLTEQALRQFLDVVEAVNPNENWKYRRRFWETMYGNGIIREAWVVLDGQGAAEAHRKFGRNSPFGRFRGGVQSGHAVLLLRIGRGVCAEWSYSGQCRFWDDAERAGAPKLYQREYDTEFLKNGRQYAPVLEIRHSSHTGPNAWQHKAAEQIKMMTGERLSARDYML

SEQ ID NO: 4522 - protein, 667 aa, Massilia sp. WG5; identical to SEQ ID NO: 4320

SEQ ID NO: 4523 - protein, 234 aa, Massilia sp. WG5; identical to SEQ ID NO: 4321

SEQ ID NO: 4524 - protein, 578 aa, Massilia sp. WG5; identical to SEQ ID NO: 4322

SEQ ID NO: 4525 - protein, 1284 aa, Massilia sp. WG5
MSIFNIFKRAASNTSAAPVLKTLWSADGVRVEFSDPLPEPTQDALLDALSAASAEESVLGAYLAQLVSDEQCKLQRDAAIVRWEDIYQLQTSAEHVGALALLDLPPVGPLRPIIDSTGTLSGRDFELEVTGWTDGSKQLRVTELIGGIATVDGRPQMLTRAAWRTASEIATFRSRDDGERSQNHHELAWARIRRFADEAQALYANPYLETTLVLSPETLRLPQSKAETPFGKVLTVAPTFDGAPDGWLTAFDGFNSVQPHYDLTRGAGRVRVVISEPVRKVLEVIKREMPGRRVAGSKAEKFVHNPFAFLGDAAHEVFREDEFEADRAEAGAVEAIFSLVTRTSNARVDSVDLLVTEHYANGAASTDCEVFNTPEELEEFLSALKRALEDDLQKLKWGEYDLTIDGHCTVQLEQGEQVAHVWRMQPAERIDFNDVYEMEGYSSRIEGIGPARPIYVPVFQKDKTEEEKEGVWLPSDLTPMVRVTLQDHEGQVVIPLTKEWVKTFDQQVERAELDGSPSVSNPSLPTAIATPQARQLVDSFKSMVDAQERVRGDVAGAPKDKKGPRQTLLVKTNFYDVDYVEERRTSLALPAGWSAKLPRCLRPSIKLKQHQLYGIAWFQHLVSKAPTECRGALLADDMGLGKTVQLLSVLAWYYEHNPNAAPSIIFAPKSLLENWEGESKKFFNDSFPEVLVLYGDKLKERKQPLGLIDEGLRDKGIVDLLRPGWASTAKVIITTYEMLTSYEFSLAKQPFAFLICDEAQRIKTPGTLVTLAAKKLKADFRIACTGTPVENSLADLWCLFDLVQPGLLGALEEFGKKYRRPIECDTEEQRDALQRLQSLIAPQTLRRTKADIASELKAKLFAFTSVKEQGLSFKALLEETERLEIPMTEHQRILYKGGLKKLQDANAESNSKKRAQLSFGALHLMKAVCAEPYCLPGTKFLMDKSGFDVHLKNSPKMKWLLDRLAAVKAAGEKAIVFTELREVQAALYYFLNKTFGIKPSIINGDKQGRQAYIDKFTASQGFDVIILSTLAAGAGLNITAANHVFHFTRAWNPSKEAQATDRAFRIGQQKDVFVYCPTIVADDFNTFEVRLDQILKRKAGLAGATLDDGGLSAMLNGSGGDVGFADLVDNIGIGERVVKHYLTMDDVDRMDGAGFEVFCCLLWQKLGFQARITEKRRGDGGVDVVAIKGRKGELLQCKSSKASSIGWEAIKDVTGGAAGYQVRYPNTLFTRVAVTNQMFTQGAMTHAVENKVQVVTRASLEELLGLYPTTNHEFDEALQAWAMN

SEQ ID NO: 4526 - protein, 486 aa, Ruegeria sp. CECT 5091
MDFESVGVWVRDFILSAANMIVDEHWPGIISAGLFAAMMLFVIWISLISWSRRQALAAALRDAERASDSSGHGLDAEALRAALKRRKGAADRTLSTGFSEYCETLTVVGRGDEARIHNSIRPSAFLNVDDLGFSLKSLRWVPGVFVSLGLLLTFLGLVAVLQQTQGLLNGNDAATVSALRELLGQASAKFTMSLSGLACSIIINFCLRYWSTRVEKGADSFAASLEKNMAFISLEDLAGKQLRAIEDQTVQQAELNTHLVAKLSEPLNRVVEQSVQNVGTMVDQLGKDITSGIGGSLDSVSERMEAAANALSSIGDDLNLAGKQFDEALSSSTKSLISALSRLEEVSEKLTSASGMVGDLAPTVMETVKEGNAANLRVAEGATEMVHAAKTAISEEKQVVLEAMLSIKGLIEAFESRAAAYDGQLEKAFQTYQVEVGKTIDKLEDHGNGVQERFADALSTLQAVIENAKAFEPESQPKSSVEAIAE

SEQ ID NO: 4527 - protein, 358 aa, Ruegeria sp. CECT 5091
MRHAFRQRLSEEEEESVFVSMTDMTVSFLFIVMILLAFFATQITPGETVPKHMLDEAESIIEQRDLQVRQLLEELESYRSGEPSIISKLQAEKAQLEARVRALEEDIDAIHAELELADGDTAVARISLLRNELQRLHALLAASSDENLIERYNTVVSLQRARILHVLRERIVAVDPSIDVSISRNQDALQFRGDGLFASNSTTPSRQGRAKMRLIAGILQEVIACFSLGEPSTLGSTCNEDIAVIDALQIEGHADSVGSDNHNMDLSARRGAAIYGEMIAANPQLLGFMNLRAQPVLSVSGYGEGRPIADEALPGGRDANRRIDIRFIMFSPVDEASIPSGLDDLARIQKLLQGGELE

SEQ ID NO: 4528 - protein, 436 aa, Ruegeria sp. CECT 5091
MSLADRLVLKPDFSVRVKGGALDKAAERIAEAFPGLEKRAPEDVPIILRKVEEAYKAGIWQGVTSGDVGIAVYEHLREKIELPQELRLFLDQEMKVATNPTLIDAMCRGYFVSWSKRAAKTRVLSNLLLEKASVLPTRWKTIFAKHPAFLDIEDGAEKMAARMVEATTPYQWLKSEGLPAPHEEGLMRETHLAFLRQTPMPQTEMAVDKLLGWVTPPNRPKLFDPWAAETVEKILSPWVSTDCPQKLREFNLERLVNRFGDPRTDRPAFWSMVGQPYRRILLKWLARKSMEAIFDIVTRAEGGSEQGHQWANRKRFWMGVYDKGRIEEAWVALGSKAVPHAKELYARTGDPSYMSFGHQGTRSDTCLLMMKIGSKTVVEGSHSFRVHIFPTPTRATPELYLSNYDLDDILLPVGHQDARRHDPPGHWMEWVQRRVL

SEQ ID NO: 4529 - protein, 1071 aa, Ruegeria sp. CECT 5091
MHEFQFDIEENGLRVRISQQKTGLFARFRKREPVDLKTLAGAERTLAVAFSSIRALDRDSDHHELSADYLWLDHWMVSRLDDMSASVLGIPRKLSGVVFHAEMRGSLGSESFALQWWWERDKRQIRLNRTGAIVESGGVFMRLPAQIYDAIFLSEAFDGGRPLPEHWRALSEFRAALGDLEDDGLTRPERYLEKVEIVACDKVGLAVDPEDPLGFAPLPFVSQQIRQGEMASEVSAALQGDELSAFKDDSNRRGAQPAYRVGENRFLILDKSVVPVVDVISRHARGTDQEKRNFLENADRLVAEAIEQALIDEGRLNELMPSADLVDAVETEFEKAWAETREWTDRVIEIRKWTKPEIEILEGSGTSWLPDDIEAVVGEILGTIPEEDLDTVLKALLAAQESGDLEVLLEQGVLPVTELVIQAVRRRLELYLNRISQDQAEEGEVTAILPVTHDNFWELEFRERLRDRPSATERGLPSSLKKSLYVHQRNAFDWQLSAWEAGLPGILNADEQGLGKTVQTLSFLAWLNERMTKGELPTKPFLIVAPTSLLRNWEDETRKHLLPGIFDEPVRLYGRELKAWRVQGERGRDIQDGRAKLDLSSLVDCSEPRLVITTYQTLANYAVTFAQTPFEVAVFDEIQNLKNPSTLRSNAAKAVNADFRIGLTGTPVENATRDIWAIMDQLIPGALGALNDFRIAFDIPKQGNMQELHRAVFSSINGYPALGIRRTKEKAASDLPPKVRVLHPRIMPEIQALRYDEARKPGQSLFGLLHHIRRTSLHPGLLEGEAPETFIHASARIEAAIDVLRAIQAKGEKALVFVENRDVQAWFAELVKIEFGLPRVEIINGSTPVSHRKEITDHFQRHMQHDEGFDVLVLGPRAAGTGLTLTAANHVIHLTRWWNPAVEEQCNDRTHRIGQTRPVTVHIPLAIHPRLQRGSFDCLLQNLMKNKRSLADSVLWPPESDESEVRALYDAIVSAEEEDGLAADEGLVLSGRPDLETQELGENILRVCLKGGGASVVVALDGADLQRVILRPETDAAAIVLSDFDNLPEGTNVPTSILGGSALWPEFVLPD

SEQ ID NO: 4530 - protein, 686 aa, Phaeobacter sp. CECT 7735
MQFEFGDDLGLFLKDGIIALAEALTLSDSRPGYLAGLFLLLTVIAGILYLRRTSRQVKAVKELDARVRKHDGIEAFAEGYDEFRASLRENYRTNRDREAVWEAFDEFNETVVPDDIDGPLRLRNSIRPASFLNVEDLEFGPGIYRIFPNTFVSAGLLLTFLGLVAALHQFSQSLNVGSGGMDRAMQDFMQIASAKFVMSLVGLFCSIIFTFLLRARQNRIEAALNRLCTGIERRLVFVSLEDIGFRQLRAATEQREHLREIGTGMIAQLREPLDALPEAITTAISSKMDPIFDRVSTMGTSNMEGLVGDLSQQLSHSVGNALTRASDSLGEATDRIGLMVDRMNTSNSQAGDGLRDALDEMARAITEMRTEVAASGRTASEAMNDGADRLLSVMNDTLSSIRDNTGQGAEAMRAAADEMKDAAEGFRKTLESASQESAEAARQRMAASSDEAGQAITGAGRTLLDSFNQTSQDIAKLGTEMGDVIGEKLLSRLEDIGTRLSEMAEAVQRGASGAQSAAQGMNTGASAIQGASEGFRSASQSLTAAAEPIRASQERIENTLRRAGDLVETVSETLMQNSASVAENAAHVLESAQTALGSEREGIRRNLEATRAVIEQLSDEAEKLDQIDIMLGRALKEYNAQLDSALGSAQDHVGQMRDALAPGLDTLKSVVEQAETFIPRQPRGQA

SEQ ID NO: 4531 - protein, 371 aa, Phaeobacter sp. CECT 7735
MRAQAKKIRQEEEEESAFVSMTDMTVGFLFIMMILLAFFASQARDSETVPISRFDAMVEQRDEWRDLAETRAETIERLEKELEALQLLVAELTAQVEALTEERDALKAEISSLKADNESLKQRVMELEELVQNLQERIQDLEDQIKVKDEEIEKLQAQLAELKKVDPLEAYLARVSMARREVLTRLRDAILADFPDLKVELSEESDALRFQGEGLFASNRSNLTREKVAIVSKLAERLDEILPCFTIGDASRFDEACNPAFALVEAVQIEGHTDNRGTDQVNRSLSAARANSTFFAMTGAAQGVMQHLNLKQQPVLSVAAYGPDRPVTTNDTPEGRATNRRIDLRFIMVTPQDTGGIEVIREALEAVGERQ

SEQ ID NO: 4532 - protein, 447 aa, Phaeobacter sp. CECT 7735
MNDQPERADSINALLGQPNPLRNRVLPPLDQISRSVTSILSRWPATIKAPEDRDREKLTLNMLFRVQNWKWENITTQRVISSAVAVFDEERRTRADLAPVRSFYLSEIETRQPGAFLNGMVGVYIESFEPGASHTRLLAQALGQRRAELGGRHRKLTETLPSLFEPDAAPPDLAKIMLDSDDPYTALKSIGLSTPHTSGLAKAAHKTFVERLAPDLARPEARSKFFKWLTPENGPVLQAGAGPAVEALLSVWRNRTPPDSLRNELSERIIAAWKDPRLHAGGIWPGFDVGLKNLLLRWLTRENMEFFCEIVSLSQESHMWEPRRDFWLDLYDQGRIDEAWVAFSSDAHRIAMSRLRRQENSATRFGRQTAIRDLSLLVMRIGNKIVVDGCHSYKTHIFRTDDPNAPKLYQMKYDAVKIRNSSRLSQTHYWSESRKLAVWEQWVEQHV

SEQ ID NO: 4533 - protein, 1039 aa, Phaeobacter sp. CECT 7735
MSDNAPIHTFSEDAIEIRFPEAKQGLLSRLMAKPSTRSFTDLAPEDRDLLFAIGDLRAWKDNHPGEVKVAPDLLRISHDAAASLSAPAADALGLPRTVDLMLRTDVTGVLGRPEFKLHYEWFREGHRETPKRIGAILRTSKGRRRIPLWMKRALELSDGFDANQPIEDHWRALAEFRRAIEPDSEIESKMPANREMAGLSMTAFLRGLEVRIADRFSISPDKALGQFDVVPYSAERLENAGLTDDISEENAELSGEALAVFQFGLHQHGAKPAYRLGNNAYVVIDKGAAPVLEEMVRAQRAPREERRAFVENPRAFITEAVNRHLAKTGELDGLDDAQQAEMVEAIAGPALIESLEYSERVTGVTVYIRTPEIGEGSGTTWLPEVFAPHLVEEIRSLPDPDLKALRDHMATVLETGTHTPAKIGGEEVQVTPARLAAIEGEIQRREALVAVREEDDEHSKEAEGPIILDTKENFDDLTWEAKLSPRAPSIPVVLPEAIRTPLHEHQKVSFHWAIEAWEAGLPGVLNADEQGLGKTLQTISFLAWLKEHMKQPTAANRGPILVVAPTSLLRNWEQEAGTHVEGRGFGTLIRLYGSSLGSQKRHDARGTETQSGLPQLDFDWLDEAFEDGRAHRYWFLTTYTTLANYQHSLGKIPFSTMVLDEIQNIKNRVTLASKAVEAMNADFRIGLTGTPIENAAIDLWTIMDRIAPGCLGSGSEFKTLYATPDAENMAELHGRVFKPRGSVPPLGLRRLKDEVARDLPKKRRFLHPRLMPKVQADAYDLAQMKLANGGPGAALKILHHIRSVSVHPGATAALPPEEFISQSARLDAVIDILHRIRDAGERVLVFIEHRDMQFRFAEIVRHLFGLEKIDVINGDTPIPRRQEIVNHFQRHLTADGGFDLLILGPKAAGTGLTLTAATHVIHLSRWWNPAVEEQCNDRVHRIGQARPVSVHIPMALHPELGAQSFDALLQSLMQRKRKLAEQALWPMGDSAADVSGLTEAIATPKRCKHAVIADSMAEQFRRDGLPIPSPDTLGAWELT

SEQ ID NO: 4534 - protein, 605 aa, Candidatus Nitrospira inopinata
MSTMVDLLLHPFTDANPIGLVTAPGLSWVGSAGIIVVTLAVLTWMVVKVWMVRQPLTVVATELQKLRHQHSVLDAEGLNRLDGLFGKVEPLAQAWEEFRETVLVKDSPGKIYNTRPAEEFFTEDNLINQRINLFFYSSFPGIVTGVGLLLTFLAIFAGLLQVNIDEESSRIEGISGLINGLAGKFLTSIVALSCATVYLLLEKPLVHGLSNSYYRFTHALNRLLSRRTSEHILEDMHQNLAEQTTAFRHFGVDLSTRLKEGISESLGPTLRRMVEVVERLATQQRQDNNDAIKELIAQFLKGLEGTTKTQFTELQTVLASASNRMEELNRAGEESRVGLATFIQRLDDSMAAQNRAVSDQIGQLRETVGSVLARLENVGSEHERRAHELLASVTTTIREAQEHSQAHLSKTVDIVLQRTAKWTEQGAMNLMAALDEHRSASQQLAQTKSVLNEALESFRAMVTEGQQALKQVEQAAYTLLEGQRSFAATVQEMRQLQEQAGQNAERLAQQLTRFAEIHAVQTETLKQFQTVFHTVETGLGNVLTELTHSMERYSSVVQEYTEQQLTRFDESFSQAAQELKASSDMVRDGLQQVTGPLEKLVKRIE

SEQ ID NO: 4535 - protein, 244 aa, Candidatus Nitrospira inopinata
MIRVTRDKTAKDQTIVMGITDLMTSLAVIFILLLTLFIRTQFASRQVSQDIRQDVIDTLVAKLMSSQDESLHQVKVAKDPKDPLGIEVVIRDPLLRFEPDKSNLSEEAKEFLRGFVPLLTSVICQDQLENIQTIVIEGHTDRTAPLGKDPDEHNIPLSQDRARSVMEHTLFVLKETEEEKRDCLLNMTSVNGRGLREPPPELIGKPERELTAQEREAMRRVVFKIRIKSTEQRRGVVPVQTSAY

SEQ ID NO: 4536 - protein, 479 aa, Candidatus Nitrospira inopinata
MWFRCRQAHIDVHSLYGLAMSETISLADAFAALQQLNKQVKRSAHQPLNWVPSFPSKLSRLVKSWGDIPPFKGLLVPADEVILQKWQRYRESNDTLELSFYEIGRLCQHPTSATDPLFYHYLVRKRYSPPPYALLGLVYTYHARWCSLTVGNRRFIEEALEAFLQAYRGFFKALCVWQKCLDYIIGSEAPVRLGRELADKRSIPESFAATYALHTNTEFWAEALAQAAEHIVHRIERVPVSQLEYLTQTLFADPGIPKSRVKELLAKAILSQRCDKDELARTIIINFALGATDFGDPRVHQAGWIGIEAARERFISWLSREDIKFFFDLVIDRSSDRQGRKPYWLMWLPQLKRTRVLLSRHDQDRIRLRLQRRNEQIPSYGLLDAPDTSAFLLDFGSVVIVEFSKSPNASYLYPRAIARDLFRDFYQQNRRWTVQELKRRDLVEREAARRLEHRRYRHNQWQDEMTGLLTRHYRLHRPE

SEQ ID NO: 4537 - protein, 1151 aa, Candidatus Nitrospira inopinata
MPVESLLLQEFGPDIHLKAEHDGLWLRYSGSNPHVCLARSDCWPEYQGESACVRTWRTVVEQLVDQELAIPEGQHLRVPYDHLDTIEDQSLTLFSEITKWAPFSVHVRAHSIFGAPDFRYIAQLKLGTRVFTPVRFGCFLLVGEMIYRLPRAVYCLLNAIETFNALPSEHKSTAASLKEFAAIKTLIDESDAEADPLLTTTHVVVPSKVSLDVDFDEDGRISLFPSFDGVPRDAFKKVFFQLSDVDSVYALPSDDGGRVRVVLHGDLQEALKVMHKIRHVGGEEKLAILSNPASRFESVCDLDLIDLSLYGPRVRGIGKYPARVSPYVRKGGRRLFNQEEVFEVGLAYEFADGESQQVQFESRDELLNFAEQVGAAHAAGENFVQFKNASVPVTDSLVRALTSLVKRFDRQNNRQKQESPDTAKLLIYANEEVLEYDEAAQSIPGSLVPELPKSLIRCDRLMPHQVEGIGWLQHLYRHSPIRRGGLLADEMGLGKTLQVLAFVAAHLESAPPTDVGLSSGHGPVLIVAPLMLLPTWEEEMRRYFTNRGEIFEPLLVLHGAKLSQFRCVTNTLREAQAQTSVLDLDRIQAHRVVLTNYETVRNYQYSLARIRWRMVISDEAQEFKDRSTGVSHAVKALYPKFRIALTGTPVENRLSDIWNIMDFVQPGVLLGSYREFVKAYEEPAMAGTLDERLQHLQALRDRLRYRKSDAFLLRREKKLLSGLPVKHPPHILETDLTPEQRLLHLECLARMRNPGTEEHRFALLDRLTKLSQHPFLLDATRRLELQDPLCYLQSSPKLKKVVETLHVIRQQGEKAIIFTRSRPMQDILKLVFEHEFKLAVGVINGSPISGRRYIVKDRTNRIKDFESLPGFNVLILSPDVAGVGLTITAANHVIHYGRWWNPAREAQATDRVYRIGQERDVHVYLPIERDPRGEFRTFDQCLHQLLVTKEQEARDFLIPLPSEENLETELFEHLRQERPQSSGKVRPIRNKEDLQLMTPEMFEALVARLFVQEGLKVVLTPVSGDRGVDVIAVSHRAVTLIECKHSAVGSSLTSEVVDHFVNGVEYYVHNILPASLRNRPRECFLITNTSFDRHLMASARARDIRVVATDDLITKLAQFTITCLDVEEQHSTRQRSMNDVRAALHGLQKML

SEQ ID NO: 4538 - protein, 730 aa, Pseudomonas sp. TAA207
MEDSSFFSLLKDASAEQLTAPVLVVSVVLFLLVVFVFRYLRPSLRLAKSLAELKVALKKAKAFAPGQRRSELQRIFAGSSLEHSWDEYSETLHDQYEFREGEQVLVRSRATAAAAHFFSAQSVVDTPLRTEFYKHLPGILTGIGIVGTFFGLMLGLQSFDPSTPELVNASLDKLLKDVFFAFVGSVFSIGVSILVTLVEKWRLGRCYTLLEGLTETLDSLFDSGVGEEYLAELVRSSAESSIQTRQLKDSLVTDLREMLQNLVDTQVRESLKLADTLSTTYRDSGQLLADQVSGAIENSLKQPLETIAGAVQAASGAQTGQVEGILKDVLVAFMNKLESTFGQQFNGLHDLMGQSVAAMQSMQQGFSTLIQDMRSASDSSNQTSSTMIAQLLTDMHLAQNAMQAGMSEMLAHLQESVARIGNEGEGAGQRMAQQMEKLFADSEARQQAMAEHLQAFVESIQQNIGHGQEATMSKIAGSVDVLGEQLSAVFSQLERGQQQMDQSTRAAQADLHQGTRDLVGGLDEQVKALLQTVGEQQQAAQDTVKALSAQTEQHLQSMQVGAEKMRAAAERFETAGHSVTKASDSTANLMGAVQAAGTELGQATRELTAVVSDYRNNREALATILAVIEGVVASAHGEASGRSQYLQDLKAQSERLQTMNREVYEYLDNISGVLGNGFKEFGDGMDDVLRRTLGNLDLELDKAVKSIAAGVDGVKESIEDFSDVMEKIRS

SEQ ID NO: 4539 - protein, 247 aa, Pseudomonas sp. TAA207
MFGKQMPSATRQKDEGEKPFWISFADLMTAMMILFLVVMVASLSSVTQRIKQAEQGEKQRTQDIGRLCERLQLTAKNSNTTILVDCKDNRISFGEAGRFGHNQYSLNAQGQNALQEVVPLILDAADSEEGRKWFKQVVIEGFTDTVGSYLYNLHLSLQRSEWVMCSLLDSRSPLQIGLSAERQQQIRSMFLAGGVSFNNAKGTNEESRRVELRMQFYGLKEKEGALVPEVPVFTNIEAERCQLAMSR

SEQ ID NO: 4540 - protein, 551 aa, Pseudomonas sp. TAA207
MSGSLAKLAAVIESQLIGKRMGMGRGPEPLLRFSHLQAASHELYQRYERAEQALPPPHLKRREALNKFRNEQKLNPSEWRLVFSGLSDKSERVGPILEESQLFDRVHHQVQERIRQRSLSRRDWLALCFSYFGYESEMPDANFSWCTLRQDIKDGLESVKGRQVREKEWIRIVQQYEELFTDTAGEGLGEQMFNGEIDDLSVLQTIAQIPDSSWLWRRIFNVLLSRIFNLDDVEFEYRIAGFIALGSQHPKYVHDILSACLSRYYLASFREKPSSILKQAALDNWGSPQMRSRENRWLQHVKPDVCAMVVAWFAKEDLEHFFNLLKGDAEVDQARLFYWLRFANQMSYTRIVMGSGAWIDRSQDFVHFREKNKGRLSRLEGAPMHNNAVVMQIGNYLFVEFSGTGNACFVYPVDTCPFNPDKFMLDLNDDLKQRGRKPKRLLHTPVPYYPNKVEGWLSKFDDELRALGITLNGHISAQPAQPLMQATPQSVSIEGKVEAALVGIPHTLHDTRAKGGAFYVQLERPDPTAMAALHRLGFKQVNDQPLRFWRH

SEQ ID NO: 4541 - protein, 1082 aa, Pseudomonas sp. TAA207
MFKRFLSGKKRQAGNTAGLPLVLYSVEEQGLCYPLSLADQADSWPLALYLDQLQEEEFACQLSDRWLLSWDELYRLIEDPEHHSSLGLLGLPPLTTLTPQLVSQGSLASPDFKISISGWRDSVSGAVVAVQRTGAMIEHGIQTEMLSQTSWRLLGAVRHLYLAQQETPGELTNQIGWSRIRSLALKAGAGMDGFLDKTVVVKPESLRLTPRKSMVGDTPVIELVPSFEGQPANWLSSFDGQQQVQDRYRITDDDGSLTHVLIKPEVKSVLDYVHTLPGRRVAGDDALSFVRNPYSALGESASQVLDATVYEEGLVAAGIFFHRFSLHTQVDEPSQRIQQITLTLEPIAPTPQAPIELAFHAAFEFAPFVNELELKLAAGMPAGFWQGYELELSDFDLCQLAGIKELLKRWQSEAMGAEFDSVLDLSQYGDRVTGIGEAERISSPFLVKEATENWLPKDIADLALGAEAFGRWDPSDRAQFDDFAQRLEDARANGEQTVLLPKSTIELPLPAAQQLLDAWSQKIAPASTAKPDVEKVGRAVLQIGQNIDEPNYVQLRQEALLAGLDAVPQLPTLLQPHVVLREHQLQGVAWLQHLFKLSPTDVSGCLLADDMGLGKTIQLLTFLVWYLEVYPQDKPVLIVAPVSLLDNWERELGQFFYADTLPVLKLYGAALSAVKFKKDEIPVDIKAKGIKNLLRPGWLGGARIVLTTYETLRDQEFSLARRQWSIVVCDEAQKLKNPAALVTQAIKAIPARFRVACTGTPVENSLIDLWCLFDFIQPGFLGGLNQFGREYQRPIEAALERDTIALERLRRLIEPQTLRRTKQDVAKDLPAKIEDRACRSLTMHGLQRDLYLSEVSAYSRKQQIEEQLDQKSSGMLGLLHKLKLICAHPYSVQPDARLRDHSPKMQWLMRTLESIKSAGQDDKVIVFTELRDIQRELQHAIQERFGWRVTVINGDTSTSSESAMSRQKLIDQFQAQPGFGVIILSTIAVGFGVNVQAANHVIHFTRCWNPAKEDQATDRAYRIGQTKDVHVYYPTVLDSGMTTFEATLDQLLSKRRELAQDMLSAASEIQASEFEALLRARK

SEQ ID NO: 4542 - protein, 730 aa, Pseudomonas sp. TAD18; identical to SEQ ID NO: 4538

SEQ ID NO: 4543 - protein, 247 aa, Pseudomonas sp. TAD18; identical to SEQ ID NO: 4539

SEQ ID NO: 4544 - protein, 551 aa, Pseudomonas sp. TAD18; identical to SEQ ID NO: 4540

SEQ ID NO: 4545 - protein, 1082 aa, Pseudomonas sp. TAD18; identical to SEQ ID NO: 4541

SEQ ID NO: 4546 - protein, 697 aa, Desulfosporosinus sp. BRH_c37
MNIKDRSTFTIYASFSLIVMFFSLYPPVSFILAGSKTTLANIVTLVLFFIFMASLSFFSLRVFNKSSQQNLKAFEDVFQSLNSIETDDRQEEFHKVKSILKNSLLKSVWSKYEKTIRRINDGRSNEGEIRQKFYASVEASYFFNEDVVYSNLAFYKFISYVPQLLTALGIFGTFLGLVIGLIGVDFQNTANTKSSIELLLNGVQIAFRTSIYGLAFSLLLTVFQKMMLGKQEAKICKICDQIDQIFPMNTQADGVNQLYVELEKQTASIQKMGTEIAEAVGNKFDLSLQNTLGPTLEKFAETTEKLFETVNNSNHSTVSSIVENIGSIISSTAGKELERLESSIGSLTERNEGLLSEFEKTIQTLQSLIHTQESVITETNQSTNNAKQLNESIFSVTDELATIISGLNNFTSEQQTSYKDYSELVNNVRESLEQQDKSASLFKDTIQQTVYAAEMQKQAGERFTNVVSKLDEFSRSFQETLTGMKNGTTTFVEASETVCNKFDTTISRLGETHEDISLSIKGLSSGLNESIANLNGIVSGDFQKISSRSADIAEKLEGFGVKADRLVDQLTSFTDTNNKAVQLWGDYKESFEALNGEISKGVEDYQANISLGLQNLFKDYDEHISKVLGDFKSTIESFDSSIGELTDILAAQNLEVSQKHTSKIIQDFNTVLYKFGGKMDELKAVYQEATAVRMTGK

SEQ ID NO: 4547 - protein, 242 aa, Desulfosporosinus sp. BRH_c37
MIIKRLKRNKKQDNDISYWESFSDLMSSLLIIFLLVSVYMLLDYKTAADQAAKISNELKDTKSQLEKFTSLNDDIIKKIKAEFGDSLYVDDTGTLTLQSDLLFDTGKSELKPAGKEFIRKNMPRYFGILMGDPEIKKNIAKIIIEGYTDDQGDYHYGLDLSHERALSVYTFIYNDPDFSAFKNDLKDFILLTGRSETGYLQRKPNETVDEWRTRNRRVEIKFELKYQEIFEYLKKSLEKGTL

SEQ ID NO: 4548 - protein, 399 aa, Desulfosporosinus sp. BRH_c37
MPIDFYKFDFNKYMPKKLERMAKSVNVDDHYALPDTDKVKGLLDKMRNGIELRNSEVKILCYFVSIIKEESLFDRFSSACEHCFAKQERLYYHIKGLLHSFYDDFWDPELFHLLQLAFDKNRVWKEPLASTKDGIFINSTSTTSCFLNLYRYFEGFKTFAELRQGKDHVLMKENHRIFNIISLRLLEERIISIKNLDDFSVVKDLINSLKDYNTLKPCLEKFLLTQKFREDFDKLPIYLEEMFNVIGDILGDPYGQNRTRWQGIKDEAKSVFTLWKTQKKIGLFFGEIAGDPIRLNFWKKYSHYFYRIEYYEKYAGAILMETNQHLFVEFAEMGALYMYNVKNLSINDVDRYFKSGLGKTAMIVRLKNKSIAKLNLRHLSRWQEPFQREFDYFGYKMRG

SEQ ID NO: 4549 - protein, 1163 aa, Desulfosporosinus sp. BRH_c37
MRFGVDKLKSLIHSIKVRTLTPDFSDSAKIRISLKESGRNISFESADDQVHLLTNMSNLLLSEDKLFLEMPYAEVYELYYDEENNPIDDYRYLNLPPIFDGIIYIENYGNFSESDQVMYNFKFQDGRDHDIRKLRNNIVLVDGNERVLSPEMYKCLNMVAQYNQNETLSRDVASQFELLAFIKDYAERTAIALNQRLSIENKPIILDELKLDFTKTPQGLEIKPTIDSKSQEFNHLFVSAFDNNSTVKNFYTVKENGKDVKVVIKNKDAAKKIKHNRVLTGEREQEFYRGENELLEDESFDVSLYGPRVKGLGFLNYRANISASNNRDESWFDFSKAYEPPSMVTDELVFPWLPEDRDMLQEKLVEMDRLERNVTDLELKKEGEVYKVFVDREQLKEEITKITNAFLDLNQIKSVKTLNQVIEKSTANPEQKYIEHQGRFIKNYGQEVFENRIAELQEEDKLSKAKPKEPTLLIKDNLTELNHREDGRATREMPFETPRSLKIKLFEHQIEGVHKLQTLFQASITNGFLLADDMGLGKTIQILTFLAWLKERGQLSPTLIVAPSILLNAWDNDEPTQAGEIQKFFQPDTFKTYKIQGYRKDFQKDLRIIENSDLVLITYESLRLNNIWLGRVHWKCIVCDEIQAVKNPKTLVSVALKAQNGDFKIACSATPIENTTEDLWNIMDFAVPGVLGSLSQFKGQFVKPIEKLTSDQDDERKILNDQLVQKIGDNFLRRSKEDKLKDLPNKKVVVHLIEASAEEKKRIAEINRLRQQGEPSLPLIQKLVACCSHLRLESNFDPSKIAPKELIAESSKLGYLKKVLDHIQAKGEKAIIFTPFRQMQIVLFQALKLWYSIQPFIINGTLSTDKRSQILSSFRKKKGFDVIILSPLAAGVGITLTEANHVIHYTRLWNPAKEAQATDRVYRIGQMKDVFVYYLILSFESSSFFEFESEKKYVDYFLNEKTFGKTPEEKMNRLLIKKKNMLNNFFLVAGDQAADLKGEWDEEDEAAAPLTLQDVECLLKPSEFKALCGMLYKKLGYQVFLTASSGDPGVDMVIQKDGKNGLIQARMLGDDLPHSALEEVMGAKNIYCNQLEIRIAELIVISTAERITETFKNSAEKYNVKIILRQELKRLLNETKIYYGELENLAKDRFSLEQLKKIIGSIL

SEQ ID NO: 4550 - protein, 483 aa, Rhizobium sp. Leaf202
MFETLRQAGIATRDLVLHLASLLKEPPAPGLFSLLLLLLLVVLVLVFFSIVSRRTKVLKFATHLVKKTSGAGGLQQDFEDIQNRLTKQKGSAARHLTDTWKEFRDTTIEPRPGSALGVRNSIRPSVFFNLEDMGFSVSGWRFVPGFLVSIGLAATFLGLIAALQQTGESLKGGDQAQVREALTQLLSVASAKFIMSLTGLLCSIIFTAFLRVCGHRLESAMRKLTHEIEIRMNFVSLEDLAERQLEAIVDQRDHMQKLNHELIAAISKPLENALAASNTHVGTMVDDISRSLSTGLAAAMDKASDRLESASESLNGLATKISGAAEQFTMAAERTAVGLDGAARRFELVTDNLSRAGSGLADAAEPMVEAINGTATTTKQIADASIEMVESARQALNSERGVVVAAAEAIREQIKSFEARAASYDGQLEKAFKAFSTEISRSVSEVENHSNAVHQQYADALSTLQAVIENAKAFSPESERPSE

SEQ ID NO: 4551 - protein, 310 aa, Rhizobium sp. Leaf202
MRGVGGTRPQEEEEESVFISMADMTISFLFVIMILLAFFASQFTDPETVPRSQYEQVLKQKDDMEKELRQVQTIVGAPDLQVSDEIQAMKDEIEELRRRLAMPDAPNQMEVYNNKVSETRRALLTSLKKQIDDEIKGVNVSISANFESLQFSGDGLFETNADVPTAAGSLRVSKIAEILDRNLGCFSLGARKRFGPDCNPGYAVIDSLQVEGHTDNRGTDMLNMRLSANRASSVYSLMTSQRPDLLNFNNRNAQPVLSVAGFGKGRPIQSNATDIGQDANRRIDLRFIMAVPAKEADISVIKNALTEVPR

SEQ ID NO: 4552 - protein, 443 aa, Rhizobium sp. Leaf202
MSLIETIRASRIVRRRELAAPTELTQAAAKVKSAFPDVINATPVSVEEAIQRVDIALRKWDWQHMTVGTISLAVRAFLSGDKVSLAVDSFLKRELEATSSSILLDAVAEAYFSGWTRHGESTRWLSSILQSRSSYLSFRWRRLFVAVPELLDADEAPLRLAEKMLDQADPFQWLLDAGFAAPHAGQLSTEAYLAWLKLLPAVFTPQHVERIFNWIRPVGNKPISDDLAARAVEKLLEPWRTDMPTPDFRMLLTDRIIEAFGDPRYKDKTGAKAKAFWPLVAPDRRNILLRWLAGQSIDALLDVITKATGNHMWPPRHYFWKSLYDRGLVTEAWIALSKPAMDIAGRLFSDREDRLGQTAALQNASGNKKETCLLIMKVGRYTVVEGSHDYRIHLFLNTDRRAPALYEGEYNAEKIMLPQNDRMTRIHDIHGAWKNWVEERVLR

SEQ ID NO: 4553 - protein, 1069 aa, Rhizobium sp. Leaf202
MKFEFRFDQDGAFLTIQTEKKGWLSSFRREVQPDLSKLPREEMDTALALSRLRQLDPNNALHSVDSNMVVIRHPLVARLDVRAAKSLGLPPLLHDVTFRARLVGTVGSPDFRIEWWWERAGRRVVLPLTGAFLGPPSNVMRVPEPIYLAIAEAEKLGKSGALTDHWLALGRFRRLFDGEGENDRTSLEGFLRDVSVVTCGSVGIGFDPEDDTKFFPLPFADNHWSADGATARTSALLHGDELNKFKSAALQRGSQPAFRVANGKFLIVDRSAVPVINAITAHAGKDEEGRRAFIADAGRIVAEAIEMDLRREGRLTTLMSPEARTEKIEEEVARAWIETEEWVSRVVGVGKWQVTTIDGIQGSGTRWLQEGIDTELGERLAAIPDEDLFEVIARLRDALQKGLSTIQHDVGEIPATNDVIEALSRRLADFLRRQESEEAGTSLDAYLPITHDNFWEVDFKASVQRRTGDFDDVTPALVKSALQNHQLKSLKWQVNAWQAGVPGILNADEQGLGKTLQTLSFITWLREEMTEGIIPRKPFLIVAPTSLLLNWEAEIERHLEPGCLGKPVRLYGDYLGDYKKPGGGKDVRDGEARLDISALANAEGGCAVIITTYQTLANYAISLMDLDCSLVVFDEIQFLKNPVTMRAKASKAVRADFRIGLTGTPIENSTKDLWALVDQLFPGALGALAQFRRVFDAPTEASMAALHSALFRGHKGYPALALRRLKTDAAPHLPTKVRILHPREMPNAQMLRYDEVRAKGGGILALLQHMRRVSLHPGLLDGETIEEFNLSSARVSAAMDILRHIKSKNERALVFVENRDVQSWFAEVVRIEFDLERVMIINGDTTIDGRKDITDRFQRHLVDDRGFDVLILGPRAAGTGLTLTAANHVIHLSRWWNPAVEEQCNDRTHRIGQTKPVTIHIPLAVHSGLGRGSFDCLLQSLMKRKRSLADRILWPGDVTEGETKMLYDAVLAAETTSDLKSMNVDEILEGRSDLHFEELAKNSIRVKPTRGGASIIVSADAAVPMPLSGEDGDAAVITLSKQSRVPAGVVVPQSELTTATLWPEYILPD

SEQ ID NO: 4554 - protein, 747 aa, Sphingomonas sp. Leaf25
MIEDVILPNRLVAMVFGNAWVGFGLALGLLAWAVGIIIWNYTRYHRPFSAALAVRVDATRIVEDQPDDHEAQTTFAAHYNSIEAAMLSGEGRAKELRHAWVQFTETIVDTNETPMRATTRPEGYFLHLGDDTRVLAWWANIFVALGLTATFLGIIAALVGAVQAMSGGADMGKMQGALIGLLTITAAKFWTSIGGVVASIILRRFDRKWHSANEQKLETLCDRLEYGTLFSPPQRIAARQLRELEQQSIALTDFSQQLAASIGDALEAKLAPVVNGLGGLQTSLGEQLAPLTDIRTSIDDFKSGSLNDFGSKLGDAIKENAGTEMQGLANALTRMTADLGSVNDRLEGASGEASAQIATAAREFSVASEAMTRAFSDLNGNIDRMATRLADQADEAEARNQARVAEDRDAYTQIATGQREVMRTMGEEMRAASTVATQEMVRAVQAAVREAMGESQTAIRGALDGFAGATSGIQIAFDQMRAQVAELGQALSGSASDAAERNAEVLARAGAALEAAAAQAQSGLSETLNDAISRSTEASSQAIAAAFATFGERFEGASAGLISTLTTTAGRMEALAGAIERSTGAANDHAGKLADAGREAQAVSTMLGRAANDVSGAAGPIRDAARTISESVGQSQELLRRANEQGERQQSAITSMSERLERTADSATTAWENYRARFTEVDESLGKALEQIRGASSEHATALNTHVGRIDGALADAANRLGAALEPLAEIGQSLEDVVGRLQQGQR

SEQ ID NO: 4555 - protein, 227 aa, Sphingomonas sp. Leaf25
MADMMVGLLFVFIILLLYFALQFQQKSKALSDAGEARAQLLTELKREIERSDQTLKVTIDPVTGVLTLPAAVLFAKGDDRLSAGGQAAVAAVGRAMARVLPCYTLPRRSAGCSYVTERSIDAIFIEGHTDSDPFTGNGRIGDNLDLSAFRAANTFRQLRTLELGLDGLRNSAGQPILSVSGYGEARPVPNNPGLSEAQKSLNRRIDLRFLMDTPKADDLDDLLTRQQ

SEQ ID NO: 4556 - protein, 409 aa, Sphingomonas sp. Leaf25
MADAPFDPRTLLRRDLRRLVSELWEDERCDSVAIPVLEAAIGTDAKSLDRAVIGAYLRHFPRAHPAFEPLRAASALGAGRRDWPWRARGERWQLWDASAGPASLAQALLGADDARTTLREIGLDGDLAEGEFVIDALETACDQVGSASDEAATKAGERLIGLFERLGVTNLDAHLAWALLHPWRDRTPPDTYRERLTKLLVDRIGDPRFQRGRWDAIASEMPGVAASALVDMVRRWLVHRDFRAFFSIVGAVTNDPKQWASREEFWLGYLDSEVVEDACFAFGRQADALAEIGRSGGDSLDYAEIMGGGADPTHSALIMAIGDLRIAEWSHNGSCRFWDKRDMKAPGLYQKQYFGMQLRAMNGGRPYEQRFAAIPHSSGWQTHFAGFIFQMTGIRHPRWGEGSSRRSYA

SEQ ID NO: 4557 - protein, 1194 aa, Sphingomonas sp. Leaf25
MPDPTVRFEAVGNVVTLVRETPSRLPFGSASAGTVPVDQWVIARPAPAAAAVARLLQAIEDGEMAGDGRPMATVEANRAILHPVFIACLNDSEAVALGLPPATRLSLNLRSSGLIHKDGFRIETEWTRAGGVRERATIAEHRLHHAGKEWRIPEPLFSTILTVARVNTASDASTRQAALADLKTTIGQDAAARIATDGHIDRLRLSYASGFSLVLRAGAAGFDFDPVLFGRERLEAAANGDPLDEGADSLLPPALAADFMRRFRNGDGTRATYLLGDGSILYIDPQLTRVLGTVRRAQDADPDTRRAFAAAPQRYIAEALQNAGDTPADAACLFVETQQFSQRVAGIDLWRKPVLPWIKPKPSSWLPERFGLRIGDGDDARTITIPPERIDEAATAATNALREARASFQFEGETIPATRATVASLESLSELTAAARTATRPGNTDDQLPAPLRQRYFLQVRDNLDDLSYSPLTGTAPSAAPPPPAELPTSLRSAPKPHQVTGFRWLADCWRANMPGALLADDMGLGKTYQVLAFVAWIREQQAHPAPVLIVAPTGLLANWRAEILQHLEPDALGRLISAYGRELGELRGEAGRDIDSGASALDPAAWEHAGIVLTTYETMRDYHLSFARLRFSAILYDEAQKLKNPASQITRAAKTLNARFSLAMTGTPVENRLQDLWSIFDVVHPGLLGSSKAFEQTYPPEPKPLEALRDRLTEPQGAIPPVLLRRLKEECLGSLPRKILQAMPMPMPPRQAAAYDRAVHQALAVKGTGERGRMLEVLAALRGVSLHPVNPGEAGEMAEYWTDSARLCVLFEVLDQIAARGEKVLIFCESLAMQGLLAAEIRRRYDLRHIVSRIHGGVAGDARQREVDAFQRRGPGFDAMILSPKAGGVGLTLTAANHVIHLSRWWNPAVEDQATDRAFRIGQTRDVTVYLPQSVHPDPAIAETSFDLKLHALMERKRALSRGLFAATEDVSDAAELFDAVVTDAAPVPGAAPPAAAVHSEPSAVTKPTGLRERLSLRVRPKPEPAVPPPTPATTRTLAWPQRVVYQPDTPRDLTIFTAPVAGDPPVEIHIVDPYAAAGQRARDATTAFVAMLVGESPAPARVTLTTYDGESIERPPESSAQQYEAMQARWRRDFAATPLTHRQRSKWQAADLHDREVRVLTQSGRTVLWDLGRGIDGVMSTRFGFRVNVTEI

SEQ ID NO: 4558 - protein, 483 aa, Rhizobium sp. Leaf68; identical to SEQ ID NO: 4550

SEQ ID NO: 4559 - protein, 310 aa, Rhizobium sp. Leaf68; identical to SEQ ID NO: 4551

SEQ ID NO: 4560 - protein, 443 aa, Rhizobium sp. Leaf68; identical to SEQ ID NO: 4552

SEQ ID NO: 4561 - protein, 1069 aa, Rhizobium sp. Leaf68; identical to SEQ ID NO: 4553

SEQ ID NO: 4562 - protein, 679 aa, Methylobacterium sp. Leaf123
MSELVSAFGIAARNAVLTVAGLLKSEAVPGLIAVVLVLALALLIVLYARSIAMRVAAVRGLRLVVRRAADEASFGQSIADLDAEVLRSGSRGARKQIATAWDKYRETLVEHDEDGAVILRNSVRPAVFFNADDLGFGAGFWRAVPGLFVTIGLFLTFLGLISALGAMDLSTPDKVQSSLRELLLVASAKFIMSLTGLLCSIVFTIVLRWGIGSIEGALHTLCAEIEKRLSFISLESLAAEQLRATREQREHFRLIGLELVAELGRPLREEIPAAISASINATMGPLLQQVGQLGTDHMGSMVKDLSARFSDDVGRALAQASERLVQAGDRIGELSTRMDQSSGRMGSEMDAAVARLAQAVDDLRDTMSATAASASGAFTDGADRLLGAMNQTLQEIRDNTRAGAEAMGAAAADMRGAAEGFRTELEAATRSGATEAAARMQAAGSEASAQISAAGSTVVQAFGRTASDIAEATREVGARAAQDLLAPLDGIAARLRETADGIAAAAGGVGRLGDGVRASAEAAERAAGAFRGSSEALVTASAPLRATTERIESSIRQLADATQHVAGTVSRSAEQTARSAADALAAAQTALGGHAGAIEASLAGVGQVVDRLRGQGAQLDTLDEKLGAAFDTYATRVATAVASLSDYVRRMQSELAPALDTLRAVVEQAEQFIPESRKP

SEQ ID NO: 4563 - protein, 296 aa, Methylobacterium sp. Leaf123
MRGATRRLAHEEEEESAFVSMTDLTVSFLFIVIILLAFFASQLKDDQTVPLAEYRQVERERDRSATENADLRREVARLEEELRKERTNRLQTYLSAVSSERDRILRTLRDRLVVDFPELENIVSIETGALRFKGDGLFKTDRWQLAEDKRRVVTAIATRLNELLPCYTFGKAARWQASCNAAGAVIEAVQIEGHTDASGQDRSNFSLSTERAVETLFAMTGREPALLENRNSAGQPVLSVAGYGRLRPVADNTSERGRATNRRIDLRIIMYTPQSVEEVERIKDDLRRGLSGTVLQ

SEQ ID NO: 4564 - protein, 438 aa, Methylobacterium sp. Leaf123
MSLDATLARLRPMEPPALPNLKTLATAAERVLHRWPDAAPDPPERDREQLVQRMEAHRAEERWDGVRMSLVTAAARAVFDATRRSRPDLADLRGFYIAEIRASHRTTFLGAMVSVYLESFVPAASHTRALAEALSGVRDRLGARWRTLVEGIPEVFRPDLAPEAIARLMVGMRSPYSELKALGLRAPHAPGLMDFVHDAYVARLTPHLTLRAEIEQLLSWLKPDDQAVARSSGAPAAIEALLGHWRTGNPPEADIDLITRSLVAFYGDPRVQQGGAWASVAPDCLAVILRWLTGKDIRFFMDVVSAVEDSHMWEPRRRFWLKLHAQRRIDAAWVAFSPSGAEYARRLLKSGGERGVVSYGQQTAGYSRANTSLLILKCGNKIVVEGSHSYKVHIFREGHPRAPALYQRAYDCEQIRLVPGAESRSHLGDWQGWVEERI

SEQ ID NO: 4565 - protein, 1033 aa, Methylobacterium sp. Leaf123
MVSPALDFTFDPQGITLSRSTRGGLLGRLGFGRDRRELDRLPLAERTLLLAIADLRAAAAEKPTELLEITPEHIRLSHRLAAALDAETAASLGLPPVVDLSLRTDAEGVLGSPSFRLRHEWVKNGQRQTVQRVGAILKTSAGPRRLPEWLMDAVAVSEGFEAGRNESQHWNALARFRQLLDPGVRVAEPTAAARVSMTDFLGGLEVRIADRFALAPTAEDDFEVVPFSGRELARAGYDEAAVGVPEGAGELAGDLLRGFQERVRSRGALSAYRLGPGNFLVIDSAASPALSVMARMQHAPAAERKAFLRNPRPLVTQAVEAALRSAGRLDGLDAVGEEEAIEAAALPLFVETQEYADRVTGVGVFRKPELEIGPGSGTTWLPEAFAERLQGALAALTPAELDDLHRQVSQAMAAGEATVALAGFDLPARAEALALIGQYRGDEAATEDAVEEKGPSEPVVLETVDNFDELKWVARLKPRSTPGGEDVPSTIRTDLKAHQRTSFEWQVAAWKAGLPGILNADEQGLGKTLQTIAFLAWLKQQAVDPGALQRGPVLVVAPTSLLENWEQEVARHTHEPGLGHLIRLYGSGIGARKRAGESGRDIDAGESKLDLAFLHKALAEGRAHRSWILTTYTTLVNYQHSLREIPFSAVVFDEIQALKNPASLRAAAARAVRADFRIGLTGTPIENAAVDLWAIMDQLAPGSLDSLPEFRARYGTPDATNMAELHRRVFTSALPAQPLALRRIKDVVARDLPEKARRLHPRAMPERQSAAYEDAQFKLAQGGAGAAFKMLHHIRTVSVHPNLDGAETDSAFVEASARLSAVFEILGVIAQRRERALVFVEHRRMQHRLVELARARFDLPRVDLINGDTPISQRQAIVNRFQRHLEGEPAFDILVLGPKAAGTGLTLTAATHVIHLSRWWNPAVEEQCNDRVHRLGQTRPVTIHLPLAIHAGYREGSFDCLLHGLMHRKRRLAASALWPMGDTQADVGELTRLLDGAAKQEGADPVRSAIAAMFARDGLEAPVWEQDGSIRVP

SEQ ID NO: 4566 - protein, 685 aa, Acidovorax sp. Leaf160
MNLQSILATAPTPVLATGAVLAFLILVFLTVFLVPGVLHWNRLRAIQKDIQRFDSKNSASEFKKVFARDRRLAHLWKEYQDSLHIQREERDGQLTVIATRATAPAELYFNSQFVVDSRLRTEFFKHLPGLFTGIGIIGTFSGLIEGLRQFQVSENAATVRDSLQSLMHLVGEAFLVSAAAIAAAMLVTFIEKLLLASLYRRTEEIAHDIDASFDSGAGEEYLSRLVRASEDSASQSKILKDALVKELGELLRELTSAQITASKDAQLQLVDRLTQTSKEQVDASREDNKALGATIAESIQQSLQGPLQDIASTVKAASGDQSATAARMLQDVMASFSQRLNDLFGGQISGLSDLNQQTAKSIQDAVGTLQTLVANIEESSRRSTDTMAERMAQAIEKMEARQEAMNAQSAAFIEQIRQLVASSQSETNTKLQATLETIGTQVAGMLATLNDSQAAVFESNRAREQVMADRTTSAVNSMSESVEAAIKEIGVASTQMAQNVAVLTQTTSTSVDKMNAGAEQLGAASRNFAAAGERVTGVLGQAASVTAKLAETSGALTAGASTLQDLLRDYRVQRDAVGQLVAELRETVELARKEASLTTDILARIESSATRLGTAQKQADEYLEGVSRVLGEAHTTFATEVRRTLEKANTEFHNKLGAAVGLLSSGVQELEVTLASMGNMKPARV

SEQ ID NO: 4567 - protein, 236 aa, Acidovorax sp. Leaf160
MVGAKLVIKRGGRDEAEKPFWISFADLMTALMVLFLVVMGVALLAVTKNVTEREKAEEQHRKDIERILERFTEAAKRYDGIKVDKERRVIDFGDRARFAFGKSTLTSDQESVLRQFVPEILTLANEDLGKRVLKRVVVEGYTDKTGSYLSNLNLSLQRSQRVLCTMFATSGTNVLSAPQKEDVRSLFLVGGYSFNAAKETDEESRRVEMRMEFLGINEHRAPAPVESGNFGECALR

SEQ ID NO: 4568 - protein, 445 aa, Acidovorax sp. Leaf160
MAKSYFTYDAFGDNVRATARNNWKLLREYLHDKNGLIKDQHINPGWVATATGNRQLFGESPCAPYIDELLRGDASAIDHLCAELGIAKASWFLRELVLAQIRGATQLSDSQFKGLLPRMLELLANNDVLRDRGLVMLLDRYVKVPGMHLQQNLRDWSVLWWGNPWLPSNETRWGGVVPEARSMVSDWLKLEFIETFFTKLAEDGLGDRRRMEFWKRYVKAIDNIEFALGSTARNARDRDFVALRKKMDGLICHLDASGSNNAFIMRMGDLVAVEFSGMGNALYGYDARRTVPFDTAEPLRLPQYDHNSLKQKNRSILWLSHQDGINGWSKWEQMFDAKLREEFGIKPQTAATRVARPSQPYSTRTPEDLPPLREQPAAEGAGAEVPRHYNRFALNKLSHRLGLRIEDRTPKGGSLWVLTDDSDRQVSEILSTWGFQHKAGKGWWR

SEQ ID NO: 4569 - protein, 1250 aa, Acidovorax sp. Leaf160
MFQLFKKNAAPPSEWARRWSPTGLVIARGPGHGGGVHLRDPMVGGFLTQLADDGLAVEVEDGFLLGWDALYAAIADAAYASLPEVLSTPPFTKARPVLQSSNSLTDGNFSIALAGWRDRDGAPQDWELTGPLMAREDCSELMQPKQWELFKAVVAFARRPASERTDIAHRQAWGGIRKLALQAGAQLDDFLYRSVVLTPEKLEIGLRRSDVVDDDHVVEIEPGFEGAPSNWLDAFDRSKDVRDRYDIVTPEGIIQILVAPKVRTVLQEIKRLPGRRVAGSRAQAFLVNPYATLGDDAVDVIVESQFEQAREDAGLAYERFTPVFERDASGYPLQVGLLIETANTSGPTTSQTEWLDDAQLDVFVRTLHTALTRNYQLVAWHGYDLEVQGDTQRHLEELKEALARRSAPPTLVSYAQVHDLSGYSSRVEGIGVEKPYYSPYITKKDEGEGWFPENVLPVVVYQPADGGEPVAVPTNKAAIDRLENAIAAAQQSGASTVKASWLPQDIPLDEATAIVKTFKEVFKDLENRTAPPPTLPPPPPSAQKKQLVLRANIQALEYEELRRDALESVPSEPKVPKAIRAEYPLMKHQRDGLAWMQHLFSLQTDYQVRGAVLADDMGLGKTFQLLALMAYLIEKEPSIEPMLVVAPVSLLENWAEEARKFFREGSLPLLTAYGDALAPLRVPRAQVEQRLQTDDGLVKFLRPNWVGDAKVVLTTYETLRDLEFSFAAQKWSLMVCDEAQRIKNPAAMVTRTAKKQNVAFKIACTGTPVENTLADMWCLFDFVQPGLLGALNDFGQRYRKPIEAKTDEEKARVEELRNRIAPQILRRMKADVATELPKKIVVEDCRKLSLSSTQRNLYAKAIDSFKKRGDPDHPTPFKNHLGLLHYLRLVCTDPRPHGLNVFKPEPTKQYREKAPKLDWLLAQLRQVQKKQEKAIVFCEFREIQRLLQHYIEAEFGLKPDIINGDTSASASHTASRQKRIKAFQEAPGFGVLVLSPVAVGFGVNIQAANHVVHYTRTWNPAKEDQATDRAYRIGQKKDVYVYYPVVWAEDFTTFDVKLDRLLTYKRGLAEDMLNGSGDVNPGDFNIADVVPVADSLDIDERVTLDMALRMSWQHFECLTGVLWMKQGYDCYRTPGAADNGVDVVALASSKGKLIQAKTSGNQGTSLNWDAVKEVVTGEAFYRRRHPMVDFDKVCITNQFFNRQAHENAALNSVELLDQTHLAELLGRHTVTMLEVERMLYSEWSDIPSNQ

SEQ ID NO: 4570 - protein, 679 aa, Aureimonas sp. Leaf324
MLELILAVGNSVREHVLGVAALLKNPASPGLVTLALISVLVAAILQFGLTVKRRRSALNRAQEIISSATDAKTFSSSISRFDAQIRALAGSSEQRHVRAAWSKYRETLVLHEEEHETILRNAVRPATFFNLEDLGFGAGFWRIVPGLFVSVGLFLTFLGLISALTSLDLTTPDQVQTSLRELLTIASAKFIMSLTGLLCSIVFTIALRIGLGRVDQAIHQLCGKIEQCLTYISLEALAAEQLAATREQREHFRHIGLELVAELGRPLREDLPLAISTSIASAMSPILQQVGQAGADGMGSMVKDLSSRFSDDVGRALSDASAKLAEAGERIGHLSERMDQSSGRMGSEMDSAVTRLSQAIEDLRNSMGSTAETASGALTKGADHLLSVMNQTLEGIRDNTGEGARAISAAAFEMRGAAEIFRTEIEQASRSGSEAVNARLQNAGDDASNAIGTAGRGMIEVFGQTSGELARVASDLSEKAARDLFEPLDRISEKFSVILDGLADGTTNLRRLSDGMRAGAEASETAAGNFRSASNDFVQAATPMRAIHERIEAAIRQLSTSTQTVAETLSRSAETTARSAADTLASASQVLGGEARAIESALSGVATVLERMKGQGDRLDEMDEKLGRAFEIYNERVAAAVEGMFDHVRRMQAELSPALDTLQSVVEQAEQFAPESRRR

SEQ ID NO: 4571 - protein, 332 aa, Aureimonas sp. Leaf324
MRGGTYKRHHEEEEESVFVAMTDMTVSFLFVVMILLAFFASQIQDEDTVPRAQYQTLENERSRLQSELNAALRLQQQAEDRLRELERDLQRQAEALNIAIAAKNAADERVATLEAELARLDQKDPLEIYLAEVADQRRNILESLQKQLKIDFPDLQVVVSEELDALRFKGDGLFERGKSSLRPDKRLIIENIAARLDETLTCFTLGSTARWSETCNEIGAVIEAVQIEGHTDADGPDNANIALSTARANETFFAMTARVPSLVDHFNTRNQPVLSVAGYGKMRPIAPNDTLEGKATNRRIDLRIIMYTPRSADEISAIADKLRSGITHGAPL

SEQ ID NO: 4572 - protein, 437 aa, Aureimonas sp. Leaf324
MMLKELLSRPTSFEAPALPALNRLIATKERVLSRWPDVTPEPAEKDRERLVAEMRNRVVRDQWDGAHLSFVTAAARATFDAERQGRSDLAELRAFYVDEIRASTSRTFLSAMSSVYVGSFVPGAQHTITLAGALQDVLVRIGSPWRQLFEHVPAILSPSGASKAIAELMTTMTDPFNELKRIGMRSPHATGLMDHAHVAYVETLERELSQRAGLDRLFQWLRPDGQSARVSGGAEAINAVLGHWLTKNPAAADVTHITQSLIGFYGDPRIQRGGAWAGVSPDRLAVILRWLTGENIRFFLDVVSAVEDSHMWEPRRRFWLKLYEQGRISAAWVAFSKPAAQYARQHSSMHGSTGMLNFGHQIARGGRMNTSLLILKIGQKIVVEGSHNYKVHIFDEHSVTSPQLYQRGYDCEKIRLLPKANAKSHNGDWQGWVLERV

SEQ ID NO: 4573 - protein, 677 aa, Rhizobium sp. Leaf371
MQFVISIGDFFRASILHLAGLLTHESAPGFIAFLLLLALLVVSVAFWRRVSKQRRAVVWLRKQISASANEIEFSRDIDALCAKITENAKSPEQRQLAHAWTEYRETFVPHEEDGNIILRNAVRPSTFLNVEDLGFGAGAWRIAPGLFVTIGLFLTFLGLISALNAMSQGDEINSATMRTLLSIASAKFIMSLTGLFCSIVFTVVFRRVYGLLLKATHGLCESIEKKLTYISLEALASEQLQAVREQREHFRIIGMELVAEIGRPLREELPKAISASISDAMAPMMDRVGKLGAEGVGDLVSGLSNKLTDTVGLALSDASQRLSEAGMKIGQLADRMDQSSGRMGSEMETATMRVAQAVEELRNSMAATTQSAGGAFTQGAERLLDVMNQTLEGIRSNTGEGAQAMSAAAGEMRAAAESFRSEIEAAAKSGTEAANARIQAATSDASGSISAAGQNVVDAFGRTSAEIARISEQAAMKAGQELMAPLEGIAGQLKEMITGLNQSNADLRRMAEGVRAGADASSEAAGTFRSASGDLISAATPIRSIAERIDTSVRQLTDSTQHVASVVSRTAETTAQSAAAALDAAEKILGQERLAIETTMSGLKTLVDQMRGQGDRLDDMDSKLGNAFDIYTEQVARAIDGMFGHVREMQDRLNPALDTMREIVEQAEQFAPQSRRV

SEQ ID NO: 4574 - protein, 326 aa, Rhizobium sp. Leaf371
MRGGFRVQHQEEEEESAFVSMTDMTVSFLFIVMLLLAFFASEYSENDTVSRTIHEEVVAERDTALEEIKKLRALISDKEKRIDEQSVELDTQQIEIAQLQKKIAELEEIIAKSKKPDPLEAYLTRSAAERRRILETLRNQLKVDFPDLQVVISEESDALRFQGEGLFDRGISTLKADRRAVVEKIAARLEQILPCYTLGPKKSWNLECNPSLSIIEALQIEGHTDSDGTPDSNLNLSTARANSTFTTMTASKPGLVDFQNFRNQPVLSVAGYGQMRPIRKNDTLEGKATNRRVDLRIIMYSPSRSDEIERIRASLEKSDGVANGNP

SEQ ID NO: 4575 - protein, 437 aa, Rhizobium sp. Leaf371
MGILEKLKARGRFEAPALPAINRLWSATERILSRWPDVVANPPERDRERLVAEINRRFQSDDWNNTPMSLVTSAARALFDEERRERPDLADLRRFYYDECRVSTRMGFLGAMASIYIGSYVPTARHTLELSEVLREARIRLGGRWKNLLERIPEILDPFIAHEAVAQKMLPMDDPWSGLKSLGLRSPHSNGLMDHAHLAYIRSIAPELKSREGMARLFGWLKPDNQEAKLTGSADAISACLGHWTQAVPPEDDQRYLLENLIGLYGDPRVQRGDAWTGVPEQLMSVILRWLTRENIRFFLDIVSAVEESHMWEPRRKFWLGLHQQGRIDAAWVAFSDRAAREARTRSKQSGSRGTLRFGRQIAGGGRSNTSLLILKVGRKIVVEGSHSYKVHVFDATNLRAPALYGDNYDCDDIRDIPGAKAKSHQGYWEGWVLENI

SEQ ID NO: 4576 - protein, 1033 aa, Rhizobium sp. Leaf371
MEFDVSFDQSVVTLALREKRYGFLSRLMSRKATTDLDSLPIEERDLLLAVADVRAIGDEIDAPPRITSNAIVLDHRLVAALDARTAEILGLPAVVDLVLKTDVEGIVGASNFRLRHEWLRNGQRQFPKRIGSILETANGLRRVPLWMMDAIETSEAHRPGNGDSTDWEALARFRQMLDPGTDGENKGPAARLSMTDFLSGLQVRMADSFSISPRSSSDFDVVPFSFQRLERDLSGFDEISEDMGEIRNTDLGIFQNRVRERGALPAYRLSPGSYLVVDRSAAPALQVMGEMQHAPAAERQDFIRNPGLKISNAVEASLRSQGKLEGLSPQAEQEMIEAAAGSLIVETKEFSERVTGVVTFEKIALDITEGSGTTWLPEEFSRKLGEALGAMPRSDLEALRERVSSAIEQEKSAVELGELSIPARPEMLSVIDNHLSAAAENDDGDNVDEKTDEGKRGPVVLDTAVNFEEVSWHAKLTPRSATASSGIPTSIRTPLKPHQVESLQWQIEAWKAGLPGVLNADEQGLGKTLQTIAFLTWLKSHMAETDAHNKGPVLVVAPTSLLENWEQEVARHLHDPGLGHLIRLYGSSLGGRKLVGAKGRDTDSGDAKLDLSSLHEAIEEGRAHRFWLLTTYTTLTNYQHSLGRIPFSAIVFDEIQALKNPVSLRAVAARAMNADFRIGLTGTPIENAATDLWSIMDQLAPGSLDSLRDFHGRYKEPTADNMTDLHARAFRPNKDCPPLALRRLKDEVASHLPKKSRKIHPRLMPEGQAIAYDDAKLKLATGGLGAQLKMLHHIRTVSVHPSVQSAWSDEDFISASGRLTAVMDILRRVHAQGERALVFIEHRQMQYRFVELVKAEFKLQRVDLINGDTPIPQRQAIVNRFQRHLEDDRGFDLLVLGPKAAGTGLTLTAATHVIHLSRWWNPAVEEQCNDRVHRIGQTNPVTVHIPMAVHASYQDQSFDCLLQSLMMRKRRLASSALWPMGDTQDDVAALQQLMSAEKTGDKGDPVRAAMQGMFERDKLRFPAAEADGSLAID

SEQ ID NO: 4577 - protein, 677 aa, Rhizobium sp. Root1212
MQIIISTGDFFRTFILYIAGLLTHESAPGFIAFLLLLSLLIASFAFWKRVNKQRRAVLWLKREIAASADELEFSRNIDALGAKIAENAKSPQQRQLAHAWTEYRETFVPHEEDGNIILRNAVRPSTFLNVEDLGFGAGAWRIAPGLFVTIGLFLTFLGLISALNAMSQGEEINSATMRTLLSIASAKFIMSLTGLFCSIIFTVVFRRVYGGLLKAAHDLCEAIEKKLTYISLEALASEQLQAIREQREHFRIIGMELVSELGRPLREELPKAISASISDAMAPMMDRVGKLGAEGVGDLVSGLSNKLTDTVGLALSDASQRLSEAGMKIGQLADRMDQSSGRMGSEMETATMRVAQAVEELRNSMAATTQSAGGAFTQGAERLLDVMNQTLEGIRSNTGEGARAMSAAAGDMRAAAESFRSEIEAAAKSGTEAANARIQAATSDASGSISTAGQNVVDAFGRTSAEIARISEQAAMKAGQELMAPLEGIAGQLKEMITGLNQGNADLRRMAEGVRAGADASSEAAGTFRSASGDLISAATPIRSIAERIDTSVRQLTDSTQHVASVVSRTAETTAQSAAAALDAAEKILGQERLAIESTMSGLKTLVDQMRGQGDRLDDMDSKLGNAFEIYTEQVARAIDGMFGHVRDMQDRLNPALDTMREIVEQAEQFAPQSRRV

SEQ ID NO: 4578 - protein, 326 aa, Rhizobium sp. Root1212
MRGGFRVQHQEEEEESAFVSMTDMTVSFLFIVMLLLAFFASQYSENDTVSRTIHEEVVAERDTALEEIEKLRALVSEKEKRIDEQSAEIYKQRDEITQLQQKIAELEEIIAKSKKPDPLEAYLTRSAAERRRILETLRNQLKVDFPDLQVVISEESDALRFQGEGLFDRGISTLKADRRAVVEKIAARLEQILPCYTLGPKKSWNAECNPSLSIIEALQIEGHTDSDGTPDSNLNLSTARANSTFTTMTASKPGLVDFQNFRNQPVLSVAGYGQMRPIRKNDTPEGKATNRRVDLRIIMYSPSRSDEIERIRNSLEKSDGVANGNP

SEQ ID NO: 4579 - protein, 437 aa, Rhizobium sp. Root1212
MGILEKLKARGRFEAPALPAINRLWSATERILSRWPDVVANPPERDRERLVAEINRRFQSDDWNNTPMSLVTSAARALFDGERRERPDLADLRRFYYDECRVSTRMGFLGAMASIYIGSYVPAARHTLELSEALREARARLGGRWKNLLEHIPEILDPFIAHEAVAQKMIRMDDPWSGLKSLGLRSPHANGLMDHAHLAYIRSIAPELKSREGMARLFGWLKPDNQEAKLTGSADAISACLGHWTQAVPPEDDQRYLLENLIGLYGDPRVQRSGAWTGVSEQLMSVILRWLTRENIRFFLDIVSAVEESHMWEPRRKFWLGLHQQGRIDAAWVAFSDRAAREARTRSKQSGSRGTLRFGRQIAGGGRSNTSLLILKVGRKIVVEGSHSYKVHVFDATNLRAPALYGDNYDCDDIRDIPGAKAKSHQGYWEGWVLENI

SEQ ID NO: 4580 - protein, 1033 aa, Rhizobium sp. Root1212
MEFDVSFDQSAVTLALREKRYGFLSRLMSGKATTDLDSLPIEERDLLLAVADVRAIGDEIDAPPRITSNAIVLDHRLVAALDARTAEILGLPAVVDLVLKTDVEGIVGASNFRLRHEWLRNGQRQFPKRTGAILETANGLRRVPLWMMDAIETSEAHRPGNGDSTDWEALARFRQMLDPGADGENKGPAARLSMTDFLGGLQVRMADSFSISPRNSSDFDVVPFSSQRLERDLSGFDEVSEDMGEIRNTDLGIFQNRVRERGALPAYRLSPGSYLVVDRSAAPALQVMAEMQHAPAAERQDFIRNPGLKISNAVEASLRSQGKLEGLSPQAEQEMIEAAAGSLIVETKEFSERVTGVVTFEKIALDITEGSGTTWLPEEFSRKLGEALGAMPRSELEALRERVSSAIEDEKSAVELGELSIPARPEMLSVIDNHLNAAIDNDDSDNDGDKTDEGRRGPVVLDTAVNFEEVSWHAKLTPRSAPAGSGIPVSIRTPLKPHQVESLQWQIDAWKAGLPGVLNADEQGLGKTLQTIAFLTWLKSHMAETGAQNKGPVLVVAPTSLLENWEQEVARHLHDPGLGHLIRLYGSSLGGRKLVGAKGRDTDSGDAKLDLSSLQEAIEEGRAHRFWLLTTYTTLTNYQHSLGRIPFSAIVFDEIQALKNPVSLRAVAARAMNADFRIGLTGTPIENAATDLWSIMDQLAPGSLDSLRDFHGRYKEPTAENMTDLHARVFRPNKDCPPLALRRLKDEVASDLPKKSRRIHPRLMPEGQAIAYDDAKLKLATGGLGAQLKMLHHIRTVSVHPSVQSAWSDEDFISASARLTAVMDILRRVHARGERALVFIEHRQMQYRFVELVRAEFKLQRVDLINGDTPIPQRQAIVNRFQRHLEDDRGFDLLVLGPKAAGTGLTLTAATHVIHLSRWWNPAVEEQCNDRVHRIGQTNPVTVHIPMAVHASYQDQSFDCLLQSLMMRKRRLASSALWPMGDTQDDVAALQRLMTAERTTDNGDPVKAAMHGMFQRDNLRLPAAEADGSLAID

SEQ ID NO: 4581 - protein, 650 aa, Brevundimonas sp. Root1423
MNSVLDFILIGLELIFGVPWVAPLVIAPLMLAWTGWLSFQARTRTLPYLNAASKRVEVLQGAIGSESDPVAERAAFSANYGDVAAAMAAPAPGADPLILAWREFQESIVDETEAPVRNTNRPAAFFNRAAPRQSLLIFWSNIMVGLGLILTFLGLIVALHKASQGMATGDQTAMQQSLIDLLTVAGAKFFTSVAGVGTSLVLRFVEHGLQKRTNRVTDALCSLLERGMLYVPPQRLAVEQLDVLREQRDQLKAFNTDFALQLSERMGVEFQQAIAPVTASLGLLNDNMTSMGQGLGQGAAKAIEEASGGELRALGQTLSTLGERLDDLSSSVGSSGEDAARQIRAAGADFAQAATDIREAFDRLTGQVDGMGERFSTQGEEMARAQSDTLERMLSGLESAQTKSADAITEAVNRLQGAGLNAAETMQKEVSNAMTAGVAASQETFRVALEESGEGLRGVAAGLAKAVGEAAEQIDRAGQGFTRSGESAVRTAEAMEGVTGHAKTVAISIGDASKGFAAAAAPVAQAVQAVNEAAGRIARSLEANQQMDAEAVQSLQKLADGIRETQEAAETAWADYRARFENVDKALEQTTVRLGETLEGTFSEFKRFAADTDRELASAVGKLSGALTSIEEYAESLNDYVEAKKLSEAA

SEQ ID NO: 4582 - protein, 249 aa, Brevundimonas sp. Root1423
MILDDAHEHAIEEENYFVSMTDMMVGLVFIFIILLMYYALQFRQVTDELTGADTTRAEILAQIQASLKQKGVEVSIDTQNGVLRLPDKILFDSGDDQLKVEGQENVGKLAEALEEVLPCYTRHQSGRAVPPTCPATEHAIESVYIEGHTDRDAFSGGGRDNWDLSVVRATNTYRTLVGSRADLSELCAMKGKLCEPVLSVSGYGPQRPIDPSDTIDAKARNRRIDLRIIMVAPDSGQTVRRVERALDAR

SEQ ID NO: 4583 - protein, 354 aa, Brevundimonas sp. Root1423
MFALLDAYLDGFDQDDADVAWLAKRLTTASKSWPWRGTDPWPARIKAFELLTPSKAPGRLAAAVLGGKGDFRSILDEAGLTTEGRRIGGLGLAGFTAACETVRKLKAAQAVAAQERLIEWSGGSGTLAYPKAWPQFAGALFEPWGASEPARAHKTLIVDKAVAHAGDPRINRARWRPVEEVAGDAYAIILRWLTEASVRQFFDIVNETMTDRPDMWADRRKFWTRYLDADMISAAWVAFGSDGAARADRAAQRTGDKSLSMFGRLASGSGRSSQHAALIMKIGDLTIAEWSHNGKWNIWGRNDPKHPVLFRHNSRRLPDYDSSELMRAPTSGSHTTWWQSRVADIIKNETGLRP

SEQ ID NO: 4584 - protein, 1228 aa, Brevundimonas sp. Root1423
MINPFRRKARTAEEASFSVREDGEMLHLALAQSGVIVPTAEWANRRPDAATALGGLFAKAEDALEAGQQPSVVVLDNEIVLSPRCVAEFDAATALVLTVPPATPLALDLKPVGRIDEDDFRLDVRWVKPGGQPCRVSINGAIISCEGSQRRIPEPLWSILSIARSLTVPVDKAERFRLLALLRRHWPEDASSGVTSEPYLRDMRVHYASSLSLTLRTLTPDRTDFDPVLFGLGVADEAQSDGRALDEAFDNVLTPSAQKLFSEDRFRREADVRPVYVLRDGEYVFIDPSLRPALGAVRRLQDRPESERRAFVLNPRKVLKETLGEEVAERIALDELFVETEQFSSRVAGVDVWRTPVLPWIVPAGKNSWLPERFGLRVGDDYFEIPAENVAAVIDQVAAAAEAGKATAGVEGLLQSTGPDGPPPPSSLPVNDQLIQSLESLRPFGRSKGGEDAPAVDEDTPPAGWDAALQGKLFLVVRENFEEVEFAPFRSEEATPPPSPLRIPERLSSTLKPHQTQGLRWLVRSIETLHPGALLADDMGLGKTLQAIAFMAWLQEEAEAGRRPKEPFLIVAPTGLLGTWRGEIKKHLSGTQLGLLVPAFGSDLKQLREQDSFGQRDIETGRAALKAEAWRDAGVVLTTYETLRDYHFSFARTRFGLIVYDEIQKLKNPVSQMTRAAKTLNGAFTLGMTGTPVENRLQDLWSIMDVIAPGLLGASRDFERRHPASDTAALSRLKTQLTEAPTDQAPYMLRRLKSDALKDMPSKSVHPFEGEMPATQADAYKDLVVRAAAASANGAVGKGGMLTTLAGLRGVSLHPLNPRHAPADLDAYAQDSARLSRTLDILKDIAAKGEKALIFVEDLAMQERLAGLIQGRFHLPRMPMRINGSVPGPKRQEMVDVFQKSPGSFDVLILSPKAGGVGLTITEANHVIHLSRWWNPAVEDQATDRVFRIGQKRDVHVHLPMAVHPDPAIRSSSFDLRLNALIDRKRKLTRDLFLPPDASDGELANLFREVSLGEASNDVEEAYETEETAAPSAISESVAPHEPSVIVPPAAPPVRTTLTLPTALTNSGIRQWRVAAGGIRPTDEILALFAGKDLVDISIRDPYALARRSNREAQVQFIADLKAVARSVESVTIEYAEEVEGDASDTQSRREMGDMLTRRLTPMPRLALTRRRKRSRDDDFHDRFVDIAVRHAGGAVRIHELTLGRGVEAFYDERKQCTVTYAPPGSNG

SEQ ID NO: 4585 - protein, 725 aa, Acidovorax sp. Root267
MTPETSALISSALHWGVGALLAIAVAFFLIQFLRPGWRVGRELRDARLRLEQLKATGPVLDLDRVRDDAMVSEALRHCWDEYRDTLHGQKQANGMGVMEVRRWRATSMANAFFTDQGLIEAPLRTEFYKHLPGILTGLGIIGTFSGLIVGLQGFKVSDDASVVRGSLETLIVSVGGAFMVSGIAIALAMAVTTIEKSIINGRYTELERLCSLIDSLFDTGAGEEYLQRLVEASETSATQAMQMKESLVTDLKQVLSELTQQQIATMTSTSQALGHSITTSLTEGLADPLTRISHAVQQVGNSQGEAVNKLLTDVLGNFTEQMHSMFGSQMRGMSEMLVQTASTIQNASQRFDQLAGQIQQAGAGAADAMARRMEDTLQQMQARQTEANDQMRLFIDQLKDSVAKGQSESAELTMGMMRELSESTSALVLGLRNQAHAAEQAHSQQQAATSERLNSFLDQMQASAARNQSESAEATQRMLGQLGDSASGMVQALQAQTQKAQEEHANRESELTAKSSELMEQQSAQIARLADAVQQASVSMQSTVERLQTRAQATIDSMSQGAEKLYGASSRLGDNLDRMKTNSDGLNDMADKLTGSATTLGAALTVTQQVLGDQRLVRDALASLVGDLRETVELAKREASMSSGLVDSLQAASQRLTEAQRTTETYLQGVTDVLGEAHGAFAQQMMATMREGNKAFHEELAHATGLLKGAIQDLGDVLDNLPSAA

SEQ ID NO: 4586 - protein, 255 aa, Acidovorax sp. Root267
MLGGVRLSASKRGREEGEKPFWISFSDLMSALMVLFLVAMSVALLAVTKKVSQEEQEDRERKEAIAHLMQQVSKVVSQKEFEGVRVIGNTIDFGPRGRFEREGQNTLSVPQRALVRQFTPKLLSELRDSDAGKHWFKRAVVEGYASQTGKYLFNLNLSLERSERVICELLRAPEAGETAMSDEDRKLIATKFFVGGASFNSLRATADDSRRIEFKLEFKTRQERRDELESPPPPVDEAALAQALDPNERCPIFSR

SEQ ID NO: 4587 - protein, 645 aa, Acidovorax sp. Root267
MPHLQPLNALDHLRDRLRSELDVHRAVHAIEWGNPRVMTETLKRIRHDLGGEGNDQPAADQLQAALLRFARSRQVASFTELKYVCYGSTVPVGHDLWRMIDRRPLFEAMLELVNQRTQQPKQFRRCYQGLLSGYFGFERNLEKPGEADERWIGLRNYLADQLAPLQSTSSKRGTVPEWLNTLSEHRNLLTSDPCSRYADALARDDYTELRRVCTGLGISSNSWVWEEALMAYVKRVCQCDDAEFKKRMRSVLDLVHGKTSLTLPPILAVRAVALVVARYAQCTDHPEHPALRDTCVEWIGNPWLKRTAWDAAVNHEPARLMVNSWLKQRLIKDFFGLLAADGAADFRRLEYWLKWEPQISDMWFVLGSDAQGNRTPEFLDLRKRMSGRDRKLVDSNHLNNAFVMRIGQLLVIEFGVTGNACYVFATSDFQTSLDNAVLNLHQLKQKAYAKRLSHTAQWEFKFDYELKKLLQSVPMSKGELKEFNPISNTPDAVGHWRAQSTPVTAPKPVAPVTSHQRNSLLPPAVKTADYTGFDSKPAWPTPPPRAQQAGIRASANGAQNTDSARQKPSVTQLAGQKKRLTDVEFSQLQGLFMKHGVEWEDNRHKGGALWALIPDKNQKPSVAMVLELFRFRFTEGKGYWLKDED

SEQ ID NO: 4588 - protein, 1093 aa, Acidovorax sp. Root267
MFDALFAKKPAPPQTRKGPAVAFDSVGVRYASPAPTTCEWLALPFSYAEAADLGARLAQIFMEGFGDRLETEFLLPWKDVYALLRHPELSAYREALLIPPDTAARPRLVSKGALMDPDFAVLLDEWVDGQGRRLQPVPQLVGRVLQAPSGAALLSEPLHQLLEELTRFHGTPPEERSQSFKEQAFGRMRKLATSTGCPVSDYVARTIVLTPDRLRLAMERRGEDDGKVVEVIPGFDEAPAHWLNQFDRLPLQDSYDVPDGPSLVRVVVTPEVKAVLAEIKRMPGRRATGPRAEAFVRNPFAVLGESAEQVIDPAQFEKAREEAGIRFEQFTPHVERGEFGEVHRVGLMVEELGNESQASEVLWFANSDDLQRFTGKLGRAFTDGSQCVTWQRRELEIVGDTERHLVDLEQWGREWASPQLWTAAEVLDLSHYSDRVAEIGVEKPFVTPVIARNDQGSGWFEGNVSVGVRVEDPAGGSPTYVPLAFNDVPTLQQAVKAAEQAGQSSVNLPGLRTAVPIVDARRAVDALAKAQQQLRDHSFQPPGDRPAAEPKKRLVIKRNLEDVDYTEARAESLQMPSDREPLLPQTLRPEIELKPHQRVGVAWLQHLWEASPEHCRGTVLADDMGLGKTLQLLTFITSCFETDPTLPPALVVAPVALLENWRNELDRFFQPGTLPLLMLYGSTLKSMRVGRHELDADLKAQGVTRLLKKGWVGDARLVLTTYETMRDLEFALASQPWSVMVCDEAQKIKTPAALVTRSAKKQKVRFRIACTGTPVENTLADLWCLFDFVQPGMLGALSHFSRTYRQPIEAKTPEQIAKVEELRAVIQPQILHRRKTEVATELPTPVEDKLCKLLPMSPFQQGLYEGALKTLKEQRVSNPSAQLQALQAIRKICSDPHGYAVPDSHKAPIDKIVNESPKMGWLVDRLKALAADGAGNHKVIIFCEFRELQLQLQRVIAAFFGIAASIVNGDTSADPRAMDNRQQLIDAFQRSPGFNVIILSPLAVGFGVNIQAANHVVHFTRTWNPAKEDQATARAYRIGQTRTVNVYYPGVVSDLFPSFDVKLDALLGSKRALATDILNGCSDLKASDFADFG

SEQ ID NO: 4589 - protein, 677 aa, Rhizobium sp. Root268; identical to SEQ ID NO: 4577

SEQ ID NO: 4590 - protein, 326 aa, Rhizobium sp. Root268; identical to SEQ ID NO: 4578

SEQ ID NO: 4591 - protein, 437 aa, Rhizobium sp. Root268; identical to SEQ ID NO: 4579

SEQ ID NO: 4592 - protein, 1033 aa, Rhizobium sp. Root268; identical to SEQ ID NO: 4580

SEQ ID NO: 4593 - protein, 730 aa, Pseudomonas sp. Root329
MDFSTLLHLWGAASSEQLIAPITVVGFVFILCAWYFVRYFCPSFKLSSQLKKLTKRVHGVKALAPSQRRSELERLFNGSKLEHSWHEYAETLHDQFEFQEGEQVLVRSRATAGAAHFFSPQSVVDTPLGTEFYKHLPGILTGIGIVGTFFGLMLGLQHFDPSTPEQVNASVDKLLKDVLFAFIGSFISIMASIAVTITEKWRLGQCYRLLEAFNETIDGLFDSGVGEEYLAELVRSSAESSVQTRQLKDSLVTDLREMLQNLVDTQVRESLKLADTLSTTYRDSGQLLADQVSSAIENSLKSPLEAIAGAVQAASGDQSGQVQNLLQDVLVAFMNKLEGTFGQQFNGLHELMGQSVAAMQSMQQGFSTLIQDMRSASESSTQNSSTMIAQLLSDMQAGQNAMQAGMNEMLANLQASVARIGNEGEGAGARMAEQLEKLFAQSEARQQAMAENLQAFVESIKQNIGQGQQETMAKIAGSVEVLGEQLSAVFKQLEHGQQQMDQTTRAAQADLHQGTRDLVGGLDEQVKALLQTVSEQQKSAQDTVKALSAQTEQHLQSMQLGADKMRAAAERFETAGQSVARASESTAGLMGTVQGAGTELAQASRELNTVVADYRNNREALAKTLAVIEGVVASAQGEASGRSQYLQDLKVQSERMQALNREVYEYLENISGVLGNGFKEFGDGMDRTLRQTLGSLDAELDKAVKSLAGGVEGVKESLEDFGDIMERIRQ

SEQ ID NO: 4594 - protein, 247 aa, Pseudomonas sp. Root329
MFGKQMPSVVRSKDEGEKPFWISFADLMTAMMILFLVVMVAALSSVTQRINQAEQGEKQRNRDISQICEHLSLKAKTASKTIVVDCKDNRISFGDAGRFGHNQYALSNDGQSALQEVVPMILDAANSEEGRKWFKQVVIEGSTDTDGSYLYNLHLSLQRSEWVMCSLLDSRSPLQVGLSPEHQQQIRSIFLAGGVSFNNAKDTKEESRRVELRMQFFGLKEKEDNLKPEVPVFNNTDMEKCQLAMSR

SEQ ID NO: 4595 - protein, 542 aa, Pseudomonas sp. Root329
MTSPIARLSAAINLSLLAHRTGPAPEPLARFPRLGAAGIDLYERFERAEKALPPPQEKRRAAINKFRNVLPLNASEWRLVFAGLSDKSERVGPILDDDQLFDRVHKEIHHRIEKRRLSRRDWLALCFSYFGYEAATPDKSANWCLLREDVQLGFECVRGQQKREKEWVHIVQQHQELFSEQAGARLGDQMFKGEISDLSALQTIAQIPDSSWLWRRIFNVLISRIFMLDDAEFSQRLADLVDIGRQHPRYMNDILSACLSRYHLAAYREKPSSLLKQVALDNWGSPQIRSRQNSWLQYVEKDVCAMVVAWFAKEDLEHFFNLLKGDSEVDQSRLHYWLRFANQMSYTRIVMGADAWNDRGRDFVHFREKNKGRLSKLIGGPGHNNAVVMQIGNYFFVEFSGTGNACYVYKADDSPFNPDKSQLELTAELKQANRALDRMRHSPAPSRPNRIEGWLSKFDDSLGKLGIRVQSQAGTPGSSKPMAFEDQVRDALKSVKHKVYDQRARGGAFQVQLDDNDQAAVAALQRLGFKPVNHQPLRFWRQ

SEQ ID NO: 4596 - protein, 1084 aa, Pseudomonas sp. Root329
MLKRLLKGIGRQPNSAVENTEPVFSIEEQGFCYPLSLAENAQSWPLASYLDQLEEEEFVSQLSDRWLLTWDELYRLLDEPEHLTSLPLLGLPPQTALIPQLSSQGSLASDDFKVAVSGWRDPQSNANVQVQVQRTGAIVQRNGIMEILPESSWKLTGAVRQLYLAQQNEPGEVTNQIGWASIRKLARKAGAGMDGFLDKTVVIKPESLRLNPRKSTVGNIPVIELEPTFEGQPANWLESFDGANQVQDRYRVTGDDGSLTHVLIDPEVKSVLDYVRSLPGRRVAGDDALSFVRNPYSALGESAAQVLDAETYEDDLAEAGIFFHRFHLEPKLDEAGQRIEQVNLTLEPISPTPQAPIEVEFKAAYELAPFVHELQLKLAAGMPAGFWQGYELELSDFDLRQLAGISDLLKRWQNEAAGIEFDSVLDLSLYGDRVTGIGEAERITSPFLVKEATENWLPKDVAALGIDAEILGRWDPSDRAQFEAFEQRLDEARAAGDETVCLPESETPLSIAAAERLFNAWSKKIAPVETGLVQQQEKVGRAVLQIGHNIDEPTYVEIRQAALRAALDAIPELPSLLKPEVVLREHQLQGVAWLQHLFRLSPADVSGCLLADDMGLGKTIQLLTFLVWYLEKYPQDKPTLIVAPVSLLDNWERELHRFFFADALPVLKLYGSALSAVKFKKEEIPADLKAKGIKNLLRPGWVGGARIVLTTYETLRDQEFSLARQQWSIVVCDEAQKLKNPAALVTQAIKAIPARFRVACTGTPVENTLIDLWCLFDFIQPGFLGGLNQFGREYQRPIEAALERDTVALERLRGLIDPQTLRRTKQDIAKDLPAKIEDTACRSLSMHALQRNLYLSEISAYSQKQQIEEQLDQKTSGMLGLLHKLKLICAHPYSVQPDKRLRDNSPKLQWLMQTLESIKRAGNGDKVIVFTELRDIQRELQHSIQEHFGFRATVINGDTSTSSQSANSRQRLIDQFQELPGFAVIILSTIAVGFGVNVQAANHVIHFTRCWNPAKEDQATDRAYRIGQEKDVYVYYPTVRDAQMPTFEATLDELLSKRRALARDMLSGASDIQASDFEALLKTR

SEQ ID NO: 4597 - protein, 654 aa, Devosia sp. Root436
MLDSLVSIGLYVRALVLGVAGWLREEYAPGLVSLALVAFLALAVGLFLFRVGSKRRALARLRAEVRKYKDGAELSRNIAELDSRIKSFGRRGSAKSVAEHWTEFRETLVAYETGENEYVLRNAARPSIFFNVEDLGFGAGFWRIVPGLFVTAGLFLTFLGLVAALQGLSDINEESMSRLMNVASAKFIMSLTGLFCSIIFTIVLRIGMSRLEDTAHSVSNSLEQRLSFISLESLAVEQLAAVREQREHFRAIGMELVAELGRPLREDIPLAISNSISAAMAPLLDQVGKAGTEGVGSLVQDLSSRFSDDVGKALGQASDKLAQAGERIGALSERMDASSGRMGGEMDAAVARVAQAVDDLRSTMTAAADATGGAFSQGADRMLSIMNETLQGIRENTGEGARAMSAAAADLKQAGTAFKEQMESASLSGSAAARERIEASGSEIARLTGELTSKASEQLLAPLGEIARQMDGLVGQVAGASSEMRMLSEGVRSGAEASVQAASTFRTASQDLVTAAVPIRATSERIEGSIRQLADSTQNVATTVSRSAEATASSALDALNAAKQILSTEARAIEAGLEGVSAMLERLKGQGDRLDDMDSKLGQAFEIYTTQVASAVDSMRGHVSELQGRLNPALDVMQAIVDQAEQFAPQSRKS

SEQ ID NO: 4598 - protein, 311 aa, Devosia sp. Root436
MRGGARRQHREEEEESAFVSMTDMTVSFLFIIMILLAFFASQFNPEETVLKSDYDKALATIELQKVFIAQKDQTIADQTSQIEELLKRIAELELRLVEAEKIDPLEVYIGQTASERRNILERLRDQLLQEFPDLNVVISAENDALRFQGDGLFASGSSALRDQRTVMVVQRIAARLNEILPCYTLGPLSAWDTGCNPNGVIIEAVQIEGHTDSTGADISNLWLSTERANTTYAEMVGNQPNLVSHQNYREQPVLSVAGYGKMRPIADNDTSEGRSTNRRIDLRIIMFTPGSSEEIERIREELQAGVGLESP

SEQ ID NO: 4599 - protein, 434 aa, Devosia sp. Root436
MSLARFLAKPASFHPIALAAINRLASTTDRIMARWPDVVVEPPDRDRERLVQEMQKRLETGDWSDTKMSLVTTAAVALFDQARRERSDLAALRKFYCEEIESSDRRTFLNTMVAVFIGSYEPGAAHTAALANALDRSRAKIGARWAALLGSVPELLDARVAPSALASRMVRMAVPWDDLRHLGLRSPHAPGLMDHVHLAFVEQLAPQLDHRSGMERLIGWLKPEGQQARASGAAQAISALLSPWQSRAPSTDDERFLTEALITLYGDPRVHRGGAWETVPEQLRNVIIRWLTGENIRFFLDVVSAVEDNHMWEPRRKFWLGLHQQKRIDAAWVAFSPEAASYARQKGAGNKFLRYGKQIAGGGDNKKSLLVLQIGQKIVVEGSHSFKVHVFRDDGKRVPKLYQDRYDCQDIRDLPGSWSTMHLGDWQGRVLEHI

SEQ ID NO: 4600 - protein, 1028 aa, Devosia sp. Root436
MAFSLAYDAHSVSLHLESGGGLLQRLIGRKPQDLGRLPLSDRELIYAVADLRALADETGETLEITGQQIRMSHRLAAAVTSKTAEALNLPPVIDLTFRTDVEGVIGSPSFRLRHEWTKAGQRQLPKRTGAILTTSDGDRRVPLWLLEAVEVAEQFQPGGQDDAAHWEALARFRQALDPGVRVAGADHTAKVSMTDFLSGLSVNLADRFSISPNADGSDFNVVPFSGKTLERVGMEEAATPFEAQGELQDRDLLTFQQRVRDRGALPAYRIAPGSYLVIDRSASPVLEVMAKMQRATQSERQNFIRNPRPAITAAVEDALRRDGKLDGLDPVGEEEAIEAIAGPALVETHEFSERVVGIKIFEKRAAPIDFEASTWMPEDFGRKFAELLADMPSSALDDLRVAIASAIESGVAQVQVDDLAVPARAETLTTIDKHIADRADLPEQDGLPDAQTRPIVLETEDNTDELHWIANLTPRAPAIGTSVPTIVKTALKPHQVDSLAWQIDAWTAGLPGVLNADEQGLGKTLQTIAFLSWLQDNMRQSGRAASRPILVVAPTSLLINWEQEVSGHLQEPGLGSVIRLYGAGTGSRKVTGARGMDIDDGVAKLDLSSLHEAIEEGRAHRQWILTTYTTLTNYQHSLAQIPFAAVVFDEIQAIKNPFSMRAEAARTINADFRIGLTGTPIENSAQDLWAIMDQLTPGSLDSLGEFRRAYSETTPQNMAQLHSRVFMPSGKVPPLALRRLKQAAANDLPEKTRQLHPREMPRQQAESYEDAKLKLAQGGPGAALKMLHHIRSVSVHPDPQAIAANEDMIAASARLEATFDILRTIKKEQERALVFIEHRQMQYRFMELVKAEFGLARVDLINGDTPIKKRQEIVNRFQMYRDAPGFDLLVLGPKAAGTGLTLTAATHVIHLSRWWNPAVEEQCNDRVHRIGQTRPVSVHVPMSIHPGFREHSFDCLLHSLMQRKRRLATSALWPMGDTEADASDLQRMVADGVTSSGGDAVMSAMTAMFLRDNIPVPALRADGSLPFD

SEQ ID NO: 4601 - protein, 651 aa, Bosea sp. Root483D1
MRGLFIATTRFVLFWAIPVAFVFAAELLLPQVNYRLAYDTVVSAAGGNIEGISQPEFAYALAAILFVFAIGLAAAFMLLHVLPVILALSRAKQMIQAAGGRSRNRAEVRKSFASGFERLRQHLARRWLIGHAWVEFEETLFDIDSPDAIGNTVRPQVFFNASLARERLAGLKMMNAVPGYFVGIGLLLTFVGLVLALYKAGTAAAAGDANVMAAEMGKLLQIATFKFSTSIAGLGASIILSIVFRWFFVLIESAFDRFNAALERGLLYHAPQSIAMEMNRTMHDQLVQLKDITQGDFFTRMGEEIAPRLNTAISDAMGPVTEQIGSAVGSLTANSQTGVARMMESFVSSLQSGAGTEMRELAATLKQLQMAMTEMQSNVRGSGDAFSDKLSKAADNLNLMIERAGQSFETSSGQSRDALASVVETLRQTMEKANADMDAALGKAASGASAKLETAMGTVMGKLDEQIVGVGESFAALARSMQAIEGALSSQRAALEGATVEAHNAAKAFTETAGSVRTAAVPLTKVGEQFTNATEQLATSVSTTLETLNGAKVEIAALAANLDATNTTTNEFWNGFSSKFDEVDTALGKAVKTLSETSLDHQQRLQEHVRQVDQGLTEAIQKMAPMLTSISDSAESIADSLEKTTSLEAAE

SEQ ID NO: 4602 - protein, 306 aa, Bosea sp. Root483D1
MIAAETDESAGSHAEDDENYFVSMTDMMVGILFIFIIMLMVFALNFQKQTDQTEMLTKQQRQQIERAQHLARQIANLQTRIDTEVSEINKADKARATLLETVRARLEAVGLKVTIDSSTGVLRLAEDAIEFASDNSTLDRTASANVDALSKVLLDVLPAYSACASDATCPRHSGYTVETVFIEGHTDRTGQDSRNWQLSTERAVNTYRRIVDNFPGLRNLKNSANREVLSVSGYAYTRPATNREDPDGRKINRRIDLRFVMEADREKRLTEVTNLLEQMKQQVETLQESARAGLPVSKRPAPNVAP

SEQ ID NO: 4603 - protein, 455 aa, Bosea sp. Root483D1
MKDAISELLIRHGPSRAPAIEPSVLRLARRLPEGRGDLRGAKNYEEIAVRLKTALGRGERLTKAQARDGAWCLWETEVAIAEEPDLLKAFLAQVRALRHKASSRVLAFSYLISFQAGGPGFAAVASVLRDLASVMGEPFEVLHHKLQIFDEEQGPRLIGDAAFAKRKSPATILEESGLRLQQVLAGGYVEPCSRRVLQRAAEDLRLPALERLDFIQLVAVKGGKLNFPTHKDLVANALLLPHRDREVEKSIKDRTLDFLVSLEGLGDPRTRSGNWVGIPQARDVAINWLTELALRQFLDVVAAVNPNVNWPYRRRFWEAMHKSGAISGAWLVLDSEGTKEAHRRFGRNVPFGRFGYGSSGVQAGHAVLLLRIGSGVCAEWSFDGKCRFWADAQRKGAPELYKPQYDADELRTGNRYAPVEEIVHIPHQGQNAWQHKAARRISLMTGERFNSRDYM

SEQ ID NO: 4604 - protein, 999 aa, Bosea sp. Root483D1
MKATFTHLVQPDGVLLKLQRRRLLSWQPLPVKDWHLADGKQGAAARFLLPGVEAGDSVEREGGIFVPHPLVASLPGTVAEAAGLPPLGTLSITLAFERIMTDPKARIRASWYDHEENRIRITRVGALATWGAIEGRLSRPLYELAEAIDGYNKTEGKNAETRIAAWGVVQAALKRTTEDELRSDDNYLTSLTVYQAGAVALDVIETASGPDFFPVVMGREKAATLADNTAAPDEDGEAPPAQRDLISDALLPRAMQQRFSREMFAGESRSRDAYVLDRNVFLVLDPSLKTALDVIRRKRAAPKAERIAFLKNPRAEIAAAIGDESGETTLSLLVETWQYSERVLGLGVWEPPAIPWLMTKSGQWLPERFPCRIGNEVIELDRKAFQTLKSEVARATASDEKEITVDGQHFHVVDVQAAFVQLGLDPSGNGQMEEPPARPDMPEQAEPDLGTPPGVNVDDRLVIRQNIDGKEFWVSYSPRVVAADVAFPRAPLVATRPKPHQTTGFAWLVDAYRAGWPGVLLADDMGLGKTFQALAFLAWVRENRRKAGLDRGAQNKPILIVAPTALLRNWIDEAERHLEPGALGERVDAFGSSLRHLKGPKDEHWTPETAIHVDELRNANWVLTTYETLADNHRAFARVAFSVAVFDEAQKIKSPGAINTQSAKAMNAEFVLGLTGTPIENRLADLWCIMDRVVPGYLGDLKSFVSTYEQGGDEELKRLKESLDKAPEGSRGPAVLLRRMKAEILEGLPTRQFKNVRVEMPAEQAQAYSNAVRKAQIGGATQGDMLRAIHVFRGVSLHPSGARDCDPLDKDSVRRWFSQSARMRHAIAVLGELNRTKEKALVFIEDLEIQALFAAAIATHLDLERQPAIINGGVPGEKRLEIVDRFQASPAPFDLLVLSPKAAGVGLTITAANHVIHLSRWWNPAVEDQCNDRCYRIGQQKPVTVHVPIAVHPHYGEASFDVKLDQLLENKRQLSRDMLMPPVADGDVQQLFGQTVRSV

SEQ ID NO: 4605 - protein, 730 aa, Pseudomonas sp. Root569
MDFSTLLHLWGAASSEQLIAPKIVVGFVFVLCAWYFVRYFFRSFRLSRQLKRLTKSLQSVKVLAPPLRRSELERLFNGSKLEHSWHEYAETLHDQFEFQEGEQVLVRSRATAGAAHFFSPQSVVDTPLGTEFYKHLPGILTGIGIVGTFFGLMLGLQHFDPSTPEQVNASVDKLLKDVLFAFIGSFVSIMASIAVTITEKWRLGQCYRLLEAFNETIDGLFDSGVGEEYLAELVRSSAESSVQTRQLKDSLVTDLREMLQNLVDTQVRESLKLADTLSTTYRDSGQLLADQVSSAIENSLKSPLEAIAGAVQAASGDQSGQVQNLLQDVLVAFMNKLEGTFGQQFNGLHELMGQSVAAMQSMQQGFSTLIQDMRSASESSTQNSSTMIAQLLSDMQAGQNAMQAGMNEMLANLQASVARIGNEGEGAGARMAEQLEKLFAQSEARQQAMAENLQAFVESIKQNIGQGQQETMAKIAGTVEVLGEQLSAVFKQLEHGQQQMDQTTRAAQADLHQGTRDLVGGLDEQVKALLQTVSEQQKSAQDTVKALSAQTEQHLQSMQLGADKMRAAAERFETAGQSVARASESTAGLMGTIQGAGSELAQASRELNTVVADYRNNREALAKTLAVIEGVVASAQGEASGRSQYLQDLKVQSERMQALNREVYEYLENISGVLGNGFKEFGDGMDRVLRQTLGSLDAELDKAVKSLAGGVEGVKESLEDFGDIMERIRQ

SEQ ID NO: 4606 - protein, 247 aa, Pseudomonas sp. Root569
MFGKQMPSVARSKDEGEKPFWISFADLMTAMMILFLVVMVAALSSVTQRINQAEQGEKQRNRDISQICEHLSLKAKTASKTIVVDCKDNRISFGDAGRFGHNQYALSNDGQSALQEVVPMILDAANSEEGRKWFKQVVIEGSTDTDGSYLYNLHLSLQRSEWVMCSLLDSRSPLQVGLSPEHQQQIRSMFLAGGVSFNNAKDTKEESRRVELRMQFFGLKEKEDNLKPEVPVFNNTDMEKCQLAMNR

SEQ ID NO: 4607 - protein, 542 aa, Pseudomonas sp. Root569
MTSPIARLSASINLSLTARRTGPAPEPLARFPRLGAAGIDLYERFERAEKALPPPQEKRRAAISKFRNVLPLNASEWRLVFAGLSDKSERVGPILDDDQLFDRVHKEIHHRIEKRRLSRRDWLALCFSYFGYEAATPDQNANWCLLREDVQLGFDCVRGQQKREKEWVHIVQQHQELFSEQAGARLGDQMFKGEISDLSALQTIAQIPDSSWLWRRIFNVLISRIFMLDDAEFSQRLADLVDIGRQHPRYMNDIMSACLSRYHLAAYREKPSSLLKQVALDNWGSPQIRSRQNSWLQYVEKDVCAMVVAWFAKEDLEHFFNLLKGDSEVDQSRLHYWLRFANQMSYTRIVMGADAWNDRGRDFVHFREKNKGRLSKLVGGPGHNNAVVMQIGNYFFVEFSGTGNACYVYKADDSPFNPDKSQLELTAELKQANRALDRMRHSPAPSRPNRIEGWLSKFDDALEKLGIRVQSQTAAPGSPKPMAFEDQVRDALKSVKYKVYDQRARGGAFQVQLVDEDRAAVAALQRLGFKPVNHQPLRFWRQ

SEQ ID NO: 4608 - protein, 1082 aa, Pseudomonas sp. Root569
MLKRFLKGIGLQSSTKAESYAPAFSIEEQGLCYPLSLADNAESWPLASYLDQLEEEEFVSQLSDRWLLTWDELYRLLDDPDHLTSLPLLGLPPETDLIPQLSSQGSLASDDFKVAISGWRDPRSNASVQVQRTGAIVLYDGTMETLPESSWKLTGAVRQLYLAQQNEPGEVTNQIGWASIRKLARTAGAGMDGFLNKTVVIKPESLRLNPRKSTVGNTPVIELEPSFEGQPANWLESFDGANQVQDRYRVTGDDGSLTHVLIDPEVKSVLDYVRSLPGRRVAGDDALSFVRNPYSALGESAAQVLDAETYEDDLAEAGIFFHRFHLEPTLDEVGHRIERVKLTLEPISPTPQAPIEIEFDAAHELAPFVHELQLKLAAGMSAGFWQGYELELSDFDLRQLAGISDLLKRWQNEAAGAEFDSVLDLSLYGDRVTGIGEAERITSPFLVKEATENWLPKDVAALGIDAEILGRWDPSDRGQFEAFEQRLDEARAAGDETVCLPESETPLSIAAAEQLFDAWSKKIAPVETGLVKPIEKVGRAVLQIGHNIDEPTYVQIRQAALRAALDATPELPSLLKPEVVLREHQLQGVAWLQHLYRLSPSDVSGCLLADDMGLGKTIQLLTFLVWYLEKYPQDKPTLIVAPVSLLDNWERELHRFFFADALPVLKLYGSALSAVKFKKEEIPADLKAKGIKNLLRPGWMGGARIVLTTYETLRDQEFSLARQQWSIVVCDEAQKLKNPAALVTQAIKAIPAQFRVACTGTPVENTLIDLWCLFDFIQPGFLGGLNQFGREYQRPIEAALERDTVALERLRGLIDPQSLRRTKQDIAKDLPAKIEDITCRSLSMHALQRNLYLSEISAYSQKQQIEEQLDQKTSGMLGLLHKLKLICAHPYSVQPDTRLRDNSPKLQWLMRTLESIKKAGNGDKVIVFTELRDIQRELQHSIQEHFGFRATVINGDTSTSSQSANSRQKLIDQFQEQPGFAVIILSTIAVGFGVNVQAANHVIHFTRCWNPAKEDQATDRAYRIGQEKDVYVYYPTVRDAAMPTFEATLDELLSKRRALARDMLSGASDIQASDFEALLKPR

SEQ ID NO: 4609 - protein, 650 aa, Brevundimonas sp. Root608; identical to SEQ ID NO: 4581

SEQ ID NO: 4610 - protein, 249 aa, Brevundimonas sp. Root608; identical to SEQ ID NO: 4582

SEQ ID NO: 4611 - protein, 461 aa, Brevundimonas sp. Root608
MTRLASLLDHPERLLDALRVRAPELVLLPRAVAQISGEARAINLEATEALQQRVAGLISEGQVASLSRRDLRESCRTFLHPPHPPAKDTTIANPICDQVETLRRRSALFALLDAYLDGFDQDDADVAWLAKRLTTASKSWPWRGTDPWPARIKAFELLTPSKAPGRLAAAVLGGKGDFRSILDEAGLTTEGRRIGGLGLAGFTAACETVRKLKAAQAVAAQERLIEWSGGSGTLAYPKAWPQFAGALFEPWGASEPARAHKTLIVDKAVAHAGDPRINRARWRPVEEVAGDAYAIILRWLTEASVRQFFDIVNETMTDRPDMWADRRKFWTRYLDADMISAAWVAFGSDGAARADRAAQRTGDKSLSMFGRLASGSGRSSQHAALIMKIGDLTIAEWSHNGKWNIWGRNDPKHPVLFRHNSRRLPDYDSSELMRAPTSGSHTTWWQSRVADIIKNETGLRP

SEQ ID NO: 4612 - protein, 1228 aa, Brevundimonas sp. Root608; identical to SEQ ID NO: 4584

SEQ ID NO: 4613 - protein, 699 aa, Rhizobium sp. Root708
MAIGVVFGLSFVLPPLDVGLIIERVGNGLALLSGQVGAQEAKAALDALSQTDFIFSLASLIFAVAVSLMVTFGLLHVAAIIGALYNLRRVVSRQKTRADFANEYDQSIYHHLEGSKLLGHAWREFDETLIKPSVGEPPLIKNTVRPQSFIHFGAIRDRFFGLKMMASIPGYFVAVGLLLTFAGIVLALYKAGSASSAGNVNEMQVAMTELLQIASFKFTTSIAGLGCSLLLSIVFKVYTIWLEASVHKFCEAAESRLKYVPPQSVAIEIAEAAKEQRDQLKEINSDKFFAQMGRQLEPQIQSAFASAMAPINDSITGVLGKITENSQSGINDMLAQFSSSVQGSAGTELRQLAETLGAMQATLADMQTGVRGSGEDFARRMSEAAENLNRLVGDAARSMDEGANRNRDGLAEILAAMKATFDKASAQVDTELGRAAGGASERIEAAMGRVMEKLESQVTTLTGSMTSLDGDLRDGVTKTQEQIRTAQESAVSTVSAVAAGAAEAIKTGLAEAIATIRQEVDRFESALRGSNSALSSQANALGEATSQTRIVSDAFSKTATDIRSASAPLLQSGEKIASATSSFEDSLRLAVDALAASQAASQQLNGSLREQSESMAAIWSNYEARFARIDEALAKSVSDLATATERQGDTLSRYATDIDRGLANAVNTLSSSVKEMSDSFDEFSGSISDLRSAVRPAAE

SEQ ID NO: 4614 - protein, 314 aa, Rhizobium sp. Root708
MLAFDDAAGKPAIEEEEENYFVSMTDMMVGILFIFIIMLMVFALQFQKQTDESEKQADKSKVQIEEVLEKVRQVSEQLHSLRSEINEELEDLSQSQRERTALLNDLERELKATGLDVQIDRENGVLRLTENAIRFATDKSNLSAQAADNVRKLAAVLARVLPRYTSCVVSSSATDCKLLAPGAAIDTVFIEGHTDRQGSETAAGDSRNWQLSTERAVETYRTLTAFEPSLRALRNPEKKEILSVSGYSSTRPIPGTEMPAQGAEITQQAWEKNRRIDMRFVMQVDPSDRLKDVLRLTDDMEGQIEKLREAATLK

SEQ ID NO: 4615 - protein, 470 aa, Rhizobium sp. Root708
MIGLFREACTGMSARASGLTGHDVIPKYTYVHEAARSIGATGIDDRAKRDLASINEIAARLLPMLQAGDVLSTKEFRDAIWCLWEARTPLADQPAALKRIVDEVDRSDKRKLFRTLATVYLIQFRPGRPGLEAISSILQQGSVRWGEPFASYQKDYALYDPILGPKNIAALALRQAMSPSDAMRSLGFGALDAQSGFTEAITRNLLVQLSDGAEPDHMRRLEMVRSYALDSRNELVFKGLDLEIAEALIKPFLGKSPEKAIKDLFLNFIVSLFKDPRTYPGRWERFPQIKALIVSWLTEQSLRQFLDIVGLTVKDPNDAQMWRYRRAFWEAAHRKGIIRGAWVVFAEDGARLARSRFGKNVDFATFVSAGSKQIQRTHAVLLLEVGQGIVADWSHNGKVNIWSDASERGAPKLYQRSYSSDDVTISKDDTETSRYLVKTHSSPKTYSWQRVVAERIYRMTNTRLQPGDYK

SEQ ID NO: 4616 - protein, 988 aa, Rhizobium sp. Root708
MSFKCVPQHNGALIEFEQRGLLGKKLIPYEQWGDKAAAADHGFRFLSHAVAAGDVVPSGDGVFAKPEFILSLSATQADMLRVPKLVGLSVSLSMRGRIDNSDSTLLLHWQDQNSRPITPDFHGPFLRVGGDWARLSRPLYDIHIAARDYNNSAGQPFAERLPFWQPVQDKLKTYLGNDVQTDKFVGSLTIYQAGAFGLDVRETAQGTDFLPVLMSRTVEPELGQVDDGNDAPETDGDDASAWASDTDRRSNDADALLPPILQDTFYEQALSRPGRTEAAYVVGRNTYLLLEPTLRTALDVVKTMRGASPEARREFLKNPRTRIAAALGDDGDALASGLFVETAQYSDRIEGLGLWQKPSLPWIKKKSTQWLPENFVVRIGSKTLNATPDKIEELEVLCDQAEQDRSDEINFEQELYPTTDVRRMLTSLDEDGVPYSGEPQGERPPREATDNDVLIIRQNLEELDFQSRLEKRSNLIPGGFPTQSINGTQPKQHQLQGFEWLRNCWTQGWPGALLADDMGLGKTFQALAFLAWIKDNMAARRGAYRPLQGPILIVAPTSLLDNWKKEASIHLKPGKLGVCAEAFGSGLKTLKTRKGVGWSEEDALDVDYMRQADWILTTYETLALYHRSFARIAYSIAIFDEMQKVKSPDSINSHTAKTMNIDFVLGMTGTPIENRLEDLWCIMDRIAPGYLGNLKSFSGTYGDEDPKALAELKAKMDQPQGNAPAIMLRRMKDDVAKDLPAKHIMPYSIAMPASQARAYDDAVAAARAGSKSRKSMLETLHLLRGISLHPDRAGDANAYDAAWRSSWINSSARVQKAVTLLEHIRSRSEKALVFLEDRSMQQTFAAAIAEHLNLPARPPIINGTMVGRQRQEIVDAFQKAPTGFDLLILSPKAAGIGLTITAANHVIHLSRWWNPAVEDQCNDRAFRIGQTKDVTIHLPMAIHPSHGAGSFDQKLHDLLERKRSLSRDMLAPPTSERDVDGLFAEVIG

SEQ ID NO: 4617 - protein, 648 aa, Geobacillus sp. Sah69; identical to SEQ ID NO: 3597

SEQ ID NO: 4618 - protein, 223 aa, Geobacillus sp. Sah69; identical to SEQ ID NO: 3598

SEQ ID NO: 4619 - protein, 426 aa, Geobacillus sp. Sah69; identical to SEQ ID NO: 3599

SEQ ID NO: 4620 - protein, 874 aa, Geobacillus sp. Sah69
MFFFKKKRKMMKAVLTPNEDGIHFSFQLHDGKTVAELKLPMAKEDIEKYYKVQGFQQYVAWEELYDSGVLVDSTLPYSEYYELLKDESAKEVLQHLGLPVVEEQVGGKLSLRSLPHEADLVLQLFDAGGRNLDRVGKQAGAIYVLPDRLMLLPERVYRLKQALLGSYESGYEKIGICQQLANEAGIELENFLQNETYHVVDAYDVDVAVHRHDHIELVVKGRNEEETRHLQRLQRVSSIKKGHGRSRFVSTEQVHADMMHLQQKRHITGEEVPLFLENPAAVLPEHDYLFDLDQFSERVRGLIPIERVRPFFHERTGMQWFDEESGHTVPYDETFLRELMEKYPDQQYVEYNGKWIYLDPLLRRKLLQLPKDADEALKRRYILDIKDNEEQLEYKIDSAQEASCRRYPIPSELQAELFPHQIEGFEWLCHLAEQERGGLLADDMGLGKTIQVIAFLLHQKANGRLKPTLIVLPIALIENWVAEIEKFAPSLLDGLYIHKGRGRLSSSQLISQFDIVLTSYDTLKMDQLLLGKIEFQAIICDEAQNIKSHTSQRSRAIRAMQGRFRLAMTGTPVENSLDELWAIMDFVQPGALGSLKEFRFRYVETSDYDALLAALQPYYLRRTKQQILDGRLPKKHLVPPIYVEASPIQKEIAQSMLATKEVGQVAILNMIMRLRQLYGHPGAVIPKYEQLSYQEVPKLKETMHIIETIRQKGEKVLIFTEFRKLHFLLKRIFMETYGISVPVIDGDTKNRQLIVRRFNEMQGFGIMILSPKAAGVGLTITSANHVIHYTRWWNPAVENQATDRAYRIGQQKDVYVYHIITRDSSHFPQGTVEELMHELLESKRHLAENVIIPFNMSEIQQAVAEKVVGRRQLV

SEQ ID NO: 4621 - protein, 676 aa, Rhizobium sp. BR10423
MIQEIGSFVVASILGAANYLVKDAAAPGIVALGIVVLLVVFTAAFFREVFQRQKAVQWLRREIQNSPTGADFSRDIDVLSASIKKTGTNRYRRQLAAAWEKYRETLVPHEEDGKVVLRNAVRPSMFLNPEDLGFGVGFWRIVPGLFVSVGLFLTFLGLIAALSTMAQGAEIDSGVMRQLLSVASAKFIMSLTGLFCSIVFTILLRSIYGRLEQSIHELCAAIEQRLTYISLEALATEQLKATREQREHFRLIGMELVAEIGRPLREELPAAIQSSIAGAMAPIVERVGKLGAEGVGDMVSGISDKLTDSIGIALTEASQKISDAGERLGLLADRLDQSSGRIGSEMEGVTERVAQAVEDLRAAITNTAEVTGGTFNEGAEKLLAVMNRTLEGIRDNTGEGARAMSAAAEDMRQAAESFKQEIESAARTGTEAAQERMKLAGQQVSSAIGDAGKDVADVFSRTSAEIARVAEEVSEKAGAGLLAPLAEIGNRFEGLVKQLNDGTSDMRRMADGVKAGADASEKAAGTFNGAASSLVAAVTPVKAVVDRMEGSIRQLTDSTQHAASTVSRSAEATAESAASALAAAKEILQAEAKSIENALGGVSVMLERLKGQGDRLDEMDGKLGQAFDLYTENVEKSVQGMFGHVRDLQERLNPALDTMREIVEQAEQFAPQSRRA

SEQ ID NO: 4622 - protein, 332 aa, Rhizobium sp. BR10423
MRGGFRTRYKEEEEESAFVSMTDMTVSFLFIIILLLAYFAQQYSEKDTVPRPIHEEVIKERNVAQQKIVRLQAIIAVHEKTIANLKEEINRKQVEIERLQAEIAKLQAELKELREALEKLRKVDPLEAYLATSAIERRRILETLRDQLKIDFPDLEVVISEETDALRFQGDGLFATGSSTLRPDRRAIVETVATRLSQILPCYTIGPRSKWTAECNPGNAIIEALQIEGHTDSTGDFTANLALSTNRANSTFSTILGKSGELVDFLNFRNQPVLSVAGYGQMRPVKDNSTKEGRDANRRVDLRIIMYTPSQSAEIDRIRQALSQDSSRGIAN

SEQ ID NO: 4623 - protein, 435 aa, Rhizobium sp. BR10423
MTLSKSLSQNRQFVRPALPALNSLASRTERILSRWPDVVANPPEKDREKLVAIVRDKLENNSWEDTKLSLITSAGRALFDEDRRTRPDLAEMRDFYYSETRASTRAGFLGGMFSIYMDSFDAKAEHTWQLAGALSAAAGRLGARWRMMLDAIPEMLSPDAVADAVARQMVLMDDLWIGLQKLGIRSPHAPGLMNAVHLAYVKQIEPHLDQRVEMERLIEWLKPEGREAKTTGAGEAISALLGHWVKHSPKPDDLRYLTENIIGIYGDPRVQRGGVWSAVPEDRMAVILRWLTGENIRFFLDVVSEVEDSHMWEPRRRFWLGLHDRGRIDAAWVAFSDSAAKEARRRGAGGKGTLRFGVQTAGYGRANTSLLILKIGRKIVVEGSHSYKVHIFDESNQRAPALYQWRYDCEAIRFIPGSNAKSHNGDWQSWVLEHI

SEQ ID NO: 4624 - protein, 1032 aa, Rhizobium sp. BR10423
MNLEASFSPDAITLSAKNERAGLLHRLVRRSVKSDLQNLSPDERSLAYAIADLRAAADTLGEQLSIDSDRIVMSHRIAASVTGETGAVLGLPPLVEMTLKTDAEGIVGSSGFRLRYEWSRNGQRQMPRRTGAILETANGLRRIPVWMMDAIAIADAYRPDGNDAADWEALGRFRKALDPGAVSGASDEASRISMTDFLSGLEVRLVDRFSLSPKGETDFDVVPFSGDTLEAHGSASEAAEVSESMSEVQGLDLQRFQTLVRGRGALPAYRLSPGRYVVVEQSASPALAVMAEMQKAAPDERRAFIRNPLPRVTEAMEAQLRSSGQLDGLSPQAEQEAIEAAVGPVLVETREFSERVTGVVKYEKPGLGEFEDSGTSWLPEDFSARLIDILDRQGTAELHTLRERVQEAIEAGRPTVDFEDLEVPARPEMLQLIDERMVSGDADDGGEDEAKPEKVGPFVLDTEVNYDDLKWLAKLRPRMSELPDTLPEGIRTPLKGHQKESFSWQVGAWRAGLPGVLNADEQGLGKTLQTISFLAWLKEVIARPQAQSRGPVLVVAPTSLLENWEQEVARHMHEPGLGHLIRLYGSSIGGRKLTGAKGKDTDDGEAKLDLGALHEAVAEGRAHRYWLLTTYTTLTNYQHSLARIPFSAVVFDEIQALKNPVSLRAVAARSINADFRIGLTGTPIENATVDLWAIMDQLAPGSLDSLKDFRQRYAKPEEDNMAELHGRVFLPRGGTPPLAVRRLKETVATDLPAKSRRIHPRLMPDVQALAYDDARLKLARGGMGAQLKMLHHIRSVSVHPALEIKASNDEFVVSSARLQAAMDILNRIKANGERALVFIEHRQMQYRFIELVRSELGLPRVDLINGDTPIPQRQAIVNRFQRHLDDDQGFDLLVLGPKAAGTGLTLTAATHVIHLSRWWNPAVEEQCNDRVHRIGQTRPVTVHLPMAIHEGYREQSFDCLLQSLMMRKRRLASSALWPMGDVDDDVAGLQKGMASERLGMEADPLGKTMAAMFARDELELPPREADGSYPIH

SEQ ID NO: 4625 - protein, 548 aa, Vibrio sp. MEBiC08052
MGLQLGLADLNIGGNVGIDEMKNGVAGVISGAKIAFVTSVWGVTLSVIFNFVEKLLEHKIRRRLSNLQQIIDNLFPRLSTESQLERIAHDSHESHKSLNGLAEQIGDRLQDSLIQATQGIQNGLESSLEKIMAPAINKLVNETSDGNQKALEATLQAFMDGFGQQGEQQRLAMDNASHGVNASLDKMSTSMETFLNRLQTQQDASSEREKDLISSISVQVSELVEQGTEQKRTLAEFVDRQVTTLGQNFDDREKAAAQREEKLATSIETTIKDLVNNISSQSQVLSNFVNEQIGSLTTSFNERDLKTQQMERDRNEVFVQQTDAMKQGTETLLSRVSDVSEANMKAAENILSQGKQLQASLDSSVSASARATESMQQSAKELRSASDNMQVFGSHIREAGNNLSGAVQQAVDSTKDLAQQNQLSSDRIEQLRSKLLEDSAMFDAIAQTLERTIQNAESTFNSLKQSQKEFLQEQKISLTDLSESVRNHVAELTSQMTTLLEDYATQANAQTLNHLNIWANSTSQYSTQMNSTVNALASVVDEIQGKMS

SEQ ID NO: 4626 - protein, 244 aa, Vibrio sp. MEBiC08052
MKRGLTTHNKRYIDEENPYWVSFSDLMSGLLVIFILASVALIIELTQKTNQVDAGIDELKKAEQVRRNIVFDIKEELARRNVFVEIAENDTVIRIPDKTLSFVSGEDELPRNNEMQDAVREVGLVLHQAIMKEGRLKYLDTVFVEGHTDSDNIYYRGKGNWGLSVDRAISVWNIWQKDIEIEPKFGVLDNVYGQKLFSVSGYAATRRINTTEVDDSEKSQNRRIDIRFTVKRPTIADLERIVAQ

SEQ ID NO: 4627 - protein, 484 aa, Vibrio sp. MEBiC08052
MMINLKRLEFTLPEPEKLFEKEISNLKNLSNELNIWANKAGTNNQRFNRALDEVQEAIRFKRPLEETLRSKTHVRAFALSLESDTDNQIKVTQKLLDTITQIVIKPTSLLIESFYQHFLKKFDELGDTVATGAWLLKSMKHRGIVLKHGNEILSANGPQWLANQAIQQNIDFDQLVHALKLDRYSRGKFITLAQSIYYVERLKTITLNQDHELLHEVQKPNVYESSYDRSLLGLKILEILISRAQGTAINDSWLNVIMAIAGDPRIPKDHPRYIKWWTHINDTLIKTVRGWLSRYDLKLFLESLEDFSHTSGNSKLIRMYPQRKQFLEGLFDAGLIKGTRLYMSRAATRYIKKYRDEKHLPDFSMVKDGDKSVIFVEFDYGYMIEGSHDCSLRFYKHLEPSICVFNYLIKSPTFSQLTTDIYTRMSGIPGAVKPPITHNTSNFSWQRKALTTLKELGISVKAKDVLSDSDYKEFKQLFGVREWQ

SEQ ID NO: 4628 - protein, 1156 aa, Vibrio sp. MEBiC08052
MAIGSLISRFFSSIDKSECFDVICDDGLDFSADKKVLNAITIGNASEYITAQYVCLKMLEEQGLVSAFPDGFMMPSHTAVRLSAEERELLKLAEVWQGAIDVDVIGRSSHPDFSVSFSVSNPRGQMTRNYRISEPYIQFSEQSKYLLSPQQLIAFQALASHHSSAKSEYDNLLLIHALQQAQEQGCRINLQHFDKLRILTPDKIAVEAEVDAAGNLILTPNLGQKASHDKMQRVLGQLIHDSTTALRVGEEIVLFNEEKLDAVKQIISNRVIPKHQVKQFLKTPTAFIDASLVDLDLGFSLRVHGVTVFKHAYFGETDQSGIDWFAQAANAEVIYPFSKIKDTVSDAETLEQLSQKIDDAIQTGATVIDFMGNTYEIADKDVTHTVLNEIKHNLDIGHETIADEIDDEVDVTGTEGQVSEQDGIYVVDIDLNDDVLSQESTVVAKNLDHVLDKHELDWSNHKRTPFLHQKIGVRWILGLEDKAQSEDTISGAILADDMGLGKTFMALSAIEHSYQRCESMDATQKPVLIVAPLSLLENWKDEVDKTFHTSPFNDVVILQSDVDLPTFRLGGAEIRGASGNDDELELRYSLKVGKDFLINERLDLPKRLVITTYQTLRDYQFSLCLIDWGMVVFDEAQNIKNPNSLQARAAKGLKADFKLVATGTPVENSLADFWCLMDTACPGYLGSYQEFRATYISPILKAAGDEVEAIRNQLGRALREKVGALMLRRVKEDNLEGLPEKHLHVGGHFDGWNYLDSLHSVMQGYQCDVYEGSILNQLQNEDSHALTTLARLRDSSLHPRLADGGRLDVGKSFKETRAMYQESGKLMSLLTTLEQIKAKQQKVIIFTVNKRLQSFLSVSLGQLFGLGPLSVINGDAKAVAKNKLSPTRKTMIEAFEARDGFNIIVMSPVAAGVGLTVVGANHVIHLERHWNPAKEAQATDRVYRIGQKEDVHIYVPLLHHPEYESFDVNLHRLLTKKMQLKDAVITPEDVIPQPAGMGNGVFGDSISTRITADNVDRLSWQQFEALCVEIFAKQTSSESCYLTKQGSDHGADGIIVGKQGTSILIQSKFTLRRYEGYKAVQEITSAKPIYENALKTTFERLVFMTNSSTLGKKVMDVAKACHVEVINRTKLLELLSKTEVTYKDVLTRLDKQRLSL

SEQ ID NO: 4629 - protein, 723 aa, Pseudoalteromonas sp. XI10
MLDSMPSHWLIPQSILGVSFWLALIAVFVVAFISIIVLTVKSNSRVKQVRHIVNGESITTLYDNSLVISERAKASKSKIVHSLWHEFGESLVKEDRSQRIYNTLDAEHFFNHKTLSAGLTSNRLLAATPSFLTAIGVLGTFMGLTMGLRDIHIESNDIEILKTGIASMMSGAAFAFVTSVWGVGLSLLLNFIEKIAERLIIQNITAVQHRIDFLYPRLPAEKSLVDISKNTSDSSEALKELHERIGDKLQETISGVSDSMQDAFTNALNNVMAPAMQSLVSNTSQQTSGVLEHLISNFTESMQAAGRGQGELIQKSTEQMHDAVSSLSGQMSAVLEQSSKQAELLAEQQAGASSLFNQQLEAMLSKSEERQQLMEQKLFTAIESQQQSQATREANHVDNLQSVLGVWLTEQSQTLNKLSDSMAEVQTAMSESNRGFVNELSDQNEKTTAQQQAFTSGLETSLQSFMQNTEQSQKALEDTFGSLINSQQLEAAKRDSEYREQLQSQLSKWLAQQDQMLTSMTDVVKRTQTHMDSVIAQHKDVIGELKKVAESSATSSQNLSNSSNQIGVLSGNLLKATELFDTRLGDMTDTIKGISAQNDGLANHVIEQAKVLRGLETSLVATTEQFGNTAKLAQSGFSEMKTHQSEFIRGVEASFEGLSNTLAKQVSDIEKQTNEWLRSYSSEVNTQVKERMETWNTTTLEFSDQMRRTVSSISDLVDELERS

SEQ ID NO: 4630 - protein, 252 aa, Pseudoalteromonas sp. XI10
MRVFRSNQVSVDEENPYWMSFSDILSGLLILFVLASVVLMVELIEAKQELENKQQVFTQELEMLHKAEGVRRTILHEAADLLRKRGIQVTVSENETVLSIPNDILGFDSAAFNISPEFEGTALEIGEVLAEVINKDNREQFLDTIFIEGHTDSKNFYGMMGKGNWGLSTFRAISLWELWVKLLPSQHDLAGIMNKEGNPLFSVSGYAATRRMIVEELTEIDFRANRRIDIRFTIRRPTSAEYETVRSRLEIQ

SEQ ID NO: 4631 - protein, 564 aa, Pseudoalteromonas sp. XI10
MLLLPPIPELPQFNWERISQQWSSLTVQTKKIADGAGQGEEFKALEQQVNRYVMYDQKEKLKQILIKRKGVRVLTQLWIDKEEVRKNSLNEETIDYIQAKHPKLGMSSLMNLISLVYRYFDALVEGNIFNRLTQWLNHQIELRLKDRKNSSDTILSVLNQAKWLLDLTAPKALVNLAKQNHLDLNEQLKKLRLNELPQGRFLDICHAQYYLDTLREIAVGEQHDVLHELLKHDVATMPFEEGKRIGHIALEIIIDRSAGAPSEIWQNFVLNLAGDPRIANTANNYRQWWKPIGENRIKAVTSWLAKEDLRLFLGAIEEYANYIGDEALNRMFPARKRFLEGLYEHGFVRNARLMLGNQAELTVKRVLGKSLTTSYIKLRGMAQTSIIYLDCGDFHIIEGSHNFKLWIYMGLPSEKLNDYSLSELNHFALTNSFPQEYKRNYPKGELMPIQHSPTSWQKNAIDFLTQNGVELDLEKLFDKDEYRRYINRYGLPVVKKDFEEKNLFEINLLNALEMYQPITAKELVKVLNSEFNMMADRSTVNSKLYSMLSESRVTRDDMLYWQLA

SEQ ID NO: 4632 - protein, 1007 aa, Pseudoalteromonas sp. XI10
MSLVSLIKGLLPNNKNSSLVDEQYSLVYDSYGVNFATDEASFHCLNKGEGGGQQLIQHVVLKMLEERDIAETLPNGFRLDSEQACLLDPEDAGVLGLPPFFNNDFDIDIQGRTTKSSFNLQLFAKFEQQKYPVKRKGPTLFFSEQTQYLMTPEQLNAVLAVEEHSSLKPDERNELNNVLVVAKLQQAVKDGLKLDLKHFDKFDLVQPENITVTANQRADGSLELSPSFGDGSSPEDVQNRLAQLQGDGQVMRIKDRIVLLTDDKKQAVKEVLQNRTIPAHKVAEFIKTPSAFLDASVLNLDLGFSLRVAGIGKMVHIPFGQDSDGSNGWFSTNTESEPPERLVKLLECEEDVVSFEQSYQQAKGQNADSVLVDDESIDIRDEQRVTETLAEVRENLANPPDENNISDTDDLPVKTEQVSLLLKDTEEHNKDIVNKVSQLDKGISFDRSNLARTPFPHQESGISWMLSLLKSAQLDNYDDMYRVQGALLADDMGLGKTYMTLVMMAEYMEMQRQNNKLEKPILIVAPLSLLENWEQEVGATFNKSPFRDIKVLQSARDLKEFRVKGAERESMQLTSVINDSHADHESIRYALHVGADAATKRLDMDRRVVITTYQTLRDYQFSLCVIDWGVVVFDEAQNIKNPNTQATRAAKGLKADFKLLATGTPVENSLSEFWCLMDTAQPGLLGDWGYFRERWIKPISSANEEEKAEVRLEIGNDLRNATGQFMLRRTKEDELTGMPTKTIKTGIHKDLAENMAFTPELARNMTGGQLLGYNQVVENYRAEKAKEQGGGHALTVLQQLRAVSLHPRLDEVFKQPPNNAKDAQRNLQESEKLRMLLDILSDIKSRQEKVIIFATTKKLQAVLKICLDKIYELNIHVINGDSKAMKTKKDQLSRKGMITDFEAKDGFNIIIMSPVAAGVGLTVIGANHVVHLERHWNPAKEAQATDRVYRIGQKKPVFIHLPCLLHPEYDSFDVNLDKLLAKKTMLRDAVVTPETVSENELMASLGL

SEQ ID NO: 4633 - protein, 903 aa, Burkholderia sp. LMG 29317
MTNGLQTFLASIDPSLRYLSGLPLVVFCLVVVITLALILLYVGRGGVVFVQISAIVKGVRHAGIGPDPDSLASLFKHEPFRHLWLEYRDTLHPLRRTANGASEIRATLPAETYFTRDVLVDSRLFDDFARHAPGILTGLGIIGTFAGLLQGLGKFDPSTPAKAVSGLSPLLGGVSHAFIASAVAIGCAIFVTFLGRLVLTFLYRRVEQLNHAIDALYNTGAGEEYLARLVHASEKSEAHAAQLKDAMVEDLSRMMTELVDRQIAAQASATAALGEQIGQTLHTSLAAPLQRMTDAMEHTSRGNGEAVSGLLESMLTGFMAKLEDTFGGQMRGVSEQIEHSLSAISAVQGSMQQLLGDIARTSTESSARVTGTLEEALKTAAANQETMTNQMREFVNEFRQLVTAEHSRTKQAMDATVGQMMTRVNETLESLADSRATSSRQEEERNAALARRTEDVIAGLSSHQELMIAQMRQFAQDFGKTAVEEQQKNQAVMDKTLDQMMTRVSGALDSLAESRTLSAQQEQARNDALSRSTHEVLSGLSGHQNTMASQVRQLAAELGAGASRQHEESARVMNGAVEKVLSDVSASMAALHSSREAAAQQDQARSDALSRSTHEVLSGLSGHQDAMAAQVRQFAAELGAGASRQHEESARVMNGAVEKVLSEVSASMAALHLSREAAAQQDQARNDAMVRRTEETIQQVTRQLAQVSEMVAAQITRAQTNINELQNVSIRAIDGMNSGAATLSAAAQRFETAGASVVTVFDRSSAVANDLQRTSAALQSASSAVNAAFQEYDRTRGAVQEYVGILSKLVESAQTETGLTSRMMSDLDRIVNTLKNVERQTTEYLTGVNEALTHSFEQFGNAMSNQLTKTIAQTDRHLGDGVQQLTGVVQELGTALQRMKRAA

SEQ ID NO: 4634 - protein, 236 aa, Burkholderia sp. LMG 29317
MFSKITLKRAAKAESESPFWISFSDLMSALMTLFLVVMATTLVTVTNSVSSVEQRKIQRETDIRELMSQIKELSREFPEVKVNESTYRIDLGDVVRFDSGRSDITSNGARFLRRYVPVLLKAQQTDIGRRWIRRIVVEGFTDQDGSYLYNLGLSLDRSRRVVCALFVSPSQTEAPLNIAQKTQIRDLFLVGGYSFNSTKESKEASRRVELKVEFWALDENPSTISAPASKEFGQCP

SEQ ID NO: 4635 - protein, 594 aa, Burkholderia sp. LMG 29317
MSVTTGPLASLATSLEEALRRMFSDWQELGRPELVERASNHAKAVFQAYASARPSGKDAYAAALAFVRGKELDEVQYDALAGALNTKIEERRGESPIASRKLQEALHWYEEEATAGRLWRLTWFGLLTSYFSHDPRAVSPAAEQGWAALRGLLQKTWPLIDRANQNVAVPEWLRTLREYPALITEGATDEFARDFLDGNEAALDALAQCVGIPEGSWFWQALVLSAVRACTEDTDSAFHACIPRLLELIRSRPVYRDQALELILARYYRLAERSVHEALRDFVVDKNVWRNPKLKAAGIATAWNRVPEEIWRMVLQWVNEGNLRDFFDVLAARNSADEGRLAFWSGYMSQITWTRLIFSSDTLMLARTNKDIRALIARESDSYASLTGNRNLDAFIMQIGEYIIVEFSTVGNAAYVYDAATLKFNRYSTSYHGGTVDLRYGFKSGARCRIVHKHGWEWQAKADLSRLGILPDNAVSRAKSQPVAPKSVLTPNETRRADPPVYSQIETRRTEPPAQPKPDPVRSRNDCVTVGPLTFAELQREVACFSGAYVIDKRAADGGRLWVEDPNQNMQLGLLLKSWGFRWANSRSAWYYGE

SEQ ID NO: 4636 - protein, 1285 aa, Burkholderia sp. LMG 29317
MAFLDIFKRKSKSEDIGPDLRPEWTGEGISFRVAPALSEATVEAFQSRVYDVAADEFVIAHHLLQMVEAGRARLNVDSVVIAWTDHYRLANSPDHDTLFANIGLPEEAAFQPVIDCHGTLSDTDFDPFVSEWERAGRVVRSSAQAGAIFVVDGQASLLPERAWALVEALNVFRHRPDTQRSQHDNELGWGTIRTLADAASALYASQYLATTHVVTPDKLRLLIDKDDTPFGRVQTVTPTFDGAPEGWIRAFDRLSKVQPHYDFTSGTQGRVRVVLSEPVRKVLGAIKRAMPGRRVAGVEAERLLHNPWAVLGDSAGEVIDEDDFVREKASLGALSTVFSVQSRMSDGRIESVELVVTEHFADGAARTSASVFESSLELAEFAASLEDALKLEREQFPWNEFDLTIDAEATQQFELAQHLLVLWRNQSDGRIDFEDIYLLDGYSERITGIGVAKPVYVPAMQSASQREDSDGWLPSELTPMISVTLAGQDGSVMIPLTTDWVKDFEEKVSLAQSEGRAEVTDAALPTAIETKQARQLVDSLTAMIDAGNKVKVEQGDTDRQTRKNKESLLVKTNFNEIDYQEQRRSLLSLPLDRVAVLPGTLRPGIELKKHQLHGVTWFQNLVSHSPADCRGALLADDMGLGKTLQLLTLLGWFYEAHPDGKPSLVVAPKSLLQNWSNEIERFFNPSYPPHLVLHGEALRHRKQPVALIDEQLQTRGITDLLRPDWIGVNKIVITTYEALTGYEFTFARQEFAFVICDEAQRIKTPGTRVTLAAKKLKANFRICCTGTPVENSLADLWCLFDFVQPGLLGALETFGKMYRRPIECQTHEQRAALDELQALIAPQTLRRTKEEIASELTRKHFVLQALNDAASTLSAAPLENERLEIRLSDHQHALYKNGLQKLQDAAAERDARRRATLSFGALHHMKAVCAEPYCLPGNKFVPDKRGLEAHLDNSPKMQWLLNELGRVERCAEKAIVFTELREVQTALSYFIHERFRIKPFVVNGDTQGRQGIIDRFSASRGFNVIILSTLAAGAGLNVTAANHVFHFTRAWNAAKENQATDRAYRIGQQKDVFVYCPTVVADFPTFELRLDQMLKRKGKLAGTTMSGSSMEQMLNGSPDDIKVSDLLRDVSDGEASHRRPQPVTLDDVVRLDGSAFEYFCRLLWEKQGYVASVTKKSGGDGGIDIVALRGNEGELLQCKSSLSAGIGWDAIKEVSAGAAGYQNAYKNTTFRRVCVTNQRFNTGAHEQARMNRVRLVEREQIEGLLAKHPVYADELDDQIIFGIGV

SEQ ID NO: 4637 - protein, 780 aa, Burkholderia sp. LMG 29320
MNILNTLSHAPWVSQTCAFVLLVLVAAFFGHFVLKCFRRRATLLKLVNGLKTLRKDESPDALFGKAGDLEHLWKEFGETLLDETEFNSITGQYDLKAKRASMPSEQFFSQHAVVDSFVWTEFYKHLPGILTGIGIIGTFFGVLHGLQAFNISDNAALVRTSLSNLLGSVSEAFLVSAFAIFFAMVITFVEKLLLARLYKQAETLTAEIDRRYVAGAGEAMLQELVHSTNRYVTNSETLKDALVSDLKGILVSLSESQIAAQEKIVEALKANEKSTSSLGEKIGDHIAKGVSEAVAEPMAALKKAVETATGTQTTAVGTLLTDTIIALKDSLRDLFGEQLTGINEMQQKTIETLQGAVARMEHLTQSLETTGARTTETMAGAIAKAIEGMDARQDLMARKMSEVVDEMKKTSEGAQTAVNEKLESAISGLSCKMTDLVAKLTESVSASTDSTNQKLGAALNGVSQTVETLVSTLSQLVAKSQDATNEKLTKAVGDVSANVEKLVNGLSQSVVNAQEKSNATLEGAVSTVNDKVGGFLRGITEQAARAEAENIERQKWLSEQAEANATAMRAALEGTTTEMKALVAGTRAAVDTMRQSVDSMRNATSDTVAKMNSGAETMFGAANEFSKAGSSLSGVLQQSEATTAKLAIAAGSVETAAQAMRRVVDDYSTTRDQLLQTVIEARKIVDDAKNNSLSSGKVLAEIRDATDALSAAHTEIDSFMTKVAEVMGKSTLAFQAELKESIITANRGLVDTTAEVTSLLARSIARLANATRPVLAERVQ

SEQ ID NO: 4638 - protein, 241 aa, Burkholderia sp. LMG 29320
MIGARIVVKRGSKSEAEKPFWISYADLMTALMVLFLVTMSVTLLAVTKRVDEAERAKAERDKEITELLHRVQVAAQKYPGIKVDTARNVIDFGDKAHFDKNSSGLKPEQQRLLRAFVPEVLRIARDPLGKKWLKQIVVEGFSSPEGDYLYNLNLSLQRSQRVLCVLLAKPFTDESAMTNGELEQIRDLFLVGGYSFNGAKATYEDSRRVELRLEFLGIGEHRTLTAGIARGNFGICALGAN

SEQ ID NO: 4639 - protein, 630 aa, Burkholderia sp. LMG 29320
MLQTLAHILQMRDRTGAPDDLLSPLTGWVEKLRVELKGHKPVAEEDDIRAAVVKFRQDLRMHDSRQAVYVSLGCLLPIGPKKQKLIEDTTVFPVVLSNVERYRKHLMVFQDCYKGLLDAYLGYHPEGKRGSRIAWPNWNQLRDWLAKTSADIYDPTFQEDWVNAVRSHPELFSAQPLRAFGSEMLTGECGAYDKFASDLGVSKASWLEEEMVRAMIQGAANSKAGIVPHLPQLIAALRRVEGENKHLFNHGLAEVFTHYYEQSDGEVHEDLRKVALDIWRNPMQDSDNKYAWEKSGWALLDDGPLAMAKAWFASHIIEKFFSVLAKKSEREERDKREKRIRRMKFWVQYAGALTDVKFALGPYASSDNDPRMREVLDLMRGMTLELWGGGDKQNNAFILRFGDWVVVEFGLESNATFIYRASDLPFERGQKAVSTQVIKDYIKHTPPTKNGPIRKEHRDSGAQTWEDDYRDALKKRGILPSRVPVFSSTQSASGKQAATQTAQSGETAAKSMTMTQVETRRLVQIEMLPGLTQIETQNPRPNEIPARDTPVELSLVTQKATPAFSEKEQRELETFCRRFSIPIRDMRRQGGNFWVMHDSDAENPMTALLNKLGFTYRAGKGWWYPSQKDA

SEQ ID NO: 4640 - protein, 1264 aa, Burkholderia sp. LMG 29320
MLKWLKRAAGMTSATDNTAVSPTLTGVWRAFMPEGLDLGTFEAVGTRAGATLLSAPTLPAFITQLHDEGYASGTEDTAHLPWASLYSLLDEPVFQRSLPQLELPPFCNAVPELKSHHSLTDADFSIHVASWRDEAGRSLAGAEQSGGVIMIDGKAHLLSLAGWKTAQQVMQFQARPATERNESAHRLAWGQIRRSALAANARLDLFLYQSVVLTPETLAITMRKSDVGGTRVVEIMPGFKGAPPNWLDIFDSYRNIPPRYDINTPEGVVQVVITAEMRAALQTIRNMEGRRVAGSRAEAFLVNPRATLGVDVASVIDETQFEQARIDANIFFDHFTAIVRRDAFGYPETVGLSVESPGTAGQVTAEERLFSDDEQLDGFITGLNGAIVKQRQLYAWAGFEFELLGDSPDQLQALNDALEERRQPRILVRYTEIYDLNAYTSRVEDIGVDRPYYSPYIAKKGDEWWPENLVNMVVYTPDGDTEPVAVPLSDDVQNLLRTKVEEAQATGKTSVELPGLPKPIPINDAKDLLDVYRKVRSDAQKNRDDGVTGGEKENTVKAGKGKQLLIKSNIDTVDYEEIRRDILTTYSKEPRLPTGFKSTTNLLQHQNEGVAWLQHLFSHAPNHCRGAIFADDMGLGKTLQLLTFIARAFEEDPNLPPALIVAPVSLLENWAEEIAKFFSEGTFRPLIAYGDNLSNLRVPRSAIDAQLRDENLLRFLKPGWVGDANIVLTNYETLRDLEFSFAAQKWSIMACDESQKIKNPNAMMTRAAKKQNVLFKVVCTGTPVENTLIDLWCLFDLVQAGLLGALNEFGKRYRKPIEAETKEEEARVKELQQLIDPQILRRMKTKVAKLPLKHVKPCLIPMSNLQRTYYTNAVNSFKQSQDKSRETPMPSPFKNHLGLLQYLRSICTTPHAPGQGRFKPVPLAQFRIEAPKAGWLLDTLEQVRMQDEKAIVFAEFRDTQQMLAYFINEQFGFSPDIINGDVEASSKHIASRQKRIKAFQAKPGFGVIILSPVAVGYGVNVQEANHVIHYTRTWNPAKEDQATDRAYRIGQKREVHVYLPITSAADFKTFDVRLHELLEEKRELADNMLNGSGSVTPADWNVQDIVPDGSNDPVFASKVTLDEVVRMEWDWFEALIAAIWQKKGYKTVYRTPRQDEGVDVVAFTGTKGDLVQCKSSGADNASLDSQGVKDVLLGRAQYEARHPQVDFSLWAVTNQFFNDSTCERARNSKVSLVNQRDIEELLEKYPVTNADLQRFLYVFWEEAA

SEQ ID NO: 4641 - protein, 724 aa, Burkholderia sp. LMG 29320
MSIASVSLSFVLHVFVLSALGFALACFIGQFILPFLRVRREFGRAARVLKALKGAGERIDADRIGEEVMKGTGFGHCWDEYRDTLHAQKRVDAAGMTETGRWRATATASTFFTEQALIDAPLRTEFYKHLPGILTGIGIIGTFSGLILGLNGFKITDDPQVVRSSLESLVSSVGGAFSLSGLAIALAMVVTTIEKAMVNKLYTLLDRLCCDIDGLFESGAGEEYLQRLVEASETSATQAMQMKESLVTDLKQVLSELTQQQIAAITHTSTALGQSITTSLTEGLAEPLARISNAVQSVGDSQGEAVNRLLTDVLSSFTAQMENMFGSQLRGMNDMLLKTANTIETASHGFQALASQIQQAGAGAADAMAKRVEEALEHMQARQSESNEQMRAFVDQLKENVARGQAESTDLTKEMMRQLSESASSLVKGLQEQSHASHAEAAARQTEASEQMRAWIEEARASMVKGQSEAAEASTRVIGQFGDQAGELIESLRQQSASAQEEHGQRQAQLAAQIAGLLDEQTGQIAKVTEAVNRGSVAMLDAVNKLNTATHGNIERMGQGAERLHDASARLADNLRSMEAASDSVNGTTERLNQAAASLTSSLGSVQQVLADQRTVRDSLAGMLTELRAVVETASREASVKRDLVASMDHASKSMREAQGVTRQHLDDLVEDMSKVHGEFAEQIRRTLREGNSAFHTELAQATGILKGAISDLGDVFDRLPAAV

SEQ ID NO: 4642 - protein, 252 aa, Burkholderia sp. LMG 29320
MLGIQTPARRRNRDEGEKPFWISFSDLMTALMVLFLVALSVALLAVTKHVSEAEREEKERSEQISALMKEVERVANQFEGVRVIGTTIDFGPRGRFEREGQNMLSAPQRELLRDFTPRLLDQLRTTDAGRNWFKRATVEGYASRSGKYLFNLNLSLERSERVLCELLRDPGHDEPMLSFADRKLVATRFFVGGASFNSLRATADDSRRIEFKLEFKSRQERKDEAAHVSPENDDVALEQALDPKERCPLIDR

SEQ ID NO: 4643 - protein, 546 aa, Burkholderia sp. LMG 29320
MLHERAGAWGQTRDMAMALRDIRKAFGDRSDAPSLDQLKIALRAFFARRTDLSPTQVKYVCYGVTVPHDDTEDGVRIIDDRALFQALMKVLGDYETQEGRFRQCYQGLLQGYFGFRRDPGEKSQAHQNWINLRRYLSERLPAMHAKATSREFVPDWLGTLNEHKNLLTDNPCGRYADMFEAGKTDELRALFGGLGIESNSWIWDEVVMAYVRSVCERGDAEFYDALRCVLPFLNGRADIKLPQLLAVRATAMIVKRYAQCRSRPEHDGLRDTCVALIGNPWLDPTAWHARVGYEPAREMVEGWLKRRLIKDFFEVLAKDGAADLRRLHYWLKWEPQISDMWFVLGADARNNRTAAFSNVRKRMGNRERVLEKSTADNNAFIMRIGPLIVIEFGLTGNACFFFSNTTVPVTLSARAFDLSDLKNTDRMLEKHSHHSGWEDRFDSVLSRLLDERSANGHPPEASIASGQSRPSSSQRIATPRVARPDGWEIQELLRKCAKHGISYEDNRPKRGALWVLLSDPKRSPRIAEELVEMGFKYKEGSGFWIK

SEQ ID NO: 4644 - protein, 1094 aa, Burkholderia sp. LMG 29320
MLAKLFGRNKTATVTHEAPAAPLIIDEDGFRYASPAPLARQWLAAPYDYPDHAELGAHLAQVAQEGLGLAVGSGFLLSWEDVYSILAHPELDAFRAPLRFPPDTPLRPRLVSTGALGDANFSLRIDEWVDAQGRGARPAPKLIGKTLRTVSSEALLPAPLSEMLDLLARFHTTLASERTLSFKEHIYGRVRALAAQSGCPVSDYVASTVVLAPEHLKLDVERRGEGNAVVLEIVPKFDGSPDKWLTQFDRLPLQDRYEVPEGSALVRVVPTPEVKAVLGEIKREMPGRRVAGPRAQAFVRNPFATLGESARVVLDASVFEATCEAAGIVFESFTPQVERSERGRIERVALLVQPISAGGQSATVAWITSPDDLSAFTDRLSRALDDGSQCVTWREHELEIVGDTKEHLQMLSGWLREWKSPALWTASEVLDLSHYSERIHEIGEEPPFAVPVIALNREQGGWFEGNVTIGLRVDDPANGGTRYIPFQFGEIPSLQESVNAARAAGADRVVLPGLVQPVPIADAQSALDALAKACAEVQRDEFQGGGAKSVAKKRLIIKRNFEDIDYSEARADALQMPPERMPSIPGALRQEVVLKPHQKVGVAWLQHLWELSPAACRGTVLADDMGLGKTLQLLTFIASCFEREPQLEPALIVAPVALLENWRSELNRFFAPDALPLLLLYGETLKTLRASREEIDESLASQGVTRLLKRDWIGGARLVLTTYETMRDLEFALARQSWSIMVCDEAQKIKNPAALVTRSAKKQKVRFRIACTGTPVENTLADLWCLFDFVQPGLLGALNQFSRAYRRPIEAKTEEQQAKVEELRGVIQPQILHRKKSDVAKDLPVPVEDVLCKQLPMSPYQQRHYEAALATLREQRQTNPSAQLLALLAIRKICTDPHGFAEPAVRDIPIRRLVDESPKMGWLANTLKALAADKAGGHKVIVFCEFRELQLVLQRVVAALFGFAPSIVNGNTSADPSAVGNRQQLIDAFQATAGFNVVILSPLAVGFGVNIQAANHVIHFTRTWNPAKEDQATARAYRIGQTRTVTLYYPGVVSDAFPSFDVRLDALLQRKRALASDMLNGCSDLTVADFADFG

SEQ ID NO: 4645 - protein, 785 aa, Burkholderia sp. LMG 29320
MNLTSGSLSLFLHSFVFIALSVALVLFSWQFLLPYFRVRAELLGAKKTIEALKSVDGPIDADRIGEIMKGQALRHCWAEYRDTLHAQKAINASGVVETGRWRATAIASTFFTEQALINAPLRTEFYKHLPGILTGIGIIGTFGGLILGLNDFKITDDPLVVRTSLESLVSSVGGAFKLSGLAIFLAMAITTAEKIIVNKLYTHLDALCGLIDGLFESGAGEEYLQRLVEASETSATQAMQMKESLVTDLKQVLSELTQQQINAIRTTSNELGASITNSLSEGLAEPLARISNAVQSVGNSQGEAVSRILTDVLSSFTSQMENMFGSQLRGMNEMLLKTANTIESASQGFGALAAQIQDAGTGAADAMAKRVEEALGQIQSRQTESNAQMQAFVDNLKESVARGQAESADLTQNMLRQISESTASFVKGLQDQNQASHAEAAAQQSEANARMRAFVDELKDGVARGQAESSDRTREMLRQMSEGTSSFVRELREQNIAIHADTAARQTQTSEQMHAWMEETRASMARGQSDAVEASSRLIGQLGGKASEMIDTLKAQTSSAHEEHGKRQAQLAAQVADLLDKQADQIGKVTEAVKQGSLAMREAVDKLNVATHGNIERMVQGAERLHDASTRFADNLLGVKAATDGVASTAEGLSHAAASLDGSLGAVQQALTDQRTVRDSLAGMVTELRTVLETVSSEAALKRDLVQSMEMAGKSLREAQDATRGHLNELIKDLAEVHQEFADQVRKTLRESNSAFHTELAQATGLLKGAIVDLGDVFDRLPAAA

SEQ ID NO: 4646 - protein, 252 aa, Burkholderia sp. LMG 29320
MLGIQTPARRRIRDEGEKPFWISFSDLMTALMVLFLVALSVALLAVTKHVSEAEREEKQRAEQISTLMREVQRVANQFDGVRVIGTTIDFGPRGRFEREGQNTLSDPQRALLREFTPRLLEQLRTTEAGKNWFKRATVEGYASRSGKYLFNLNLSLERSERVLCELLRDPGHGELALSFADRALVATRFFVGGASFNSLRATADDSRRIEIKLEFKSRQERKDETAHTTPGAEDGALEQALDPKERCPLIDR

SEQ ID NO: 4647 - protein, 556 aa, Burkholderia sp. LMG 29320
MLRNGLSLTTDTRVMSMALSDIRGAFGGDGGAPSLDQLKIALRAFFTDRKDLSPTQIRYVCYGVAVPLDDEEGERLIDDQALFRSLMALLSDYERQERRFRKFYQGLLQGYFGFTSDADPASAAHVNWIGLRRYLNERLPFVHESANRRGMVPEWLDTLREHANLLSDDPCSRYASSFAAGETAELAEVFDGLGIDSNSWVWEEVVMAYVRSVCERGEAEFQDALGDVLRYVNGRADIKLPQLLAVRAAALAVKRYAECRNRPEHERLRDTCLTLIGNPWIDPTAWDAHVNHEPARQMVEGWLKRRLIRDFFEVLAKDGAADLRRLNYWLKWEPEITDMWFVLGKDAQRNKTSAFTNVRKRMAGKDRILTDAADDNNAFIMRIGSLLVIEYGVTGNACYAFEESRFPVDLDAPAFSIYGMKNRRVAALWLSHNGSSWERNFDMKLRELLHKAPAPKRAAGTPSRQASVTRPPHRPAGPFDGLMPREASRVVLDRVERELRDVLSLCEASGFEWEDNRPNGGALWVLLEQRRQRPYLAERLDALGFQFKAGRGFWLK

SEQ ID NO: 4648 - protein, 1104 aa, Burkholderia sp. LMG 29320
MLAKIFGWGKTGKSDAGKAFAPYAAATPASPLTIDEDGFRYASPAPLAKQWLVAPYDYPDYAELGSHLALVVQEGFGLAVGSAILLSWEHVYGILRSPELRSFRAPLRFPPDTLLRPRLTNAGALGDAGFGLRIDEWVDVQGRGARPAPRLVGKVLRFGEADALLPESVSEMLDLLSRFHMSPADERTLSFKEHIYGRVRALAAQSSCPVSDYVASTIVLSPEHLSLGVERRGEGPAAVLEVSPGFEGAPDNWVAQFDRLPLQDRYNVPEGPALVRVVPAPEVKAVLGEIKRSMPGRRVAGMRAQAFVRNPFATLGESARKVLDAAEFEAACETAGIVFKSFVPQVERGERGEIVRVGLLVQPIAAGNEEAAMTWFASSDELSRFAGRLARALDDGSQCTTWNDDELEIVGDTVEHLQALSGWLREWKTPALWTASEVLDLRHYSARIGEIGVEQAFAVPVIAKNREEGGWFEENTSIGLRVDDPASGGTRYVVLEFGEIPSLQESVNAARAAGADRVTLPGLVQPIPVADAQSALDALARAAAEVRRGEFTPRAGARPAAKKRLIIKRNFEDIEYNEVRADALHMPPDCAPAIPRTLRPEVVLKPHQEVGVAWLQHLWALSPAACRGTVLADDMGLGKTLQLLTFIASCFEREPQLEPALIVAPVALLENWRNELARFFEPDTLPLLLLYGETLMALRASRQEIDESLAAQGVTRLLKRDWIGGARLVLTTYETMRDLEFALARQSWSIMVCDEAQKIKNPAALVTRSAKKQKVRFRIACTGTPVENTLADLWCLFDFVQPGMLGALNQFSRTYRRPIEAKTEEQQAKVEALRNVIQPQILHRKKTDVAKDLPVPVEDQTCKRLPMSPYQQQHYEGALATLRAQRETNPSAQLQALLAIRKICTDPHGFAELEVRDVPITRLVDESPKMGWLVKTLKALAADTQGRHKVIVFCEFRELQLVLQRVIAAMFGFAPSIVNGDTSADPRTIGNRQELIDAFQSSAGFNVIILSPLAVGFGVNIQAANHVVHFTRTWNPAKEDQATARAYRIGQTRTVNLYYPGVVSEAYPSFDVRLDALLQRKRALAADMLNGCGDLTADDFADFG

SEQ ID NO: 4649 - protein, 767 aa, Burkholderia sp. LMG 29323
MYQTFVHAPVIAKLCALFILALFGYFVCWFIPRAVLRGIALKRIIGGLMRLEAGADPAPLFEKNKDLAHLWSEYDETLFKQERFDSQQRDYVFDKKRSTVPAEMFFNTQTTVDSYVGAEFFKHVPGILTGIGIIGTFFGILHGLDAFNVSADAAQVRDSLKGLLGSVSEAFAVSAGAIACAMIITLLEKWLLANLYKKSEALAIEIDKLYKAGAGEEMLQDLVQSSADYVSNSKSLKDALVSDLKGILTQLTESQIQAQRGSTEDLGRQIGEHITQGLERALAEPMKAVAAVVGDAAKERSGAVHSLLSEVVKELNQSLRDLFGDQIAGINTMQQQTIAALQSAVVKMEQMSASLATAGTDATAKMAEQLADAVTKMEASQAGMTRHMAQIVEEMRSSVASSQNATNDGMLTALKQVSTSVESLVGQLTEKVTTSQDASNEKMQQAFASVAERIELLMSSMTQTMNSSQTATNDQLQKTVADVSTSVRELVSGLSESVVKTQAESSTHLTQSVATVGDSVKSMVADLKEQAAGADAANEKRQRQLAENAQNAAAAIKAAVESLTSEIHGLVAGTNKAVEVMRSSVDAMRAVTNDTVSKMNLGADTLHGASTKFEEAGKAVTGAFEKATSVTDSLAAAAGNVGAASQTMQAVVSDYRARCDEFQSELDQLETIVTFAKDSLSQDVLKQIQESSKALNTAQLGVQQFMNGVADVLATSSKEFKDNMTSTMADAVGELVNSTSRVTSLLGRTIQELAVSVRPVVPDAEAY

SEQ ID NO: 4650 - protein, 241 aa, Burkholderia sp. LMG 29323
MLSSRIVLKRGGKGEAEKPFWISYADLMTALMVLFLVTMSVTLLAVTKQVSEAERLKAERDREITELLKRVQVAASKYPGIKVDAERNVIDFGDKAHFDKNSSGLKPQQQRLLRSFVPEVLTIARDPLGQKWLKQIVVEGFSSPEGDYLYNLNLSLQRSQRVLCVLLAKPPADEMPMSQAELEQVRDLFLVGGYSFNAAKSSYEDSRRVELRLEFLGIAEHRPSNTGAARGNFGSCALGAN

SEQ ID NO: 4651 - protein, 746 aa, Burkholderia sp. LMG 29323
MSFLEILQARLESQRNNTVQMRVSTEPLQDQINELTTQLKGRLPKTPPDAIANAVERFRQDRRIRDSHDALLVSHGCDRPFGQMRFRLIEDRERFPAVRSSIDRFRKYRLVFRDCYKGLLDTYLGYHPEMRGASGTGRPNWEMLRSWLDTGAKGLRDPDGIEEEWVPELAAHPELFSSAPVDAFALQVLKGNEQAFLQFQQALRIERTSWLLEQVILAQVRAAAKVGIMPYIAKLLPLLERLGTQNPAVFNQGLVEVLTAYCADSGGALHGALRDFSLHFWGNPLSLQAEKKTGWATVPLKPRNMVKNWFNLHVIQQFFDVLAKQDKSEPRDVRKKRERRRDFWSKYADVVGEVKFALGPDARSSQDPAMVEVRQLMEGMTLNLQNGGSSQNNAFFMQFKDWVVAEFGHENNACFIYRASDIPFEDGDTAISAQAIRHHINSSFSNGPRGPVRLLHKDGSYENWEDVFEQALRDRGTPMPVPMRQSDAASTHWSPQVSGDKPKKRAVDSMAAQQEDFGWPSADRSAAPVIAGNPVERVADRVSSAGQNGSARAWRNPSISRPSTGDTGSPASATPATSASTSNGLIDNLPFGATQEKELFNVCREYDIPVRDMRERTGHLWVVLDRPDDIRMTPLLQAYGFKYRPGRGWWRQALSRPSADGTAGSQSAPASPAASNVPIANLPFGAKQEKELFNLCRHYDIFVRDMRGRTSYLWVVLDQPEDSRITPLLQAYGFKYRPGQGWWRQA

SEQ ID NO: 4652 - protein, 1257 aa, Burkholderia sp. LMG 29323
MLKWLKRKTDTGGAAQSQTAAVWRAFGPEGVDLGTFETVGSRAGAAALATPTVPALIMQLHDEGFAIGTDETAHLSWENLYKLLDEPAFSRSLSQLELPPTAGIAPELQSRHSLINPDFSIRISGWLDDTRRSIEDVPRNGALVSVKGQLRLLSREVWETVEQVARFQTRPDDERSESANRMRWGQIRRSALTAKAGLDQFLHKSIVVTPDTIDIIPRKAGADTTRMVEIIPTFEGAPANWLEVFDSYLTVPSHYDISTPEGLVHVVVTPEVHTVLSSIRKMPGRLVSGSRAEAFLLNPFAALGEDAKAVIDEEQFERAKVEAGIFFDHFTSVIRRDALGYPEAVGLTIEVTLADRVTAEERLFSDDAELEHFIRGAERAIAAERQLYAWEGYDFELLGDSEDHLSLLKTALEERHTPRILVRHADVYDLSAYTSRVNDIGLEQPYYSPYIAKKGDEWWPEHLVNVIVYTPDGSTDPVAVPITDDVKDELSAKLKEAEATGKPSVELPGFPQPIPVTEARDILDAFINFGKDVREGYDKPPKTRDPKDKPARLKAKQLLLKPNVDAVDYEEVRKEILTTFAPVPALPSGFRPETKLLEHQEKGVAWLQHLFQHAPNHCRGCIIADDMGLGKTLQLLTFMARAFEDNPALPPALIVAPVSLLENWAEEMGKFFKEGTFRPLVAYGDNLASLRVPRSAIDEKLQQEGLVKFLQPGWVGDANIVLTTYETLRDLEFSFAAVKWSIMACDEAQKIKNPSSMVTRAAKKQNVVFKVACTGTPVENTLVDLWCLFDLVQAGLLGALNEFGRRYRKPIEAETDEEKARVKELRGLIEPQILRRMKTDVAQLPPKHIVPVLIPMSNLQRTYYTSAVNLFKGLKKGDKEAAASPFKNHLGVLQYLRSICTAPHAPGLGRFSPQPIAQARAEAPKLGWLLDTLRQIEGKGEKAIVFAEFREAQQMLAHYINETFGFPPRIINGDVTASAKHVASRQKQIRAFQEKPGFGVIIFSPVAVGYGVNVQEANHVIHYTRNWNPAKEDQATDRAYRIGQKREVFVYLPIVSAEDFKTFEVRLNELLNSKRRLANDMLDGSGTVMPSDWNIQDIIPDGANDETFNRAVTLDDVLRMEWDYFEAYVAAVWQKKGFRTVYRTPARDGGVDVVAFTGNAGDLIQCKSSGAINACLNDEGVKDVVCAEAEYRLRHPGVHFSKWAATNQFFNETAREKARRNNVTLATQKEVDAWLERYPVTNADVQRFLHLYWEQAA

SEQ ID NO: 4653 - protein, 844 aa, Burkholderia sp. LMG 29325
MYQTFVHAPVIAKLCALSILVLFGYFLFWFVPRAVIRGLALKRVIAGLARLKEGEDPGPLFAKNKDLAHLWSEYDETLFKQERFDSGERGYVFDKNRSTVPAEMFFNTQTTVDSYVGAEFFKHVPGILTGIGIIGTFFGILHGLDAFNVGADAAQVRDSLKGLLGSVSEAFAVSAGAILCAMIITLFEKLLLASLYKKSEALVIEIDKLYKAGAGEEMLQDLVQSSADYLSNSKTLKDALVNDLKAILESVASTQISEHKRIIDDQMTAQAASTRDLGLQIGQEISAGLQTALAEPMKAIGEAVKVVGGEREGAVHKLLSEVIKELNQSLRDLFGDQIAGINTMQQQTIAALQSAVDKIEHLSKTLTTAGTDATGKMGEQLAEAIKNMEASQTRMTTEMAQAVAEMKNLVANSQTATNEGMLAALERVSNNVEALVKQLTEKVETSQSATSEALTKALAEVTDRVGGLVTSLTADVTTSQTTTNDALTNALANVADRVGSLVSSLTTDVKTSQTSTNEALTKALSDVTERVSGLVSSLTSDVTTSQSATNEHLQKSVSDVSATVANLVQGLTQSVTSTQEESSKQLTQSVATVGDSVKSLVDDLKQQAEGADVAHEKRQQQFAAEAQAAAAGIKSAVDVLTAEVSRLVSGTGFAVDKMRESVDTMRRVTGDTVTQMNQGASTLHAASTEFGKAGTAVTGSLQQATQLTDKLAAAAGNVGAASETMQRVVNDYNARSGEFQSMLLHLKTIVELAEGSLSHDVLAQIQESNKALTVAQLKVDEFMNGVTDVLQDSSDKFQANLTDAMERAASKLVETTGRVTGLLNGLIENLAMALRPVVMDEEGA

SEQ ID NO: 4654 - protein, 240 aa, Burkholderia sp. LMG 29325
MLSSRIVLKRGGKGEAEKPFWISYADLMTALMVLFLVTMSVTLLAVTKQVSEAERQKAERDREIAELLHRVQVAAKNAGISVDMDRNVIDFGDKAHFDKNSSGLKPEQQKLLRAFVPQVLAIARDPLGQKWLKQIVVEGFSSPEGDYLYNLNLSLQRSQRVLCVLLAKPPVGESAMSNDELEQVRDLFLVGGYSFNAAKASYEDSRRVELRLEFLGIGEHRPSTNGAPRGNFGTCALGAA

SEQ ID NO: 4655 - protein, 658 aa, Burkholderia sp. LMG 29325
MSYLDDLRKGLTRLQNQPLFLQTPMGELEEQLEKLTEKLVGRTAKAPEEAVVKAVERFQQEPRFRHSHDALLVSLGCDRPIGKMRYRLIEDSVRFPAVLSGVDRFRKHRPIFRDCYKGLLDTYLGYHPEMKGAAKTGRPNWELLRSWLDSGANTLRRPDGLEETWVSELVLHPELFSNAPVDAFARQMLRGDDSAFFEFQQALHIERTSWLMEQVVLAQVRAAAKAGITPYIPKLLPLLEQLATQNPVVFNQGLAEVLSAYCDHTGGPLHGALRDFSLHFWGNPLFLRKENSTGWVAVPREPRDMVKKWFKLHVIQQFFNVLAKQDQREQDDVRLKRERRRDFWEKYADVVGDVKFALGPNARNSDDTRMLEVIKLMEGMTLDLYGAGDGQNNAFIMRFGDWVVAEFGHENNACFVYRASDVPFEHGDTSISAQAIRHHIQASDQLGAESLPHRDRRRVGPVKLHHRDKGGRFWEDIFEDALSGRGITRPVAARASKNSATTWKPEVPAQAAKQTPARAAASSAASRPSTTPSIDRPPEAARPAPRQAQEQPVSSSAWRNPSLFRPASGGASTPPTKASTSGADTPSSGPIVSLPFGAKQEKELLTMCRKLDIYVRDMRERQGNLWIALDSPADNRLTPLLQSYGFKYRPGRGWWYQE

SEQ ID NO: 4656 - protein, 1256 aa, Burkholderia sp. LMG 29325
MLKWLKKMTGAEPSQRQTAAVWRAFGAEGLDLGTFESVGARPGATPLATPTVPALITQLYDEGYAVGADESAHLSWESLYNLLEEPAFARSLDQLELPPIGGLTPELQSRNSLIDRDFTIRVSGWRDEDRRPLEAVTRSGALVSTNGRQLLLSRQAWETVEQVARFQARPEDQRTETAQRMRWGQIRRAALAANASLDQFLYKSIVVTPDTIDIIPRKTGAGTTRMVEIIPTFEGAPENWLDVFDSYQAVPKHYDISTPEGIVNVLVTPEVNTVLSSIRKMPGRLISGSRAEAFLLNPFATLGEDAKAAIDEEQFERAKVEAGIFFDHFTSIVRRDALGFPETVGLAIETALADRVSAEERLFSDDSELEHFVRGAERAIAAERQLYAWDGYDFELLGNSEEHLVLLKAALDERSKPRILIRHTDVYDLSAYTSRVNGIGLEQPYYSPYIAKKGDEWWPEHLVNVIVYTPDGSTDPVAVPITDDVKDELSAKLKEAETSGKPTIELPGFPQPIPVTEARDILDAFINFGNDVREGYDKPPKSVDSKDKAARQKAKQLLLKPNVDAVDYEDVRKEILTAFTPSPALPSGFRLETKLLPHQEKGVAWLQHLFQHAPNHCRGCVIADDMGLGKTLQLLTFMARAFEDNPELPPALIVAPVSLLENWAEEMGKFFKESTFRPLVAYGDNLASLRVPRSAIDEELRKENLVKFLQPGWVGDANIVLTTYETLRDLEFSFAAVQWSIMACDEAQKIKNPNSMVTRSAKKQNVMFAVACTGTPVENTLVDLWCLFDLVQAGLLGALNEFGRCYRKPIEAETEEEKVRVEELRGLIEPQILRRMKSDVAQLPPKRIMPVLIPMSNLQRTYYTSAINLFKGLKKGDKEAASSPFKNHLGVLQYLRSICTAPHAPGLGRFAPQPLAQARSEAPKLGWLLDTLREIEGKGEKAIVFAEFREAQQMLAYYIKETFGFEPRIINGDVTASAKHVASRQKQIRAWQEKPGFGVIILSPVAVGYGVNVQEANHVIHYTRNWNPAKEDQATDRAYRIGQKREVCVYLPIVRAEDFKTFEVRLDELLKEKRKLAGDMLNGTGTVMPTDWNIQDIVPDGAKDPAFTRALTLDDVLRMEWDFFEAYVAAVWQKKGFKTVYRTPARDGGVDVVAFTGNKGDLVQCKSSGVVNASLNDEGVKDVVSAEAEYRLRHPGVNFSKWVATNQFFNETAREKARRNNVTLATQKEVDAWLERYPVTNADVQRFLHLYWEQAA

SEQ ID NO: 4657 - protein, 657 aa, Halobacteroidaceae bacterium T328-2
MTGTGLFITIFIIAIIFAAIKSYNYSNENLKDVTSEVDKLINEIEEINIRSVSNLELINNLINQEGSLLKEDWNNYYFTIKNQADVDKLLNPSYYLGERKLINKYSKRDIANAMPSILTGLGIFGTFLGLVIGLFQIDNLGALQLKEEIPYLIGGMKISFLSSLMAIACSLTWTWFDKNLLDKTERKIKKLNDRLHRVLPVRIESNLLDEIIDNQEEQIQTTKEFVSDTLIPELVNGMQEAVDKSLAPSINKMDSNIDKFVRESAESRNDLVSGVESIINDTISPQISEMHEIMDKLVNVSVDKQAESIDKMVGKFMDTFNDAFDHQFEALRETLAGVIEWQKSTREEMEKLINTVAQSAERQDQMLGSTENLLDNVQGYVTEFDKLNQNLNENITKLNEVGSQLSSLEEQISQKLQTLIESQEEFEEVKKEQINNMVQQLDNINAYWVSIRDNFNQLNNNLTGAMEQFAENTHQGLERTFQSFDNNLAEIANRLGVTINEVNDMVEEIPNTFAQLANLIEEFSLERQEVLERIENQNNLIDAEFKEINTSLKELEEDDYEKVKEILYEQLKDKFSKEDIDELQIELSDIKNLIEEDIKELSNKIKKENKDSDIKFKKILTQVKEEIVDEIAAKLEEDNVKDKTDDNGGLFSRFGRG

SEQ ID NO: 4658 - protein, 245 aa, Halobacteroidaceae bacterium T328-2
MDVFRRDLSREDKEEKPNFWISYADIMAGLLLMFILLLMVVIFDYKDTLAQKKTEIKKQQVKIEQKQNKIEQMLGVRKDIIEALKDKFANTNLKLEIDSQTGAIRIPGEVFFQIDSVEVSKEGVENLAKFVPSYIEVLLSDNFKKYISQIIVEGHTDDQGSYMYNLELSQGRALEVVKQIYKENFVSEDYKKLLRDYLTANGRSYSQPILNEAGSIDRKKSRRVEFKFRLKDEQMIKELQRTLEE

SEQ ID NO: 4659 - protein, 391 aa, Halobacteroidaceae bacterium T328-2
MRKFNFTFTPQKLTEANKKIKRTFPSANQLGKERKKKYENLDLEQLLEKISKTEEDKIKDFASGLKNRDIYALAYNFNNISKGLMYKVKEILTYRFKKSMVKIMWNNFTKDHENQYIISFFKEKIGLINRLKFRGSPYNLLVDLFSNDSPVKGIIDQIVSLRLNYEEWINRFHLKRESKLAQAIISNLFIQPNIDIFKQEENELLVKLFSYLNGNSFSKIAENYLELFSVEEFEEELMQLIKEKMGDPVEEYSVTWQNVSDIAYARAKQWFNNKEMEEFFINIEADDEEGRRRFNYWKKYLDTVEKVKYIREELQLFLIFKDIVVIEFGEINNSIFIYDRNYFENNLVKYTVENNKADNKKFKDTSKCIDWIRHSSSWETKTDSIIQDLIK

SEQ ID NO: 4660 - protein, 781 aa, Halobacteroidaceae bacterium T328-2
MLNWLKNKLSSNEPDIIVKCELIKDGIKFTIYKEDDNGRERLNFPITYTKYFNLKNLVKKDFYLSLQVLEDLWHGGQLKESEANSYFISVDNIYEFEDELIKLLGFENDKDLQLKINSDLAVGSNNFSLSYKLYYPEYGYISNFHDRRGNFYPINNKRAILLNKALVKLLKLIENPPVKRSEHPPYVAKVKSLAKKLGAEFDDYLKNEEYYFPEEIDVEVEEKAIDHLQLKPRFNDLDETLNHEATKSLENDSSYGIKKDRSGKNRRIFFEDETKKDYKQIKDNEDIKGADVPKLINNPTSVLPESVDLERFSDRVKGLRERVYEAQPYVRGKKSDDMNWFELDIGVDLKNEVQDTEDDSKDTKKETLELDEFDRLVKEAKEEGEDYVLWDNKWVKIPDESEDFINATKEVKEIKKDDKVSNDKLPYIFDIYENVNRLEYNLELLRHKEKLRKAGALTYERPSLLDDEYELYPYQKQGYVWLNRLKLASLGGLLADDMGLGKTLQVIALMAQLKEIDKLTPSLVVAPASLLVNWKEEVKKFCPTINDIYIHRGSNRCKDSEVIKKSEIVLTTYQTLVRDQVILGEVDWQVVVCDEVQHIKNKSTLATHAVKAQKAKIRLALTGTPIENGLSDLWSIVDYIQPGLLNSYKAFKEEFVKPIEEATSQEEFEVYEKELKSKIKPVYLRRTKEGELKDELPGKYKREQKIEMSSKQEMLYNQIIIQQKESESRNHLATLQKLLNLCSHPGLVEKNWEEKTVEQLIKEGPKLKKVIEILSEIKNNG

SEQ ID NO: 4661 - protein, 646 aa, Ferrovum sp. Z-31
MNVTAIVLPYLPLAVGIVLLIATGFFLKQFFLPSKRLHQELSVAIRKLTEIKQRLGEKSIVEIDEIYDVMITDELKHLWSEYAETLHPQKKLDEFGQIKIGRYRATAMAEVFFSEQALVETPLRTAFYKHLPGILTGLGIIGTFSGLIYGLNSFHVTDNPNAVRASLGTLIQGVGHAFIISAIAIGLAMLCTWLTNRELTLRYRQVEKLCQLIDSFFDAGAGEEYLSRLVEASETSATQSIQLKDALVTDLREILTELTERQIREMSSGIGQTFADSMREPMERISRAVEGVSANQGDAVNRMLTDVLSNFSTRMEEMFGGQLHGMNDLLTKTAQSMQATADRFDKLSDNMNTAGQNAAEAMADRLNHAITSMEAHQSVLNKQMGEFVEQIRESISQSQSESSQKLQETLSMLGEQVAGVIGQIQDQAKKNSDTQNDTVNNLSGQVESLISQLVKTSSDLQTSISALTSATTSSIERMNSGAEMLAIAADDFAKAGQGVAGTMNASAEATGKIQSSSQTLSTATTSVQQMFADYRRTSDALAAMLADLKTTMETAKKEAGLTTQLVGQLKAAADQLGQAQQQADTYLQSINKVLTETHQSFANEISNTLKKGNSQFQQELSQAVGLLRSGIQELGDTLDDLPGRKG

SEQ ID NO: 4662 - protein, 237 aa, Ferrovum sp. Z-31
MIGLKLPSRKRARDEAEKPFWISFADLMTALMVLFLVSVTVALFAVTQKPDEVAKQQAQRERDIQALLSRISEATKAYPGIVVRGHSIDFGSRANFETGSSALSAEQATTLRAFVPKVLSVVRDPLGQKWLKRIVVEGFADQRGTYIYNLNLSLQRSERVLCVLLASPKSASNALTDADRLQTRELFLVGGSSFNALKASLEESRRIELKLEFLELDENRLTPRDAPLDDASCPLDL

SEQ ID NO: 4663 - protein, 499 aa, Ferrovum sp. Z-31
MAQVVATYRRSRKVAGLHDLKYVCYGVAMPMQDGWCVLGDDKLRDELLADVENLNESRKRFRCFQALLSSYFAFTRYDGQTPKTAHAGWEILRGWLWRQRTLFQWENKTEKLRTPGWFTVLAKHENLLTDKPCDRYGKDMLRGDNSNLEEARQGLGIPRDSWVMEETILSQMRSAANLGDTPFKSHIDQLLDVINGQTSVDVSELLKQKSIAVLVSRYARCDIKLEHPAMRDASVSIIGNPWLKRTAWDAWVKNFRDQPDEEAREMVNGWLTRQLITDFFALLSSDGQADQRRLNYWLRFVPDIEGTPWLALGPDAMRNNSKPYRELRDRARGRLLRLDNPGASNNNAFIMKMGERLIVEFGVTGHACYIYPSTPVPFKLEGLSISLNDMKNKSLGESLRHADGHILWERNFDRVIFPNVGYSSFTTSRPKAKPQAAQNAGHNFSYVEQYVKKFSIRSEDHRPNGAFWVLAKKGLNSEVDNNLESWGFKYKDGRGWWKQ

SEQ ID NO: 4664 - protein, 1236 aa, Ferrovum sp. Z-31
MKNLWPFKPANTSSPASTVLLALRAEYLEAGVIFSAMSAGWLDTPYSFSEQGEQAALLAQLTEEGFAERDGDTLRLRWGSLYQLLKTEGYQDSLPLLGLPPLEAWRPKLESLGGLTDTNFSILLAGWIDSDGNPVQSNTEIKGAVLKCGQREILLPEESWLAVCVLGEFHRRPQDQRGADSNRLAWAGIRRHALTAKADLSDFLQKTIVITPERLNIILRKTQFGDSKTVEVIPGFEGQPSNWIERFDSFNTVLERYQIPGGAGLVHVILSPEAQTVLREIKLMPGRRVAGDRAEAFLRNPIAALGPDAAKVIDPEQFEQAREDAGISYARFTAKVARDAGGLPVECALLVEESIAGNLHSETLPLTGEDVLLAFIEKLRARIAQGAQCLFWEGYDLEILGDTPDQLTLLESALRDLHRMQWFSTAEVFDLSRYAEGKIEGIGEEQPYYSAFIARKDDESSWFPDNIICGFSFVPEDGAAPVDLPLTDDGLKKIRHVCEKAKADGLSSFDFPGCPKPIPVVEAEQMISIIDKAKQDIGKGNTPKTLQDRNPRKGLILKPNIVKVDYEERRGVLAISAGQQAKLPGSLKKGIALKEHQISGVAWLQHLWSLSPQECRGALLADDMGLGKTVQLLTFIATCLEENHQADPFLIVAPVSLLENWQEEMEKFFVPGAFPLLTLYGSDLAKLRTPNADLDDELAGIRLLCRNWLGSAKVVLTTYETLRDLEFTLAAQKWSAVICDEAQKIKNPNAMMTRAAKKQNVRFKIACTGTPVENSLADLWCLFDFIQPGLLGALNEFGSTYRKPIEAETDEQKQRVEELRSIIEPQLLRRIKADVAKDLPKKIIVDSCNNLPLSKRQRTHYANAIAQYRKQSVEGVGLKNHLGLLFYLRRLCADPQPMGQYSNLATPLEEIEDHSPKMKWLLAELGNIKMENEKVILFCELRDVQRLLQRAISERFDLVPAIINGDTSTSNKSTVSRQKQIRAFQEKSGFGAIILSPLAAGFGLNIQAANHVIHFTRTWNPAKEDQATDRAYRIGQTKEVFVYCPVVVADDFTTFDAKLHRLLEWKRNLSGDMLNGVGDLSQNDFGDLENVGGGAVFDNTPITLSDVITMMPDAFEVFCTVLWSKLGFKTNKMGGSGDGGIDVVAINGNKGVLIQCKSSSIEGQSLGWDAVKEVVAGAAAYERMHVGVVFQKVAATNQLFNGAAKEQAKLNNVELLDCHVLEEMLKKYPVPRSLIS

SEQ ID NO: 4665 - protein, 711 aa, Enterobacter sp. SST3
MPFSVICIVSLAVACFIFFYLFRAINIVNSLKKYTQSINSIESNSPEEQLAHLQNLFKRPELKHAWNEFEESLHPQSELEGGEEKIVRIRATAPSSSYFSEQQLVDIPLNTEFFKHLPGILTGVGIIGTFYGLMIGLNHFDPSTPEQVTSSVNNLLHDVLYAFLGSAVAIAASIFVTWLEKLSIAKCYKYLEKFTAAIDKLYVSGVGEEYLASLVKSSNESATQARHLKESLVTDLRDMLLHLAESQKVENERLANTLSNTYRESGAQFADQVSGAIENSLKSPLDKIAGAVQTASGDQSGMVQNMLQDVLTAFMAKLDTTFGQQFTNLNEMMGQTVGAIQTMQSGFSALLQDMRQVSDDSRQGSAQLIEQLLSEMKSGQQAMQAGMNDMLTNLQASVAKIGAEGEGAGERMARQLEKMFADSEAREKAQAEHMSAFIEAIQNSVQQGQSATMEKMAASVEALGEQLGSLFGQIDKGQQQISANQQANQQSLHEQTQRVMSEVDDQIKQLIETVASQHQGTTETLNKLAEQTNRQIQDMQNGADKMRVAAERFEHAGDKVSEANHLTADVLNKAQSAGSSLSLATSELTSVVSDYRNNREAVSKSIAMLELLAANTQSEQTTRSQFITDLKQHAERLQSYNREAQTFMENVSDVLGKGFEDFSEGVSRSLDKTLGKLDVEMAKASNLLAGSVEQIGESVSELDDVLSRVRA

SEQ ID NO: 4666 - protein, 246 aa, Enterobacter sp. SST3; identical to SEQ ID NO: 3769

SEQ ID NO: 4667 - protein, 560 aa, Enterobacter sp. SST3; identical to SEQ ID NO: 3782

SEQ ID NO: 4668 - protein, 1079 aa, Enterobacter sp. SST3; identical to SEQ ID NO: 3783

SEQ ID NO: 4669 - protein, 851 aa, Enterobacter cloacae EC_38VIM1; identical to SEQ ID NO: 3776

SEQ ID NO: 4670 - protein, 245 aa, Enterobacter cloacae EC_38VIM1; identical to SEQ ID NO: 3777

SEQ ID NO: 4671 - protein, 597 aa, Enterobacter cloacae EC_38VIM1; identical to SEQ ID NO: 3778

SEQ ID NO: 4672 - protein, 1079 aa, Enterobacter cloacae EC_38VIM1; identical to SEQ ID NO: 3779

SEQ ID NO: 4673 - protein, 711 aa, Enterobacter cloacae UCI 39; identical to SEQ ID NO: 4665

SEQ ID NO: 4674 - protein, 246 aa, Enterobacter cloacae UCI 39; identical to SEQ ID NO: 3769

SEQ ID NO: 4675 - protein, 560 aa, Enterobacter cloacae UCI 39
MTPALNSLSQRIAAKLSSSQQEEHYLRNDFHALASAGREMEKRFDKAEKIPTPPHEMRLAALRRFRLAEELSEREWRMVFYGLADSDPQHPGQPVLLEDDAFFPEINSAIEKRIETKTLKRRDWAALCSSYFAYRHESPETNPHWCVLRGHIAKGYFVVKAAIRREKSWMKTIEFYHDIFTPQAGGVISQQLLSGESNSLSSLEKIAQIPDSSWLWKRIFTVLLAQLDTLDDPHFLEKISWLLGLAAQWVRFRDDIMTATLTRYYHSTYRDQAHSALKQAALEYWDNPQLKSQQNKWHQYVSEPVAAMVRGWLAKQDLMHFFELLRGNGDVDQARLHYWLRFANQMGFTRIVMGPDAWHDRGSDFVKFREENKGRLSQLRGGRNLDNAMIMQINDYLFVEFSGTGNAMYAYRIGHAPFNPESRTLDINIHLKDQGRCALRMPHMPRAEGYNKVRITGWMLKYDDELRKLGIRWMAEEPVKFIDKKAPSPASVSDIKIINPLRDTAIQRLVENTPCIVSDNRQKGGVLSVQLKAPDDITERELLRLGFTPVTKEPHRYWIK

SEQ ID NO: 4676 - protein, 1079 aa, Enterobacter cloacae UCI 39; identical to SEQ ID NO: 3783

SEQ ID NO: 4677 - protein, 648 aa, Geobacillus sp. JS12
MYTVFETLFSLINKIGNEGFTDLFLYFQFSLFLVMAVWQFVRIQREIAVMNQLKPKLLELNRPLDGSVYEIDQAIHNLFAQVKKSKYKELWERYYNRVSQKNEDERINVEPFFGFDVMYHHMGYRTLMDMGAGIHVSLGVLGTFVGLSVGLAQLHVSDTEMLRSGIDSLINGMKVAFYTSVWGVLLSLIWTMFDRWISGVLERNIDWHSERLDFLLSTDDEELFLNRLEKLSRHQADHLKTLLTDALERAMQPIALSLQQSHGSLQQAFGQLHDQFAQLHEGMETQAKLLESQIELTKSTSADVTSRLVDEITGGTQQSIGKFREFVQQSQVLHSEMMKTIESFTSRFAYTEERQAMTLERTEKMFAQFEKMVGELELMKDSYQKTAGIMNGLGETFYQLQQLTKDHLPVQQEVMRSNQLLAQKYDDLVERFTHFNAQVETHYSQLLEQLVHAASSLSASFQTMANKFEESLRIQKESLHDSQQLLGDVQSAVAALSPLVPELRETFDRVRELKEQLLEMQEAQKQLLPELVQLRTQTNETVEEALQTTKVYMHEMTEQIATLQQNWAMTKEQLAKITEALHLSMKDFAENIDSGLSKTYQHFDETLTKAVQEVSGLVYQFSEVQSDFIENMEDLVDHLDKWKAGAST

SEQ ID NO: 4678 - protein, 223 aa, Geobacillus sp. JS12; identical to SEQ ID NO: 3598

SEQ ID NO: 4679 - protein, 426 aa, Geobacillus sp. JS12
MKYEYEPVLLKRWLREVRPPLLGKTMENSNEKYRGVLERLSDQFAGLVDAPASAFEQWVKQLSRREKLLLPNLYKKELPEEMKKAMIDVIQQHVRHERRLFRVLVDVVYETCDLDEIWKLLRYAYASHIEKIEKRMEKEKSEKWRRYLSSKDPIVYLATTAYESEKGILEELETFYLTKNFPLFKLVLMEIFQLADESFFLKEQELYRDMFVSSTNEQQQKMANALIKKCKLNHVKPLGRLIFEKLQTYHRKPMLWRYVGEEEKRRFAQWIMRLELKDFFGGVNKNHERFQYWEKFIPKLEDVVVTDERTTLIMYFRDVVIMEVLGTGAVYIYRTDVFQRHFQPKIDRMLAERERFANKAWRKVREVKRTELMDRDLTIPGGWLRHNGGWQWKFDEWLRRELGWEVRRDVLLQKETENDEGSFDAE

SEQ ID NO: 4680 - protein, 874 aa, Geobacillus sp. JS12
MFFFKKKRKMMKAVLTPNEDGIHFSFQLHDGKTIAELKLPMAKEDIEKYYKVQGFQQYVAWEELYDSGVLVDSTLPYSEYYELLKDESAKEVLQHLGLPVVEEHVSGKLSLRSLPHEADLVLQLFDAGGRNLDRVGKQAGAIYVLPDRLMLLPERVYRLKQALLGSYESGYEKIGICQQLANEAGIELEHFLQNETYHVVDAYDIDVAVHRHDHIELVVKGRNEEETRHLQRLQRVSSIKKGHGRSRFVSTEQVHADMMHLQQKRHITGEEVPLFLENPAAVLPEHDYLFDLDQFSERVRGLIPIERVRPFFHERTGMQWFDEESGHTVPYDETFLRELMEKYPDQQYVEYNGKWIYLDPLLRRKLLQLPKDADEALKRRYILDIKDNEEQLEYKMDSAQGAPCRRYPVPSGLQAELFPHQIEGFEWLCHLAEQERGGLLADDMGLGKTIQVIAFLLHQKANGRLKPTLIVLPIALIENWVAEIEKFAPSLLDGLYIHKGRERLASSQLISQFDIVLTSYDTLKMDQLLLGKIEFQAIICDEAQNIKSHTSQRSRAIRAMQGRFRLAMTGTPVENSLDELWAIMDFVQPGALGSLKEFRFRYAETSDYDALLVALQPYYLRRTKQQILDGRLPKKHLVPPIYVEASPIQKEIARSMLATKEMGQVAILNMITRLRQLYGHPGAVIPKYEQLSYQEVPKLKETMHIIETIRQKGEKVLIFTEFRKLHFLLKRIFMETYGISVPVIDGDAKNRQLIVRRFNEMQGFGIMILSPKAAGVGLTITSANHVIHYTRWWNPAVENQATDRAYRIGQQKDVYVYHIITRDSSHFPQGTVEELMHELLESKRHLAENVIIPFNMSEIQQAVAEKVVGRRQLV

SEQ ID NO: 4681 - protein, 472 aa, Spirosoma linguale DSM 74
MTEFLLPAGFLGSWTIYSIYYLRKAYRTPSNVNPYVLDLIPSVFPTIGIMCTAIGIAYGLSDFDANDIQGSLPQLLGGLKSAFFATVLGIAGLIIFQKVLASVQQHIDQSPDRPRSSSDELSALNLISTQVENLERTFRTELDMVNVSVKENSTTFNQQIGKLNDLITTQTRQEEDHYQITYRQSESIIRNLTELKKAQDTYTKEQQTGVDAIVKSMLGNQKLLTAKFDEFSELLRKNNTEALVEVMRASTEQFNAQMSELIDKLVKENFKELNGSVQMLNTWQKENKEQVARLSEQVKTIIEQVDIATNNLKVASNVLTTVADVNQELVSGDGKLMTLVSELEKVMISDGTFTAITSKVEGAVSTLVKTTDAFDLTTQKLNVWVRNQMNFNEKAEILVTQLEEFRNLNGSVWDKYRAEMSKAVNIVSTTSTALKNDLENINQEFYERLNDTLQNLDGLIQRFMSGQPTNRR

SEQ ID NO: 4682 - protein, 222 aa, Spirosoma linguale DSM 74
MRQKKESFWIPYADLMTVLMVIFLFIALAYMGLLQNKVGQVEDVKAKIYTDLKAEFSQVATQWNLEINNDLSIRFKDADGLFDGGKGVPTGKFVNILNQFIPKYLAIISKPEYVKSIEEVRVEGHTASGDYQQTIELSQQRANNVLYYLVKHPSFFRLNQESQRHLQYILTTSGYGWSRALDADGKYSKITRKQYDVQSRRVEFRIVTNSDRVIEELNQIKL

SEQ ID NO: 4683 - protein, 260 aa, Spirosoma linguale DSM 74
MTLYSFNGLQQYLDQKGFPKTSAGTFQLLKRDLLKGMQQGDIVIRSDGIYCTIDGQEYKGYIFNQKPNISRFGEPKFHTADCEIVEKRQKLHGDYVFTTLENVQLYDSGQGGAPYPKKDVYTILKLCGYCRQLIGAQNEGIVDTEDFYAMLVEQYGSAAEPDNSVVDIFGYTPDFSLISKKIREAKAYKCEKCSIDLSAVMDRHFLHVHHRNGRKTDNRPQNLQCLCIRCHASVDDRHKENFATVNKERELAIFIKKFPK

SEQ ID NO: 4684 - protein, 432 aa, Campylobacter coli 7--1
MYELPILIFKNLSGHILEGTIIIIFFFLLFLFLLYKRKSLHKSSTSLLITIGICFTFYGISKGLANFDANNIEENLPQLIDGIKTAFLVSVEAVFFAILLKVIALFMEKPFSNQDEIEEDVGIEDIIILQKENIKISQETLETFNQSLKATKEINDNIKLLRADNEQGFVNIKNSFEGFAKTMAENNSKAFIQALEEVIKDFNNKITEQFGDNFKQLNLAVGALLTWQENYKNYIEKSESIIENLLSSFKKTVEDYSVVVDNSERFVSYAKSFENILKELSEQRIQIQSSIENLDIFLKNTQLSISSLMQEINNYKEQSLNTVENISKLSANLEESYTKSSEKLINDISEYVGKFNTELSTHNEKINTQLIEGLNSASASINSQIKTLDQELENVLKNLGSNLASISTKFVDDYNTILSNLSSLNQKMSNLR

SEQ ID NO: 4685 - protein, 235 aa, Campylobacter coli 7--1
MIFFKKHKKTSDDDDFFIALSDIMTALMLLFLLISIVYMIKVEDSVKVPKIFKETTQGLSERLNKEFDKDLKGWGAVLDKDLTIRFYQPDILFKTGSWVLSPKFKEILNEFFPRYLKIMMDEQFVNNIEEIRIEGHTSSFWGNIKGDVAYLNNMELSQARTREVIKYLLSLELDEKEKEWLKKHFRAIGFSSAKPLNDKSQTLQKGEKENFINSQRVEFRVRTNIENKIAEVVSK

SEQ ID NO: 4686 - protein, 272 aa, Campylobacter coli 7--1
MNIESILKPIIDLRIKIGATLEHIDLSYIKNSISAEEIKLLETQGIDVEINDIKVVSDGTFAYKNRRVLIYIRDVSPLYKENDINSTLPRYHLCHCNAYQTMLSNNRKHRYVVSSRDDGVFWLNFFGFQGDTMVKTKSQERKLNVCMYCLRKLNWCNINQYSDKDRSIIRNNFDLKDFFKKYPKNIIDPKNHFNDKIAPLNIYSNDWREISYNTRKKAQWKCQKCHKDFSQNKTQLDVHHINGQKNDNNSNNLMVLCKECHSKEPMHEHYYK

SEQ ID NO: 4687 - protein, 432 aa, Campylobacter coli 67-8
MYELPILIFKNLSGHILEGTIIIIFFFLLFLFLLYKRKSLHKSSTSLLITIGICFTFYGISKGLANFDANNIEENLPQLIDGIKTAFLVSVEAVFFAILLKVIALFMEKPFSNQDEIEEDVGIEDIIILQKENIKISQETLETFNQSLKATKEINDNIKLLRADNEQGFVNIKNSFEGFAKTMTENNSKAFIQALEEVIKDFNNKITEQFGDNFKQLNLAVGALLTWQENYKNYIEKSESIIENLLSSFKKTVEDYSVVVDNSERFVSYAKSFENILKELSEQRIQIQSSIENLDIFLKNTQLSISSLMQEINNYKEQSLNTVENISKLSANLEESYTKSSEKLINDISEYVGKFNTELSTHNEKINTQLIEGLNSASASINSQIKTLDQELENVLKNLGSNLASISTKFVDDYNTILSNLSSLNQKMSNLR

SEQ ID NO: 4688 - protein, 235 aa, Campylobacter coli 67-8; identical to SEQ ID NO: 4685

SEQ ID NO: 4689 - protein, 272 aa, Campylobacter coli 67-8; identical to SEQ ID NO: 4686

SEQ ID NO: 4690 - protein, 432 aa, Campylobacter coli LMG 23341; identical to SEQ ID NO: 4684

SEQ ID NO: 4691 - protein, 235 aa, Campylobacter coli LMG 23341; identical to SEQ ID NO: 4685

SEQ ID NO: 4692 - protein, 272 aa, Campylobacter coli LMG 23341
MNIESILKPIIDLRIKIGATLEHIDLSYIKNSISAEEIKLLETQGIDVEINDIKVVSDGTFAYKNRRVLIYIRDVSPLYKENDINSTLPRYHLCHCNAYQTMLSNNRKHRYVVSSRDDGVFWLNFFGFQGDTMVKTKSQERKLDVCMYCLRKLNWCNINQYSGKDRSIIRNNFDLKDFFKKYPKNIIDPKNHFNDKIAPLNIYSNDWREISYNTRKKAQWKCQKCHKDFSQNKTQLDVHHINGQKNDNNSNNLMVLCKECHSKEPMHEHYYK

SEQ ID NO: 4693 - protein, 432 aa, Campylobacter coli LMG 23342; identical to SEQ ID NO: 4684

SEQ ID NO: 4694 - protein, 235 aa, Campylobacter coli LMG 23342; identical to SEQ ID NO: 4685

SEQ ID NO: 4695 - protein, 272 aa, Campylobacter coli LMG 23342; identical to SEQ ID NO: 4692

SEQ ID NO: 4696 - protein, 432 aa, Campylobacter coli; identical to SEQ ID NO: 4684

SEQ ID NO: 4697 - protein, 235 aa, Campylobacter coli
MIFFKKHKKTSDDDDFFIALSDIMTALMLLFLLISIVYMIKVEDSVKVPKIFKETTQGLSERLNKEFDKDLKGWGAVLDKDLTIRFYQPDILFKTGSWVLSPKFKEILNEFFPRYLKIMMDEQFVNNIEEIRIEGHTSSFWGNIKGDVAYLNNMELSQARTREVIKYLLSLELDEKKKEWLKKHFRAIGFSSAKPLNDKSQTLQKGEKENFINSQRVEFRVRTNIENKIAEVVSK

SEQ ID NO: 4698 - protein, 272 aa, Campylobacter coli; identical to SEQ ID NO: 4692

SEQ ID NO: 4699 - protein, 432 aa, Campylobacter coli CVM 41904; identical to SEQ ID NO: 4687

SEQ ID NO: 4700 - protein, 235 aa, Campylobacter coli CVM 41904; identical to SEQ ID NO: 4685

SEQ ID NO: 4701 - protein, 272 aa, Campylobacter coli CVM 41904
MNIESILKPIIDLRIKIGATLEHIDLSYIKNSISAEEIKLLETQGIDVEINDIKVVSDGTFAYKNRRVLIYIRDVSPLYKENDINSTLPRYHLCHCNAYQTMLSNNRKHRYVVSSRDDGVFWLNFFGFQGDTMVKTKSQERKLDVCMHCLRKLNWCNINQYSGKDRSIIRNNFDLKDFFKKYPKNIIDPKNHFNDKIAPLNIYSNDWREISYNTRKKAQWKCQKCHKDFSQNKTQLDVHHINGQKNDNNSNNLMVLCKECHSKEPMHEHYYK

SEQ ID NO: 4702 - protein, 432 aa, Campylobacter coli CVM 41963; identical to SEQ ID NO: 4687

SEQ ID NO: 4703 - protein, 235 aa, Campylobacter coli CVM 41963; identical to SEQ ID NO: 4685

SEQ ID NO: 4704 - protein, 272 aa, Campylobacter coli CVM 41963; identical to SEQ ID NO: 4701

SEQ ID NO: 4705 - protein, 432 aa, Campylobacter coli; identical to SEQ ID NO: 4684

SEQ ID NO: 4706 - protein, 235 aa, Campylobacter coli; identical to SEQ ID NO: 4685

SEQ ID NO: 4707 - protein, 272 aa, Campylobacter coli; identical to SEQ ID NO: 4692

SEQ ID NO: 4708 - protein, 432 aa, Campylobacter coli; identical to SEQ ID NO: 4687

SEQ ID NO: 4709 - protein, 234 aa, Campylobacter coli
MIFFKKHKKTSDDDFFIALSDIMTALMLLFLLISIVYMIKVEDSVKVPKIFKETTQGLSERLNKEFDKDLKGWGAVLDKDLTIRFYQPDILFKTGSWVLSPKFKEILNEFFPRYLKIMMDEQFVNNIEEIRIEGHTSSFWGNIKGDVAYLNNMELSQARTREVIKYLLSLELDEKEKEWLKKHFRAIGFSSAKPLNDKSQTLQKGEKENFINSQRVEFRVRTNIENKIAEVVSK

SEQ ID NO: 4710 - protein, 272 aa, Campylobacter coli; identical to SEQ ID NO: 4686

SEQ ID NO: 4711 - protein, 480 aa, Campylobacter hyointestinalis subsp. hyointestinalis
MNETSTDFYQYFISNLHGHIAVGILAIVFFMIYFIYASWKPKKVHPQSSSLLITIGIAFTFFGIAHGLMRFDANDIERSLPDLINGIKTAFLVSLAGVTSAIILKIIELVYGISSKQSTSSIEFDPVSLLKNQETNLNIQKQISISLDKINASITGDESSSLIGQIKNLRTDTGDNFSRLITKFETFAKEMSENNSKALIEALNGVIRDFNEKLTEQFGENFKELNMAVEKLVIWQDNYKLILEQTQNAFENTQSSLEATTIEFDKVNNTVSKQIDDYQKVILASKHFTEEAAKVFELVENISIQRDMLYKNILSLGDFIQANSTALPQINDAISTFQKNAMDNISNITIQTKNISDTFVKNSNDMLSDTRDIIKSFSDNVSNDIISNNKIMNDRLSEYMSSFNTELSKYNNRLNEQLIASLNQASQSIKSQVDILDKELENALRNISNNLASISEKIASDYNSIPGRLRSMIESLNRHQ

SEQ ID NO: 4712 - protein, 239 aa, Campylobacter hyointestinalis subsp. hyointestinalis
MKNNNIFVKHHRDDSDYWIALSDIMTALMLIFLLMSVIYMIKVEDSVKIPKIFKEVSQGLSQKLNKEFQDDLKSWGAVIDKDLTIRFSQPDVLFKTGSSDLSVKFTDILNDFFPRYLKIIMSDEFKDNIEEIRIEGHTSSIWTGEDKQKAYFKNMKLSSDRSRSVLEYLLVNANDIEKDFLRKHFRAIGFSSSMPLDSNGNQVAKSGLKEDFLLSQRVEFRVRTNIENKVSRIIEQNER

SEQ ID NO: 4713 - protein, 258 aa, Campylobacter hyointestinalis subsp. hyointestinalis
MNVELIIENLVNLRKKIGANLLDLEFKFEHNDTRAKMIEALENGGIELENLSELEIANDDTFIYHGRRVILHIRDVSMYHNDFNLPKYHLINCQKYQEMVSANRKGRYVIASRDNGLFDIKKITGNDVQLSQEKLELCKYCLNKIGTNILGRDKNMYIKRFFERYPKDYEFGNGHEDDKTAKTNVYADDWSIISLKKRTQVGFICQKCHKNFYNNKGMLDVHHKNGQKNDNRDENLIVLCRECHSMEPMHEHMKYLYS

SEQ ID NO: 4714 - protein, 427 aa, Burkholderia cepacia JBK9
MSGIAWAPYVFAGGPIGTVLADKQTLAFILLNACLTIFFAFVRFDRFSVVHGPEILTTVGIFGCFLGIALALLQFDASNVSESVPHLLEGVKTAFWASVSGVFGSLVIRGRHYFWKTPIPQTPGAPKAATLDDVVAATHALQLSLSGNEQGSLLSQLKLMRQEQGDELRMLRTSFDTFAQRMAEDGSKALIDALKEVIRDFNAQINEQFGENFKHLNAAVEKLVVWQQQYKEELDKLQVLQKSSADDLRGASSGLALFVDRASSFAHTAAALEDTLRGLAQQHQLIDQSQRSITDVLSQMKDVTPQFSRKVDEMTESMKQGVARVQAEVGDVVKNFGIQVQSSSSEMKQLLTDTLRKSQSEVNDGLVRSMDAVRQSVVTLDKGLQEELTKSLETLGRQLASLSEKFVADYTPLTDRLREVVRIAGTA

SEQ ID NO: 4715 - protein, 230 aa, Burkholderia cepacia JBK9
MDFEHSNQSHWIPMADLMTGLMMVFMLLTAAFMLRVEQTTTLVVKEYETTKRDMQLALQKEFAKDLKQWNAEILGDMTIRFNDPTVLFATGSSELRPRFKQVLGQFFPRYVALLTSGQYKDAVKEIRIEGHTSALWTGTTDEKIAYFRNMELSQARTRSALEYLLSLPAVQSNEKWLVQHVTANGLSSSRPLTQDSQAAVSQIANQRVEFRIVTNASEKMDLIAEKLAKK

SEQ ID NO: 4716 - protein, 282 aa, Burkholderia cepacia JBK9
MSFQLPNFLNWSSLNALRQEMGAPLAASFVPDHKFRDIDLPVLERLQSNGVDVKFDEVEVLSDGTLAYKGYRVLLYIRDITSIGHQESMPRYHLAYCRTLDKMRRNARFDRYVVANGDSGKFQVNVIENDVKTQHVRLNVCQNCLDEIHWNGFEMKMPRDGRLTLVSKFSLPDFFKKYPRDLVAVKPMHSSDTAPLNVYSQDWNEISERTKRQRGYRCASCNTVLRQTDSKFLHVHHQNGQKYDNHDSNLEVLCIGCHAEEPMHGHMRALREYQEYIERYRR

SEQ ID NO: 4717 - protein, 547 aa, Pseudomonas fragi
MISQYLEGALRSASAGTMTELFIWVMLALFAMAIIQGKTGKHGFFVEHAPAVLVSLGILGTFIGIVIGLLDFNAHDIKSSIEDLLDGLKTAFITSLVGMTLSIVLKALDAWWFESVRGKAEQPDSVTPEHIYGVMSRQEKLLEALNHSLAGSEEGSVAGQLKLLRSDMGDFRNGLDRGQHEFQDKLFKQLVMFSEMLAQSATETVINALRQVIQDFNKHLVEQFGDNFKALNESVGKMVDWQEQYKQHVEVLEARIETAVRELERTATANEAISRSLTTSEQSIGSIDNHCQSIPTAIGQLEPVLQVNQHQIQELQRHLDVFIAMRDKATSAVPELQQHMDTLSKALSDGMQGVISTMHEGSMEFGRSVDLTNTALTEASHVISSQTEQINENMKDAAQEFGSSVRGTLESMLNNSKALEQQMGLAIEQASGSLTETFKQATGKIQDSLTSTVDASLNTLRSTVEGNLSQTESLIQGSANRTMGAVEAQVREATERANASLQAQLNAMDQAIGRELEKVFKEMGSALATISRRIADDHAELVSRMRS

SEQ ID NO: 4718 - protein, 240 aa, Pseudomonas fragi
MDNLFRGQHSKKEDAEHWIGISDLMSGLMMMFLFIAVAYMYYVQVERENIKEIAVAYKDTQVAIYNDLNNEFQSDLPRWNASIDRNTLQVTFNNPEVLFRSGSPELSTQFQAMLSDFFPRYVTVLSRYRGAIDEIRIEGHTSSDWGALHGDEAYFPNMALSQDRTRSVLQYVLSKLTSGADRDWVRSSFAAVGYSSSRRLVDASSTAEDAARSRRVNFRVITNSELQIRTIIERLDGNQR

SEQ ID NO: 4719 - protein, 171 aa, Pseudomonas fragi
MEINVDFSGLWAQVKRLNAETVDFDWTAAAQLDPIDIALLEGREVRLDDLNVINGLLSVDGRQVLLYIPDQFSPVDVVQLSPDKGKRFHVADCKTLNDMRSKGRFERYVVTNNLSGIFPISGKNSRGVREELDSRLLVCKNCLEKLNYQNYCHESTRSLQNSERHAQQRSI

SEQ ID NO: 4720 - protein, 498 aa, Legionella pneumophila
MPKFFVFLALSFFSSLALASENHMAAPNVFSLLQQFSVIELGWIFLTVCIFIFFFIKFDKFAVTYGPEILTTMGIVGCFACIAYALLHFNSENITASIPFLLNGIKTAFCSSFIGVSGALLIRGKHTFSKVDFYKKNESAPASMDDLVKEIAYLRRTLSGDEEGSLISQIKMLRQDSNDQQKKLQESFDNFAKHMVENNQKAFIEALKEAIRDFNQNLTEQFGENFKHLNQSVEKLVVWQKQYMQELETIKRYQSQFSNDMRQSSDAFATVLEHAKQFTDIAQNLKILLNSMDKQKDVLFAQEKALSELLATMKEHIPEFSSSTQKMITEISEGVKLVQLETTKIISNYSTEIKLINSEMKSALADVLKEAQNSFSTGIKDNMEMIQEAIISVESQTTDVIKNHSAQLQSTQAEMKNVLVDGITKSQQEITAGLQENAKIIREGVLALDKELEKGLTDSLTSLGKQLASLSEKFVSDYLPLTERLRDIVRLAKNSEAA

SEQ ID NO: 4721 - protein, 230 aa, Legionella pneumophila
MEGHNQSYWIPLSDLMTGLMMVFMLIAVTFMLRVEQTTTLVVKEFEETKSDLAQALQKEFAKDLKQWNAELLGDMTIRFDNPDVLFDTGSSIVKPAFKRILNDFIPRYISLVSSEKYRNSIKEIRIEGHTSKKWALDTDEKTAYIKNMRLSQERAQSMLEYILSLPSLLEHEKWMRKYLTSSGFSSSKPVFNQLHIADDNRSQRVEFVIVTNADSKLDEISEQIRSMKNG

SEQ ID NO: 4722 - protein, 288 aa, Legionella pneumophila
MVKLVNFFEFSALNNLRHMMEAELIKEFKFDTGISLLDEDFIKRLGDDGVEIDSLDEIDFRSDATLGFRGQRVLIYIRDVSAYRHEISLPKFHVSTCKTLVDMWQRKRSERYVLYQRENGIFQINLMRDGKVEVRQEKLNVCRNCLDNLNWNNYSENKLIRNKIVDEFSISQFFEKFPKSLLSVTPSHTADTAPLNDYSTNWTHISKEAKRKAGYKCQNLNCQIDLAGAYSQYLHVHHLDGQKNNNRKQNLKVLCVKCHADEPNHGHMKHGRDYKQFLRIYEQVKQNN

SEQ ID NO: 4723 - protein, 498 aa, Legionella pneumophila
MSKFFVFLALSFFSSLALASENHMAAPNVFSLLQQFSVIELGWIFLTVCIFIFFFIKFDKFAVTYGPEILTTMGIVGCFACIAYALLHFNSENITASIPFLLNGIKTAFCSSFIGVSGALLIRGKHTFSKVDFYKKNESAPASMDDLVKEIAYLRRTLSGDEEGSLISQIKMLRQDSNDQQKKLQESFDNFAKHMVENNQKAFIEALKEAIRDFNQNLTEQFGENFKHLNQSVEKLVVWQKQYMQELETIKQYQSQFSNDMRQSSDAFATVLEHAKQFTDIAQNLKILLNSMDKQKDVLFAQEKALSELLATMKEHIPEFSSSTQKMITEISEGVKLVQLETTKIISNYSTEIKLINSEMKSALADVLKEAQNSFSTGIKDNMEMIQEAIISVESQTTDVIKNHSAQLQSTQAEMKNVLVDGITKSQQEITAGLQENAKIIREGVLALDKELEKGLTDSLTSLGKQLASLSEKFVSDYLPLTERLRDIVRLAKNSEAA

SEQ ID NO: 4724 - protein, 230 aa, Legionella pneumophila; identical to SEQ ID NO: 4721

SEQ ID NO: 4725 - protein, 288 aa, Legionella pneumophila; identical to SEQ ID NO: 4722

SEQ ID NO: 4726 - protein, 498 aa, Legionella pneumophila; identical to SEQ ID NO: 4720

SEQ ID NO: 4727 - protein, 230 aa, Legionella pneumophila; identical to SEQ ID NO: 4721

SEQ ID NO: 4728 - protein, 288 aa, Legionella pneumophila; identical to SEQ ID NO: 4722

SEQ ID NO: 4729 - protein, 498 aa, Legionella pneumophila; identical to SEQ ID NO: 4720

SEQ ID NO: 4730 - protein, 230 aa, Legionella pneumophila; identical to SEQ ID NO: 4721

SEQ ID NO: 4731 - protein, 288 aa, Legionella pneumophila; identical to SEQ ID NO: 4722

SEQ ID NO: 4732 - protein, 498 aa, Legionella pneumophila; identical to SEQ ID NO: 4720

SEQ ID NO: 4733 - protein, 230 aa, Legionella pneumophila; identical to SEQ ID NO: 4721

SEQ ID NO: 4734 - protein, 288 aa, Legionella pneumophila; identical to SEQ ID NO: 4722

SEQ ID NO: 4735 - protein, 498 aa, Legionella pneumophila; identical to SEQ ID NO: 4723

SEQ ID NO: 4736 - protein, 230 aa, Legionella pneumophila; identical to SEQ ID NO: 4721

SEQ ID NO: 4737 - protein, 288 aa, Legionella pneumophila; identical to SEQ ID NO: 4722

SEQ ID NO: 4738 - protein, 498 aa, Legionella pneumophila; identical to SEQ ID NO: 4720

SEQ ID NO: 4739 - protein, 230 aa, Legionella pneumophila; identical to SEQ ID NO: 4721

SEQ ID NO: 4740 - protein, 288 aa, Legionella pneumophila; identical to SEQ ID NO: 4722

SEQ ID NO: 4741 - protein, 498 aa, Legionella pneumophila; identical to SEQ ID NO: 4720

SEQ ID NO: 4742 - protein, 230 aa, Legionella pneumophila; identical to SEQ ID NO: 4721

SEQ ID NO: 4743 - protein, 288 aa, Legionella pneumophila; identical to SEQ ID NO: 4722

SEQ ID NO: 4744 - protein, 455 aa, Legionella longbeachae D-4968
MSLTVCFFIFFFIKFDKFAVTYGPEILTTMGIVGCFACIAWALLHFNSENITASIPFLLNGIKTAFCSSFIGVSGALLIRGKHKFSKVDSHKKNESAPASMDDLVKEITNLRRTLSGDEEGSLISQIKMFRQDSNDQQKKLQESFDNFAKHMVENNQKAFIEALKEAIRDFNQNLTEQFGENFKHLNQSVEKLIIWQEQYKHELETIKQYQSQFSNDMKQSSDAFATVVEHAKQFTDIAQNLKILLNSMDKQKDVLFAQEKALSELLATMKDHIPEFSSSTQKMITEISEGVKLVQLETTKIISNYSTEIKLINNEMKSALADILKEAQNSFSTGIKDNMEMIQEAIISVESQTADVIKNHSAQLQSTQAEMKNVLVDGITKSQQEITAGLQENAKIIREGVLALDKELEKGLTDSLTSLGKQLASLSEKFVSDYLPLTERLRDIVRLAKNSEAA

SEQ ID NO: 4745 - protein, 230 aa, Legionella longbeachae D-4968
MEGHNQSYWIPLSDLMTGLMMVFMLIAVTFMLRVEQTTTLVVKEFEETKSDLAQALQKEFAKDLSQWNAELLGDMTIRFDNPDVLFDTGSSVVKPAFKRILNDFIPRYISLVSSEKYRNSIKEIRIEGHTSKKWALDTDEKTAYIKNMRLSQERAQSMLEYILSLPSLLEHEKWMRKYLTSSGFSSSKPVFNQLHIADDNRSQRVEFVIVTNADSKLDEISEQIRSMKNG

SEQ ID NO: 4746 - protein, 270 aa, Legionella longbeachae D-4968
MMEAELIKEFKFDTGISLLDEDFIKRLGDDGVEIDSLDEIDFRSDATLGFRGQRVLIYIRDVSAYRHEISLPKFHVSTCKTLVDMWQRKRSERYVLYQRENGIFQINLMRDGNVDVRQEKLNVCRNCLDNLNWNNYSENKLIRNKIVDEFSISQFFEKFPKSLLSVTPSHTADTAPLNDYSTNWTHISKEAKRKAGYKCQNSKCHIDLAGAYSQYLHVHHLDGQKNNNRKHNLKVLCVKCHADEPNHGHMKHGRDYKQFLRIYEQVKQNN

SEQ ID NO: 4747 - protein, 465 aa, Moraxella catarrhalis BBH18
MSTFALLFDAITAPINMAFLLVMLGLFIIGWVAVGRDDGHKPRHFIDSIPTLLTSIGILGTFFGIVLALLAFDDSDIKSHINDIISGMKTAFITSVTGLLLSIILKIWASIHQDKSENLDLDQVDASNILKFIEHHLTEQTNTQKKTAVIHEELLQALTTHHEYVKQNNQQFAANLWDKLEKTAQILTKSATEEVILALNQLIKDFNHQLTEQFGENFKQLNHAVFELIQWQENYKQQLEQMQVQYQNHTNAVAATQQAIDNIHDNLSHIAHHAQSIPDSMERLAVAIELSHTQIDTLYDHLAAFADMKDKAVAALPSLSEQIDTMLQGMDDASQKLTEQFHQIHQSIKAQPSIMQSTTQELKNTLERLVGQLEIDIKNITEKHAGSIKEQMNQLSNIAAQTLEDISDSIEGQINNFNTAEAKKIESDLQQMGSALISMTSQFTKDYKELVNHMNNIIRHGRPMR

SEQ ID NO: 4748 - protein, 228 aa, Moraxella catarrhalis BBH18
MLSSRQSSEESTQWLPISDLMSGLMVLFLFIAISLILQVRQIAEEYQDTQEQIYKALLHEFADDLPKWGAKIDKDTLTISFLSPDILFKTGQSDLQDNYKEILSDFFPRYIKVIDRYKDSINEIRIEGHTSSEWAAGVDADIAYFENMRLSQDRTRTVLQFAYAIPEVSQYRPWIKTHLAAVGLSSAKTIKNESGLENAGASKRVTFRILTNADEQIQKISKSSYEEN

SEQ ID NO: 4749 - protein, 238 aa, Moraxella catarrhalis BBH18
MQIDSLSELATDETGVFAYHGRKVVLFIPDHGYGNSFDQVKNGDLNVGKKVHFTQCKTLDDMANNGRLNRYHINKNQNGLFEIVNNVGDTHTTKLMPCHNCLKILNYNDYLSIKTPAIFRQNFDFLAFFNGDYQTKFTKLPEYVGQNKGGYTEDWSTISRNFKKSKDYLCQVCGVNLSGYQHLADVHHIDGVKQNNSQNNLMCLCKLCHVNQPNHAHMSIGDEIKNQIQQLRWQQRLL

SEQ ID NO: 4750 - protein, 465 aa, Moraxella catarrhalis 7169
MSTFALLFDAITAPINMAFLLVMLGLFIIGWVAVGRDDGHKPRHFIDSIPTLLTSIGILGTFFGIVLALLAFDDSDIKSHINDIISGMKTAFITSVTGLLLSIILKIWASIHQDKSENLDLDQVDASNILKFIEHHLTEQTNTQKKTAVIHEELLQALTTHHEYVKQNNQQFAANLWDKLEKTAQILTKSATEEVILALNQLIKDFNHQLTEQFGENFKQLNHAVFGLIKWQENYKQQLEQMQVQYQNHTNAVAATQQAIDNIHDNLSHIAHHAQSIPDSMERLAVAIELSHTQIDTLYDHLAAFADMKDKAVAALPSLSEQIDTMLQGMDDASQKLTEQFHQIHQSIKAQPSIMQSTTQELKNTLERLVGQLEIDIKNITEKHAGSIKEQMNQLSNIAAQTLEDISDSIEGQINNFNTAEAKKIESDLQQMGSALISMTSQFTKDYKELVNHMNNIIRHGRPMR

SEQ ID NO: 4751 - protein, 204 aa, Moraxella catarrhalis 7169
MVLFLFIAISLILQVRQIAEEYQDTQEQIYKALLHEFADDLPKWGAKIDKDTLTISFLSPDILFKTGQSDLQDNYKEILSDFFPRYIKVIDHYKDSINEIRIEGHTSSEWAAGVDADIAYFENMRLSQDRTRTVLQFAYAIPEVSQYRPWIKTHLAAVGLSSAKTIKNESGLENAGASKRVTFRILTNADEQIQKISKSSYEEN

SEQ ID NO: 4752 - protein, 283 aa, Moraxella catarrhalis 7169
MKKTNVFDELINNTKRMVDHLVEFKLQPRGSLDLQLDTKLATPKGVQIDSLSELATDETGVFAYHGRKVVLFIPDHGYGNSFDQVKNGDLNVGKKVHFTQCKTLDDMANNGRLNRYHINKNQNGLFEIVNNVGDTHTTKLMPCHNCLKILNYNDYLSIKTPAIFRQNFDFLAFFNGDYQTKFTKLPEYVGQNKGGYTEDWSTISRNFKKSKDYLCQVCGVNLSGYQHLADVHHIDGVKQNNSQNNLMCLCKLCHVNQPNHAHMSIGDEIKNQIQQLRWQQRLL

SEQ ID NO: 4753 - protein, 465 aa, Moraxella catarrhalis 103P14B1
MSTFALLFDVITAPINMAFLLVMLGLFIIGWVAVGRDDGHKPRHFIDSIPTLLTSIGILGTFFGIVLALLAFDDSDIKSHINDIISGMKTAFITSVTGLLLSIILKIWASIHQDKSENLDLDQVDASNILKFIEHHLTEQTNTQKKTAVIHEELLQALTTHHEYVKQNNQQFAANLWDKLEKTAQILTKSATEEVILALNQLIKDFNHQLTEQFGENFKQLNHAVFELIQWQENYKQQLEQMQVQYQNHTNAVAATQQAIDNIHDNLSHIAHHAQSIPDSMERLAVAIELSHTQIDTLYDHLAAFADMKDKAVAALPSLSEQIDTMLQGMDDASQKLTEQFHQIHQSIKAQPSIMQSTTQELKNTLERLVGQLEIDIKNITEKHAGSIKEQMNQLSNIAAQTLEDISDSIEGQINNFNTAEAKKIESDLQQMGSALISMTSQFTKDYKELVNHMNNIIRHGRPMR

SEQ ID NO: 4754 - protein, 204 aa, Moraxella catarrhalis 103P14B1
MVLFLFIAISLILQVRQIAEEYQDTQEQIYKALLHEFADDLPKWGAKIDKDTLTISFLSPDILFKTGQSDLQDNYKEILSDFFPRYIKVIDRYKDSINEIRIEGHTSSEWAAGVDADIAYFENMRLSQDRTRTVLQFAYAIPEVSQYRPWIKTHLAAVGLSSAKTIKNESGLENAGASKRVTFRILTNADEQIQKISKSSYEEN

SEQ ID NO: 4755 - protein, 283 aa, Moraxella catarrhalis 103P14B1
MKKTNVFDELINNTKRMVDHLVEFKLQPRGPLDLQLDTKLATPKGVQIDSLSELATDETGVFAYHGRKVVLFIPDHGYGNSFDQVKNGDLNVGKKVHFTQCKTLDDMANNGRLNRYHINKNQNGLFEIVNNVGDTHTTKLMPCHNCLKILNYNDYLSIKTPAIFRQNFDFLAFFNGDYQTKFTKLPEYVGQNKGGYTEDWSTISRNFKKSKDYLCQVCGVNLSGYQHLADVHHIDGVKQNNSQNNLMCLCKLCHVNQPNHAHMSIGDEIKNQIQQLRWQQRLL

SEQ ID NO: 4756 - protein, 465 aa, Moraxella catarrhalis 46P47B1; identical to SEQ ID NO: 4747

SEQ ID NO: 4757 - protein, 204 aa, Moraxella catarrhalis 46P47B1; identical to SEQ ID NO: 4754

SEQ ID NO: 4758 - protein, 238 aa, Moraxella catarrhalis 46P47B1; identical to SEQ ID NO: 4749

SEQ ID NO: 4759 - protein, 342 aa, Moraxella catarrhalis 12P80B1
MDASNILKFIEHHLTEQTNTQKKTAVIHEELLQALTTHHEYVKQNNQQFAANLWDKLEKTAQILTKSATEEVILALNQLIKDFNHQLTEQFGENFKQLNHAVFELIQWQENYKQQLEQMQVQYQNHTNAVAATQQAIDNIHDNLSHIAHHAQSIPDSMERLAVAIELSHTQIDTLYDHLAAFADMKDKAVAALPSLSEQIDTMLQGMDDASQKLTEQFHQIHQSIKAQPSIMQSTTQELKNTLERLVGQLEIDIKNITEKHAGSIKEQMNQLSNIAAQTLEDISDSIEGQINNFNTAEAKKIESDLQQMGSALISMTSQFTKDYKELVNHMNNIIRHGRPMR

SEQ ID NO: 4760 - protein, 204 aa, Moraxella catarrhalis 12P80B1; identical to SEQ ID NO: 4754

SEQ ID NO: 4761 - protein, 283 aa, Moraxella catarrhalis 12P80B1; identical to SEQ ID NO: 4755

SEQ ID NO: 4762 - protein, 465 aa, Moraxella catarrhalis BC1; identical to SEQ ID NO: 4750

SEQ ID NO: 4763 - protein, 204 aa, Moraxella catarrhalis BC1; identical to SEQ ID NO: 4751

SEQ ID NO: 4764 - protein, 283 aa, Moraxella catarrhalis BC1; identical to SEQ ID NO: 4752

SEQ ID NO: 4765 - protein, 465 aa, Moraxella catarrhalis BC7; identical to SEQ ID NO: 4753

SEQ ID NO: 4766 - protein, 204 aa, Moraxella catarrhalis BC7; identical to SEQ ID NO: 4754

SEQ ID NO: 4767 - protein, 283 aa, Moraxella catarrhalis BC7; identical to SEQ ID NO: 4755

SEQ ID NO: 4768 - protein, 378 aa, Moraxella catarrhalis CO72
MKTAFITSVTGLLLSIILKIWASIHQDKSENLDLDQVDASNILKFIEHHLTEQTNTQKKTAVIHEELLQALTTHHEYVKQNNQQFAANLWDKLEETAQILTKSATEEVILALNQLIKDFNHQLTEQFGENFKQLNHAVFELIQWQENYKQQLEQMQVQYQNHTNAVAATQQAIDNIHDNLSHIAHHAQSIPDSMERLAVAIELSHTQIDTLYDHLAAFADMKDKAVAALPSLSEQIDTMLQGMDDASQKLTEQFHQIHQSIKAQPSIMQSTTQELKNTLERLVGQLEIDIKNITEKHAGSIKEQMNQLSNIAAQTLEDISDSIEGQINNFNTAEAKKIESDLQQMGSALISMTSQFTKDYKELVNHMNNIIRHGRPMR

SEQ ID NO: 4769 - protein, 204 aa, Moraxella catarrhalis CO72; identical to SEQ ID NO: 4754

SEQ ID NO: 4770 - protein, 283 aa, Moraxella catarrhalis CO72
MKKTNVFDELINNTKRMVDHLVEFKLQPRGPLDLQLDTKLATPKGVQIDSLSELATDETGVFAYHGRKVVLFIPGHGYGNSFDQVKNGDLNVGKKVHFTQCKTLDDMANNGRLNRYHINKNQNGLFEIVNNVGDTHTTKLMPCHNCLKILNYNDYLSIKTPAIFRQNFDFLAFFNGDYQTKFTKLPEYVGQNKGGYTEDWSTISRNFKKSKDYLCQVCGVNLSGYQHLADVHHIDGVKQNNSQNNLMCLCKLCHVNQPNHAHMSIGDEIKNQIQQLRWQQRLL

SEQ ID NO: 4771 - protein, 465 aa, Moraxella catarrhalis 101P30B1; identical to SEQ ID NO: 4753

SEQ ID NO: 4772 - protein, 204 aa, Moraxella catarrhalis 101P30B1; identical to SEQ ID NO: 4754

SEQ ID NO: 4773 - protein, 283 aa, Moraxella catarrhalis 101P30B1; identical to SEQ ID NO: 4755

SEQ ID NO: 4774 - protein, 465 aa, Moraxella catarrhalis RH4; identical to SEQ ID NO: 4750

SEQ ID NO: 4775 - protein, 214 aa, Moraxella catarrhalis RH4
MPISDLMSGLMVLFLFIAISLILQVRQIAEEYQDTQEQIYKALLHEFADDLPKWGAKIDKDTLTISFLSPDILFKTGQSDLQDNYKEILSDFFPRYIKVIDRYKDSINEIRIEGHTSSEWAAGVDADIAYFENMRLSQDRTRTVLQFAYAIPEVSQYRPWIKTHLAAVGLSSAKTIKNESGLENAGASKRVTFRILTNADEQIQKISKSSYEEN

SEQ ID NO: 4776 - protein, 283 aa, Moraxella catarrhalis RH4; identical to SEQ ID NO: 4755

SEQ ID NO: 4777 - protein, 378 aa, Moraxella catarrhalis
MKTAFITSVTGLLLSIILKIWSSIHQDKSENLDLDQVDASNILKFIEHHLTEQTNTQKKTAVIHEELLQALTTHHEYVKQNNQQFASTLWDELEKTAQILTKSATEEVILALNQLIKDFNYQLTEQFGENFKQLNHTVFGLIKWQENYKQQLEQMQVQYQNHTNAVAATQQAIDNIHDNLSHIAHHAQSIPDSMERLAVAIELSHTQIDTLYDHLAAFADMKDKAVAALPSLSEQIDTMLQGMDDASQKLTEQFHQIHQSIKAQPSIMQSTTQELKNTLERLVGQLEIDIKNITEKHAGSIKEQMNQLSNIAAQTLEDISDSIEGQINNFNTAEAKKIESDLQQMGSALISMTSQFTKDYKELVNHMNNIIRHGRPMR

SEQ ID NO: 4778 - protein, 238 aa, Moraxella catarrhalis
MTIINKMRLSAPSSRQSSEESTQWLPISDLMSGLMVLFLFIAISLILQVRQIAEEYQDTQEQIYKALLHEFADDLPKWGAKIDKDTLTISFLSPDILFKTGQSDLQDNYKEILSDFFPRYIKVIDRYKDSINEIRIEGHTSSEWAAGVDADIAYFENMRLSQDRTRTVLQFAYAIPEVSQYRPWIKTHLAAVGLSSAKTIKNESGLENAGASKRVTFRILTNADEQIQKISKSSYEEN

SEQ ID NO: 4779 - protein, 283 aa, Moraxella catarrhalis
MKKTNVFDELINNTKRMVDHLVEFKLQPRGPLDLQLDTKLATPKGVQIDSLSELATDETGVFAYHGRKVVLFIPDHGYGNSFDQVKNGDLNVGKKVHFTQCKTLDDMANNGRLNRYHINKNQNGLFEIVNNVGDTHTTKLIPCHNCLKILNYNDYLSIKTPAIFRQNFDFLAFFNGDYQTKFTKLPEYVGQNKGGYTEDWSTISRNFKKSKDYLCQVCGVNLSGYQHLADVHHIDGVKQNNSQNNLMCLCKLCHVNQPNHAHMSIGDEIKNQIQQLRWQQRLL

SEQ ID NO: 4780 - protein, 498 aa, Citrobacter freundii
MGALGILGTFIGIIIGLLNFNTESIDTSIPVLLGGLKTAFITSIVGMFFAILFNGLDAFFFANKRRLLEANTPASVTPEHIHQELKEQNKHLVKLISGMSGSEEGSIVAQIKLLRNEISDASRAQISNHSNFSNKLWEQLQQFADLMAKGATEQIIDALRQVIIDFNNNLTEQFGENFKALDTSVKKLVDWQENYKNQVEQMGEQYQQSVESLVETRKAVAGIWEECKEIPLAMAELRDVLQVNQHQIGELSRHLETFVAIRDKATDVLPEIQTKMSEVGELLKLGAANVSASLEQTSQQILINADSMRVALDEGTEGFRQSVTQTQQAFASMAHDVSNSSETLTSTLGDTITEMKQSGDEFLKSLETHSRELHRNMEQNTTNVIDMFSKTGEKFNQQLSSNADNMFGSMQSSFDKASAGLTSQVKESIEKFGSSINEQLHAFEQATEREMNREMQSLGNALLSISKGFVGNYERLLKEYQAVMGQLQTLISANQKRG

SEQ ID NO: 4781 - protein, 235 aa, Citrobacter freundii
MDKILGKQAPKKDQDNEHWVSMSDLMAGLMMVFMFISIAYMHYVRIEKEKIKEVAVAYENAQLQLYNALETEFTKDLPAWDAEIDKQTLEVRFKSPDVLFGLGSTELKPKFKQILDNFFPRYLKVLDNYQEHITEVRIEGHTSTDWTGASNSDMAYFNNMELSQGRTRAVLQYVYGLKESAAHQKWVKSKFAAVGYSSAHPILDKSGKEDPNRSRRVTFKVVTNAELQIRKIIQE

SEQ ID NO: 4782 - protein, 363 aa, Citrobacter freundii
MKLSIDISELIQLGRKMLPEGVDFFLDETPVVFDPIDIELSAGKEVRIEDLDPGSGLISYQGRQVLLYIRDHTGRYDAAIEDGEKGKRFHIAWCRTLDDMRQKNRFERYHATNRVDGLFEIDDGLGRSQDVALKVCMNCLERLNYKGSIDKQQKRVIFKSFSLNEFFSDYSTCFRHMPKGIYDKSNSGYVENWKDISRTTREQANYKCNDCGVNLMSMKSLCDVHHKNGIKYDNSAENLLVLCKDCHRKQPLHEGIFVTQADMAIIQRLRSQQGLLKAESWKDIYDLTDPSIHGDINIMQHKGYPPPVPGLDLQNAEHEIIATVEAAWPVSKIAVNLTPVKVDGWKVFSVGELVKEIQSGVIF

SEQ ID NO: 4783 - protein, 550 aa, Enterobacter cloacae
MLAQLFEHLFQSIDSTLVTNIFIWAVIFVFCAAWWCDHKNIHNKFREYAPTLMGALGILGTFIGIIIGLLNFNTESIDTSIPVLLGGLKTAFITSIVGMFFAILFNGLDAFFFANKRRQLEADIPASVTPEHIHQELKEQNKHLVKLIAGMSGSEEGSIVAQIKLLRNEISDTSRAQISNHSNFSNKLWEQLQQFADLMAKGATEQIIDALRQVIIDFNNDLTEQFGENFKALDTSVKKLVDWQENYKNQVEQMGEQYQQSVESLVETRKAVAGIWEECKEIPLAMAELRDVLQVNQHQIGELSRHLEIFVAIRDKATDVLPEIQTKMSEVGELLKLGAANVSASLEQTSQQILSNADSMRVALDEGTEGFRQSVTQTQQAFASMAHDVSNSSETLTSALGDTITEMKQSGDEFLKSLETHSRELHRNMEQNTTNVIDMFNKTGEKFNQQLSSNADNMFGSMQSSFDKASAGLTSQVKESIEKFGSSINEQLHAFEQATEREMNREMQSLGNALLSISKGFVGNYERLLKEYQAVMGQLQTLISPNQKRG

SEQ ID NO: 4784 - protein, 235 aa, Enterobacter cloacae
MDKILGKQAPKKDQDNEHWVSMSDLMAGLMMVFMFISIAYMHYVRIEKEKIKEVAVAYENAQLQLYNALETEFTKDLPAWDAEIDKQTLEVRFKSPDVLFGLGSTELKPKFKQILDNFFPRYLKVLDNYQEHITEVRIEGHTSTDWTGASNSDMAYFNNMELSQGRTRAVLQYVYGLKDSAAHQKWVKSKFAAVGYSSAHPILDKSGKEDPNRSRRVTFKVVTNAELQIRKIIQE

SEQ ID NO: 4785 - protein, 363 aa, Enterobacter cloacae
MKLSIDISELIQLGRKMLPEGVDFFLDETPVVFDPIDIELSAGKEVRIEDLDPGSGLISYRGRQVLLYIRDHTGRYDAAIEDGEKGKRFHIAWCRTLDDMRQKNRFERYHATNRVDGLFEIDDGLGRSQDVALKVCMNCLERLNYKGSIDKQQKRVIFKSFSLNEFFSDYSTCFRHMPKGIYDKSNSGYVENWKDISRITREQANYKCSDCGVNLMSMKSLCDVHHKNGIKYDNSAENLLVLCKDCHRKQPLHEGIFVTQADMAIIQRLRSQQGLLKAESWKDIYDLTDPSIHGDINIMQHKGYPPPVPGLDLQNAEHEIIATVEAAWPVSKIAVNLTPVKVDGWKVFSVGELVKEIQSGVIF

SEQ ID NO: 4786 - protein, 180 aa, Pantoea ananatis
LNNASAGLALFIDRASNFADTAEALEITLKGLAYQHEQIENSQASLTEVLLQMKGVIPQFSQKIDEMADSMSKGVAKVQNEINEIMKGFGVQVQSTSSEMKQLLTETLRKSQNEFNESLKDSMDSVRQSVITLDKGLQEELTKSLESLGRQLASLSEKFVSDYTPLTERLREVVQIAAVK

SEQ ID NO: 4787 - protein, 226 aa, Pantoea ananatis
MDFEQSNQSYWIPLADLMTGLMMVFMLLTAAFMLRVEQTTTLVVKEYEMTKQDMLLALQKEFSKDLKQWNAEILGDMTIRFNDPSVLFATGSSDLRPRFKQVLSEFFPRYIALLNSKTFKNAVKEIRIEGHTSSFWGVAIDEKQAYFKNMELSQARTRSALEYLMSLPKVKKDEKWLVQHMTANGLSSSHPLSENGAEAANQRVEFRIVTNASEKMDLIAEKLSKK

SEQ ID NO: 4788 - protein, 286 aa, Pantoea ananatis
MSFKLPDFLTWSLLNSLREIMKAPLAEKFTQNSDFVPIDFPLIERLRSVGIDVNFDEVHVEEDGTLNYNNQRVLLYIRDVPTIGDNTNMPKYHLAFCRTLETKNKENRFDRYVVANSDTGDFQVNVLGGGVQSQSVRLNVCQNCLDKIMWKDFNIQGMSKVVRQRLVSEFSLADFFEKYPRDIISIKPAHTSSTAPLNIYSKDWREISKNIRQWRDYKCEGCEVKLAGNKSRYLHVHHRNGLKYDNNISNLEVLCIACHSKKPNHQHIKTLPEYNEYMSFSFIDKD

SEQ ID NO: 4789 - protein, 459 aa, Pectobacterium carotovorum subsp. brasiliense
MLSILPLETWIFIAVILAYFIYSNWNFTEKKAHESPGILITIGILATFLGIALGLASFDMNDVENSLPTLINGIKTAFWASVVGVACALIIKWRYAFRGVRTKNNQPIPTNSTIDDIVHHLQLSTESIGRLHYAIAGNEDASLLTQLKLMRGDQNDKLTNIHNAFTEFSRNQTENNSKALIEALKEVIHDFNEKIGEQFGDNFKQLNEAVGKINEWQQQYSLQIREMIEQQTQTTENMQQATQSFSEIMTQSESFTQVAKDIHQTIGTASSLEKGIEENLKQLAELIESSKTGIPEIEKGIMAIIEDVRNGATASATVIGDSIYTVTQTLESSAADFTSQMIGSSKAMSDAIKNQNQEMQKSVQQTGTELQEQITRLSQDLTKYIQRHNEDVTNNIFELNKKTEQQVQTLDAALAAALKKSLDSLGQQLGALSSKFVQDYDPLTEKLRDVVRLSENLRG

SEQ ID NO: 4790 - protein, 244 aa, Pectobacterium carotovorum subsp. brasiliense
MNNPLLTRQKADKEDFWISLSDLMTSLMMIFLLISVVYMIKVQEMVKIPSVYRNTLQGLGQALQHEFKDDLKRWHATIDEDLTVRFQEPNILFTTSSSELKPEFKSILDEFIPRYLSIMTDKKYINNIEEIRIEGHTSTMWRTGVSENDAYFHNMELSQSRTRTTLSYIMNMPAVSDSKSTLSWFKNHVRAIGFSSAKPIDKEGKTITSPEQVEDSARSQRVEFRVRTNVERQVANIVEKGSKI

SEQ ID NO: 4791 - protein, 291 aa, Pectobacterium carotovorum subsp. brasiliense
MDSFLVSQLPDFLESPIFNKLRKEMKAEIIPPIADIKMDALVLDKILSTTGKDIDILEIEINSDNTINYKDKRVILHIRDVASYGGSMSLPKYHLANCKTLQRMWENNKSGRYVAATRSDGLFTIKSQNTEKTEWITREESLDVCKFCLETLNWKNYSRKYQDRENIFSTFDLKEFFSVYPNSATTYNAEHNDVTAPINDYSKDFQIISKQYRESVNWQCAICKIVLERKDLNKFLHVHHRDGQKNNNNRNNLQALCIECHSNQDNHGHMKNNPQLTSFIQIKGDMAFAAS

SEQ ID NO: 4792 - protein, 459 aa, Pectobacterium carotovorum subsp. brasiliense
MLSILPLETWIFIAVILAYFIYSNWNFTEKKAHESPGILITIGILATFLGIALGLASFDMNDVENSLPTLINGIKTAFWASVVGVACALIIKWRYAFRGVRTKNSQPIPTNSTIDDIVHHLQLSTESIGRLHYAIAGNEDASLLTQLKLMRGDQNDKLTNIHNAFTEFSRNQTENNSKALIEALKEVIHDFNEKIGEQFGDNFKQLNEAVGKINEWQQQYSLQIREMIEQQTQTTENMQQATQSFSEIMTQSESFTQVAKDIHQTIGTASSLEKGIEENLKQLAELIESSKTGIPEIEKGIMAIIEDVRNGATASATVIGDSIYTVTQTLESSAADFTSQMIGSSKAMSDAIKNQNQEMQKSVQQTGTELQEQITRLSQDLTKYIQRHNEDVTNNIFELNKKTEQQVQTLDAALAAALKKSLDSLGQQLGALSSKFVQDYDPLTEKLRDVVRLSENLRG

SEQ ID NO: 4793 - protein, 244 aa, Pectobacterium carotovorum subsp. brasiliense; identical to SEQ ID NO: 4790

SEQ ID NO: 4794 - protein, 291 aa, Pectobacterium carotovorum subsp. brasiliense
MDSFLVSQLPDFLESPIFNKLRKEMKAEIIPPIADIKMDALVLDKILSTTGKDIDILEIEINSDNTINYKDKRVILHIRDVASYGGSMSLPKYHLANCKTLQRMWENNKSGRYVAATRSDGLFTIKSQNTEKTEWITREESLDVCKFCLETLNWKNYSRKYQDRENIFSTFNLKEFFSVYPNSATTYNAEHNDVTAPINDYSKDFQIISKQYRESVNWQCAICKIILERKDLNKFLHVHHRDGQKNNNNRNNLQALCIECHSNQDNHGHMKNNPQLTSFIQIKGDMAFAAS

SEQ ID NO: 4795 - protein, 550 aa, Escherichia coli O157:H7 str. EDL933
MLAQLFEQLFQSIDSTLITNIFIWAVIFVFLSAWWCDKKNIHSKFREYAPTLMGALGILGTFIGIIIGLLNFNTESIDTSIPVLLGGLKTAFITSIVGMFFAILFNGMDAFFFANKRSALAENNPESVTPEHIYHELKEQNQTLTKLVSGINGDSEGSLIAQIKLLRTEISDSSQAQLANHTHFSNKLWEQLEQFADLMAKGATEQIIDALRQVIIDFNQNLTEQFGENFKALDASVKKLVEWQGNYKTQIEQMSEQYQQSVESLVETKTAVAGIWEECKEIPLAMSELREVLQVNQHQISELSRHLETFVAIRDKATTVLPEIQNKMAEVGELLKSGAANVSASLEQTSQQILLNADSMRVALDEGTEGFRQSVTQTQQAFASMAHDVSNSSETLTSTLGETITEMKQSGEEFLKSLESHSKELHRNMEQNTTNVIDMFSKTGEKINHQLSSNADNMFDSIQTSFDKASAGLTSQVRESIEKFALSINEQLHAFEQATEREMNREMQSLGNALLSISKGFVGNYEKLIKDYQIVMGQLQALISANKHRG

SEQ ID NO: 4796 - protein, 235 aa, Escherichia coli O157:H7 str. EDL933
MDKIIGKQLPKKDQDNEHWVSMSDLMAGLMMVFMFISIAYMHYVRIEKEKIKEVAVAYENAQLQLYNALDIEFAKDLQDWDAEIDKQTLEVRFKSPDVLFGLGSTELKPKFKLILDDFFPRYLKVLDNYQEHITEVRIEGHTSTDWTGTTNPDIAYFNNMALSQGRTRAVLQYVYDIKNIATHQQWVKSKFAAVGYSSAHPILDKTGKEDPNRSRRVTFKVVTNAELQIRKIIQE

SEQ ID NO: 4797 - protein, 367 aa, Escherichia coli O157:H7 str. EDL933
MKLSIDISELIQLGKKMLPEGVDFFLDESPIDFDPIDIELSTGKEVSIEDLDPGSGLISYHGRQVLLYIRDHSGRYDAAIVDGEKGKRFHIAWCRTLDEMRHKNRFERYHATNRIDGLFEIDDGSGRSQDVDLRVCMNCLERLNYKGSIDKQRKREIFKSFSLNEFFSDYSTCFRHMPKGIYDKTNSGYVENWKEISKEIREKANYVCNDCGVNLSTAKNLCHVHHKNGIKYDNHHENLLVLCKDCHRKQPLHEGIFVTQAEMAIIQRLRSQQGLLKAESWNEIYDLTDPSVHGDINMMQHKGFQPPVPGLDLPNSEHEIIATVEAAWPGLKIAVNLTPAEVEGWRIYTVGELVKEIQTGAFTPAKL

SEQ ID NO: 4798 - protein, 550 aa, Escherichia coli O157:H7 str. Sakai; identical to SEQ ID NO: 4795

SEQ ID NO: 4799 - protein, 235 aa, Escherichia coli O157:H7 str. Sakai; identical to SEQ ID NO: 4796

SEQ ID NO: 4800 - protein, 367 aa, Escherichia coli O157:H7 str. Sakai; identical to SEQ ID NO: 4797

SEQ ID NO: 4801 - protein, 550 aa, Escherichia coli ATCC 8739
MLAQLFEQLFQSIDSTLITNIFIWAVIFVFLSAWWCDKKNIHSKFREYAPTLMGALGILGTFIGIIIGLLNFNTESIDTSIPVLLGGLKTAFITSIVGMFFAILFNGMDAFFFANKRSALAENNPESVTPEHIYHELKEQNQTLTKLVSGINGDSEGSLIAQIKLLRTEISDSSQAQLANHTHFSNKLWEQLEQFADLMAKGATEQIIDALRQVIIDFNENLTEQFGENFKALDASVKKLVEWQGNYKTQIEQMSEQYQQSVESLVETKTAVAGIWEECKEIPLAMSELREVLQVNQHQISELSRHLETFVAIRDKATTVLPEIQNKMAEVGELLKSGAANVSASLEQTSQQILLNADSMRVALDEGTEGFRQSVTQTQQAFASMAHDVSNSSETLTSTLGETITEMKQSGEEFLKSLESHSKELHRNMEQNTTNVIDMFSKTGEKINHQLSSNADNMFDSIQTSFDKAGAGLTSQVRESIEKFALSINEQLHAFEQATEREMNREMQSLGNALLSISKGFVGNYEKLIKDYQIVMGQLQALISANKHRG

SEQ ID NO: 4802 - protein, 235 aa, Escherichia coli ATCC 8739
MDKIIGKQLPKKDQDNEHWVSMSDLMAGLMMVFMFISIAYMHYVRIEKEKIKEVAVAYENAQLQIYNALDIEFAKDLQDWDAEIDKQTLEVRFKSPDVLFGLGSTELKPKFKLILDDFFPRYLKVLDNYQEHITEVRIEGHTSTDWTGTTNPDIAYFNNMALSQGRTRAVLQYVYDIKNIATHQQWVKSKFAAVGYSSAHPILDKTGKEDPNRSRRVTFKVVTNAELQIRKIIQE

SEQ ID NO: 4803 - protein, 367 aa, Escherichia coli ATCC 8739
MKLSIDISELIQLGKKMLPEGVDFFLDESPIDFDPIDIELSTGKEVSIEDLDPGSGLISYHGRQVLLYIRDHSGRYDAAIVDGEKGKRFHIAWCRTLDEMRHKNRFERYHATNRIDGLFEIDDGSGRSQDVDLRVCMNCLERLNYKGSIDKQRKREIFKSFSLNEFFSDYSTCFRHMPKGIYDKTNSGYVENWKEISKEIREKANYVCNDCGVNLSTAKNLCHVHHKNGIKYDNHHENLLVLCKDCHRKQPLHEGIFVTQAEMAIIQRLRSQQGLLKAESWNEIYDLTDPSVHGDINMMQHKGFQPPVPGLDLQNSEHEIIATVEAAWPGLKIAVNLTPAEVEGWRIYTVGELVKEIQTGAFTPAKL

SEQ ID NO: 4804 - protein, 550 aa, Escherichia coli SMS-3-5
MLAQLFEQLFQSIDSTLITNIFIWAVIFVFLSAWWCDKKNIHSKFREYAPTLMGALGILGTFIGIIIGLLNFNTESIDTSIPVLLGGLKTAFITSIVGMFFAILFNGMDAFFFANKRSALAENNPESVTPEHIYHELKEQNQTLTKLVSGINGDSEGSLIAQIKLLRTEISDSSQAQLANHTHFSNKLWEQLEQFADLMAKGATEQIIDALRQVIIDFNENLTEQFGENFKALDASVKKLVEWQENYKTQVELMSEQYQQSVESLVETKTAVAGIWEECKEIPLAMSELREVLQVNQHQISELSRHLETFVAIRDKATTVLPEIQNKMAEVGELLKSGAANVSASLEQTSQQILLNADSMRVALDEGTEGFRQSVTQTQQAFASMAHDVSNSSETLTSTLGETITEMKQSGEEFLKSLESHSKELHRNMEQNTTNVIDMFSKTGEKINHQLSSNADNMFDSIQTSFDKASAGLTSQVRESIEKFALSINEQLHAFEQATEREMNREMQSLGNALLSISKGFVGNYEKLIKDYQIIMGQLQALISANKHRG

SEQ ID NO: 4805 - protein, 235 aa, Escherichia coli SMS-3-5; identical to SEQ ID NO: 4796

SEQ ID NO: 4806 - protein, 367 aa, Escherichia coli SMS-3-5
MKLSIDISELIQLGKKMLPEGVDFFLDESPIDFDPIDIELSTGKEVSIEDLDPGSGLISYHGRQVLLYIRDHSGRYDAAIIDGEKGKRFHIAWCRTLDEMRHKNRFERYHATNRIDGLFEIDDGSGRSQDVDLRVCMNCLERLNYKGSIDKQRKREIFKSFSLNEFFSDYSTCFRHMPKGIYDKTNSGYVENWKDISKSIREKAKYTCNDCGVNLSTAKNLCHVHHKNGIKYDNHHENLLVLCKDCHRKQPLHEGIFVTQAEMAIIQRLRSQQGLLKAESWNEIYDLTDPSVHGDINMMQHKGFQPPVPGLDLQNSEHEIIATVEAAWPGLKIAVNLTPAEVEGWRIYTVGELVKEIQTGAFTSATL

SEQ ID NO: 4807 - protein, 550 aa, Escherichia coli O157:H7 str. EC4115; identical to SEQ ID NO: 4795

SEQ ID NO: 4808 - protein, 235 aa, Escherichia coli O157:H7 str. EC4115; identical to SEQ ID NO: 4796

SEQ ID NO: 4809 - protein, 367 aa, Escherichia coli O157:H7 str. EC4115; identical to SEQ ID NO: 4797

SEQ ID NO: 4810 - protein, 550 aa, Escherichia coli O157:H7 str. TW14359; identical to SEQ ID NO: 4795

SEQ ID NO: 4811 - protein, 235 aa, Escherichia coli O157:H7 str. TW14359; identical to SEQ ID NO: 4796

SEQ ID NO: 4812 - protein, 367 aa, Escherichia coli O157:H7 str. TW14359; identical to SEQ ID NO: 4797

SEQ ID NO: 4813 - protein, 550 aa, Escherichia coli O55:H7 str. CB9615; identical to SEQ ID NO: 4795

SEQ ID NO: 4814 - protein, 235 aa, Escherichia coli O55:H7 str. CB9615; identical to SEQ ID NO: 4796

SEQ ID NO: 4815 - protein, 367 aa, Escherichia coli O55:H7 str. CB9615; identical to SEQ ID NO: 4803

SEQ ID NO: 4816 - protein, 550 aa, Escherichia coli O157:H7 str. TW14588; identical to SEQ ID NO: 4795

SEQ ID NO: 4817 - protein, 235 aa, Escherichia coli O157:H7 str. TW14588; identical to SEQ ID NO: 4796

SEQ ID NO: 4818 - protein, 367 aa, Escherichia coli O157:H7 str. TW14588; identical to SEQ ID NO: 4797

SEQ ID NO: 4819 - protein, 550 aa, Escherichia coli MS 187-1
MLAQLFEQLFQSIDSTLITNIFIWTVIFVFLSAWWCDKKNIHSKFREYAPTLMGALGILGTFIGIIIGLLNFNTESIDTSIPVLLGGLKTAFITSIVGMFFAILFNGMDAFFFANKRSALAENNPESVTPEHIYHELKEQNQTLTKLVSGINGDSEGSLIAQIKLLRTEISDSSQAQLANHTHFSNKLWEQLEQFADLMAKGATEQIIDALRQVIIDFNQNLTEQFGENFKALDASVKKLVEWQGNYKTQIEQMSEQYQQSVESLVETKTAVAGIWEECKEIPLAMSELREVLQVNQHQISELSRHLETFVAIRDKATTVLPEIQNKMAEVGELLKSGAANVSASLEQTSQQILLNADSMRVALDEGTEGFRQSVTQTQQAFASMAHDVSNSSETLTSTLGETITEMKQSGEEFLKSLESHSKELHRNMEQNTTNVIDMFSKTGEKINHQLSSNADNMFDSIQTSFDKASAGLTSQVRESIEKFALSINEQLHAFEQATEREMNREMQSLGNALLSISKGFVGNYEKLIKDYQIVMGQLQALISANKHRG

SEQ ID NO: 4820 - protein, 235 aa, Escherichia coli MS 187-1
MDKIIGKQLPKKDQDNEHWVSMSDLMAGLMMVFMFISIAYMHYVRIEKEKIKEVAVAYENAQLQLYNALDIEFAKDLKDWDAEIDKQTLEVRFKSPDVLFGLGSTELKPKFKLILDDFFPRYLKVLDNYQEHITEVRIEGHTSTDWTGTTNPDIAYFNNMALSQGRTRAVLQYVYDIKNIATHQQWVKSKFAAVGYSSAHPILDKTGKEDPNRSRRVTFKVVTNAELQIRKIIQE

SEQ ID NO: 4821 - protein, 367 aa, Escherichia coli MS 187-1
MKLSIDLSELIQLGKKMLPEGVDFFLDESPIDFDPIDIELSTGKEVSIEDLDPGSGLISYHGRQVLLYIRDHSGRYDAAIVDGEKGKRFHIAWCRTLDEMRHKNRFERYHATNRIDGLFEIDDGSGRSQDVDLRVCMNCLERLNYKGSIDKQRKREIFKSFSLNEFFSDYSTCFRHMPKGIYDKTNSGYVENWKEISKEIREKANYVCNDCGVNLSTAKNLCHVHHKNGIKYDNHHENLLVLCKDCHRKQPLHEGIFVTQAEMAIIQRLRSQQGLLKAESWNEIYDLTDPSVHGDINMMQHKGFQPPVPGLDLQNSEHEIIATVEAAWPGLKIAVNLTPAEVEGWRIYTVGELVKEIQTGAFTPATL

SEQ ID NO: 4822 - protein, 550 aa, Escherichia coli O157:H7 str. EC4196; identical to SEQ ID NO: 4795

SEQ ID NO: 4823 - protein, 235 aa, Escherichia coli O157:H7 str. EC4196; identical to SEQ ID NO: 4796

SEQ ID NO: 4824 - protein, 367 aa, Escherichia coli O157:H7 str. EC4196; identical to SEQ ID NO: 4797

SEQ ID NO: 4825 - protein, 550 aa, Escherichia coli O157:H7 str. EC4113; identical to SEQ ID NO: 4795

SEQ ID NO: 4826 - protein, 235 aa, Escherichia coli O157:H7 str. EC4113; identical to SEQ ID NO: 4796

SEQ ID NO: 4827 - protein, 367 aa, Escherichia coli O157:H7 str. EC4113; identical to SEQ ID NO: 4797

SEQ ID NO: 4828 - protein, 550 aa, Escherichia coli O157:H7 str. EC4076; identical to SEQ ID NO: 4795

SEQ ID NO: 4829 - protein, 235 aa, Escherichia coli O157:H7 str. EC4076; identical to SEQ ID NO: 4796

SEQ ID NO: 4830 - protein, 367 aa, Escherichia coli O157:H7 str. EC4076; identical to SEQ ID NO: 4797

SEQ ID NO: 4831 - protein, 550 aa, Escherichia coli O157:H7 str. EC4401; identical to SEQ ID NO: 4795

SEQ ID NO: 4832 - protein, 235 aa, Escherichia coli O157:H7 str. EC4401; identical to SEQ ID NO: 4796

SEQ ID NO: 4833 - protein, 367 aa, Escherichia coli O157:H7 str. EC4401; identical to SEQ ID NO: 4797

SEQ ID NO: 4834 - protein, 550 aa, Escherichia coli O157:H7 str. EC4486; identical to SEQ ID NO: 4795

SEQ ID NO: 4835 - protein, 235 aa, Escherichia coli O157:H7 str. EC4486; identical to SEQ ID NO: 4796

SEQ ID NO: 4836 - protein, 367 aa, Escherichia coli O157:H7 str. EC4486; identical to SEQ ID NO: 4797

SEQ ID NO: 4837 - protein, 550 aa, Escherichia coli O157:H7 str. EC4501; identical to SEQ ID NO: 4795

SEQ ID NO: 4838 - protein, 235 aa, Escherichia coli O157:H7 str. EC4501; identical to SEQ ID NO: 4796

SEQ ID NO: 4839 - protein, 367 aa, Escherichia coli O157:H7 str. EC4501; identical to SEQ ID NO: 4797

SEQ ID NO: 4840 - protein, 550 aa, Escherichia coli O157:H7 str. EC869; identical to SEQ ID NO: 4795

SEQ ID NO: 4841 - protein, 235 aa, Escherichia coli O157:H7 str. EC869; identical to SEQ ID NO: 4796

SEQ ID NO: 4842 - protein, 367 aa, Escherichia coli O157:H7 str. EC869; identical to SEQ ID NO: 4797

SEQ ID NO: 4843 - protein, 550 aa, Escherichia coli O157:H7 str. EC508; identical to SEQ ID NO: 4795

SEQ ID NO: 4844 - protein, 235 aa, Escherichia coli O157:H7 str. EC508; identical to SEQ ID NO: 4796

SEQ ID NO: 4845 - protein, 367 aa, Escherichia coli O157:H7 str. EC508
MKLSIDISELIQLGKKMLPEGVDFFLDESPIDFDPIDIELSTGKEVSIEDLDPGSGLISYHGRQVLLYIRDHSGRYDAAIVDGEKGKRFHIAWCRTLDEMRHKNRFERYHATNRIDGLFEINDGSGRSQDVDLRVCMNCLERLNYKGSIDKQRKREIFKSFSLNEFFSDYSTCFRHMPKGIYDKTNSGYVENWKEISKEIREKANYVCNDCGVNLSTAKNLCHVHHKNGIKYDNHHENLLVLCKDCHRKQPLHEGIFVTQAEMAIIQRLRSQQGLLKAESWNEIYDLTDPSVHGDINMMQHKGFQPPVPGLDLPNSEHEIIATVEAAWPGLKIAVNLTPAEVEGWRIYTVGELVKEIQTGAFTPAKL

SEQ ID NO: 4846 - protein, 550 aa, Escherichia coli TA143
MLAQLFEQLFQSIDSTLITNIFIWAVIFVFLSAWWCDKKNIHSKFREYAPTLMGALGILGTFIGIIIGLLNFNTESIDTSIPVLLGGLKTAFITSIVGMFFAILFNGMDAFFFANKRSALAENNPESVTPEHIYHELKEQNQTLTKLVSGINGDSEGSLIAQIKLLRTEISDSSQAQLANHTHFSNKLWEQLEQFADLMAKGATEQIIDALRQVIIDFNENLTEQFGENFKALDASVKKLVEWQENYKTQVELMSEQYQQSVESLVETKTAVAGIWEECKEIPLAMSELREVLQVNQHQISELSRHLETFVAIRDKATTVLPEIQNKMAEVGELLKSGAANVSASLEQTSQQILLNADSMRVALDEGTEGFRQSVTQTQQAFASMAHDVSNSSETLTSTLGETITEMKQSGEEFLKSLESHSKELHRNMEQNTTNVIDMFSKTGEKINHQLSSNADNMFDSIQTSFDKASAGLTSQVRESIEKFALSINEQLHAFEQATEREMNREMQSLGNALLSISKGFVGNYEKLIKDYQIVMGQLQALISANKHRG

SEQ ID NO: 4847 - protein, 159 aa, Escherichia coli TA143
MQDWDAEIDKQTLEVRFKSPDVLFGLGSTELKPKFKLILDDFFPRYLKVLDNYQEHITEVRIEGHTSTDWTGTTNPDIAYFNNMALSQGRTRAVLQYVYDIKNIATHQQWVKSKFAAVGYSSAHPILDKTGKEDPNRSRRVTFKVVTNAELQIRKIIQE

SEQ ID NO: 4848 - protein, 367 aa, Escherichia coli TA143
MKLSIDISELIQLGKKMLPEGVDFFLDESPIDFDPIDIELSTGKEVSIEDLDPGSGLISYHGRQVLLYIRDHSGRYDAAIVDGEKGKRFHIAWCRTLDEMRHKNRFERYHATNRIDGLFEIDDGSGRSQDVDLRVCMNCLERLNYKGSIDKQRKREIFKSFSLNEFFSDYSTCFRHMPKGIYDKTNSGYVENWKDISKSIREKAKYTCNDCGVNLSTAKNLCHVHHKNGIKYDNHHENLLVLCKDCHRKQPLHEGIFVTQAEMAIIQRLRSQQGLLKAESWNEIYDLTDPSVHGDINMMQHKGFQPPVPGLDLQNSEHEIIATVEAAWPGLKIAVNLTPAEVEGWRIYTVGELVKEIQTGAFTSATL

SEQ ID NO: 4849 - protein, 550 aa, Escherichia coli O157:H7 str. EC4206; identical to SEQ ID NO: 4795

SEQ ID NO: 4850 - protein, 235 aa, Escherichia coli O157:H7 str. EC4206; identical to SEQ ID NO: 4796

SEQ ID NO: 4851 - protein, 367 aa, Escherichia coli O157:H7 str. EC4206; identical to SEQ ID NO: 4797

SEQ ID NO: 4852 - protein, 550 aa, Escherichia coli O157:H7 str. EC4045; identical to SEQ ID NO: 4795

SEQ ID NO: 4853 - protein, 235 aa, Escherichia coli O157:H7 str. EC4045; identical to SEQ ID NO: 4796

SEQ ID NO: 4854 - protein, 367 aa, Escherichia coli O157:H7 str. EC4045; identical to SEQ ID NO: 4797

SEQ ID NO: 4855 - protein, 550 aa, Escherichia coli O157:H7 str. EC4042; identical to SEQ ID NO: 4795

SEQ ID NO: 4856 - protein, 235 aa, Escherichia coli O157:H7 str. EC4042; identical to SEQ ID NO: 4796

SEQ ID NO: 4857 - protein, 367 aa, Escherichia coli O157:H7 str. EC4042; identical to SEQ ID NO: 4797

SEQ ID NO: 4858 - protein, 550 aa, Escherichia coli O157:H7 str. G5101; identical to SEQ ID NO: 4795

SEQ ID NO: 4859 - protein, 235 aa, Escherichia coli O157:H7 str. G5101; identical to SEQ ID NO: 4796

SEQ ID NO: 4860 - protein, 367 aa, Escherichia coli O157:H7 str. G5101; identical to SEQ ID NO: 4803

SEQ ID NO: 4861 - protein, 550 aa, Escherichia coli O157:H- str. 493-89; identical to SEQ ID NO: 4795

SEQ ID NO: 4862 - protein, 235 aa, Escherichia coli O157:H- str. 493-89; identical to SEQ ID NO: 4796

SEQ ID NO: 4863 - protein, 367 aa, Escherichia coli O157:H- str. 493-89; identical to SEQ ID NO: 4803

SEQ ID NO: 4864 - protein, 550 aa, Escherichia coli O157:H- str. H 2687; identical to SEQ ID NO: 4795

SEQ ID NO: 4865 - protein, 235 aa, Escherichia coli O157:H- str. H 2687; identical to SEQ ID NO: 4796

SEQ ID NO: 4866 - protein, 367 aa, Escherichia coli O157:H- str. H 2687; identical to SEQ ID NO: 4803

SEQ ID NO: 4867 - protein, 498 aa, Escherichia coli O55:H7 str. USDA 5905
MGALGILGTFIGIIIGLLNFNTESIDTSIPVLLGGLKTAFITSIVGMFFAILFNGMDAFFFANKRSALAENNPESVTPEHIYHELKEQNQTLTKLVSGINGDSEGSLIAQIKLLRTEISDSSQAQLANHTHFSNKLWEQLEQFADLMAKGATEQIIDALRQVIIDFNQNLTEQFGENFKALDASVKKLVEWQGNYKTQIEQMSEQYQQSVESLVETKTAVAGIWEECKEIPLAMSELREVLQVNQHQISELSRHLETFVAIRDKATTVLPEIQNKMAEVGELLKSGAANVSASLEQTSQQILLNADSMRVALDEGTEGFRQSVTQTQQAFASMAHDVSNSSETLTSTLGETITEMKQSGEEFLKSLESHSKELHRNMEQNTTNVIDMFSKTGEKINHQLSSNADNMFDSIQTSFDKASAGLTSQVRESIEKFALSINEQLHAFEQATEREMNREMQSLGNALLSISKGFVGNYEKLIKDYQIVMGQLQALISANKHRG

SEQ ID NO: 4868 - protein, 235 aa, Escherichia coli O55:H7 str. USDA 5905; identical to SEQ ID NO: 4796

SEQ ID NO: 4869 - protein, 367 aa, Escherichia coli O55:H7 str. USDA 5905; identical to SEQ ID NO: 4803

SEQ ID NO: 4870 - protein, 498 aa, Escherichia coli O157:H7 str. LSU-61; identical to SEQ ID NO: 4867

SEQ ID NO: 4871 - protein, 235 aa, Escherichia coli O157:H7 str. LSU-61; identical to SEQ ID NO: 4796

SEQ ID NO: 4872 - protein, 367 aa, Escherichia coli O157:H7 str. LSU-61; identical to SEQ ID NO: 4803

SEQ ID NO: 4873 - protein, 550 aa, Escherichia coli O157:H7 str. 1044; identical to SEQ ID NO: 4795

SEQ ID NO: 4874 - protein, 206 aa, Escherichia coli O157:H7 str. 1044
MMVFMFISIAYMHYVRIEKEKIKEVAVAYENAQLQLYNALDIEFAKDLQDWDAEIDKQTLEVRFKSPDVLFGLGSTELKPKFKLILDDFFPRYLKVLDNYQEHITEVRIEGHTSTDWTGTTNPDIAYFNNMALSQGRTRAVLQYVYDIKNIATHQQWVKSKFAAVGYSSAHPILDKTGKEDPNRSRRVTFKVVTNAELQIRKIIQE

SEQ ID NO: 4875 - protein, 367 aa, Escherichia coli O157:H7 str. 1044; identical to SEQ ID NO: 4797

SEQ ID NO: 4876 - protein, 550 aa, Escherichia coli O157:H7 str. 1125; identical to SEQ ID NO: 4795

SEQ ID NO: 4877 - protein, 206 aa, Escherichia coli O157:H7 str. 1125; identical to SEQ ID NO: 4874

SEQ ID NO: 4878 - protein, 367 aa, Escherichia coli O157:H7 str. 1125; identical to SEQ ID NO: 4797

SEQ ID NO: 4879 - protein, 550 aa, Escherichia coli O157:H7 str. EC1212; identical to SEQ ID NO: 4795

SEQ ID NO: 4880 - protein, 206 aa, Escherichia coli O157:H7 str. EC1212; identical to SEQ ID NO: 4874

SEQ ID NO: 4881 - protein, 367 aa, Escherichia coli O157:H7 str. EC1212; identical to SEQ ID NO: 4797

SEQ ID NO: 4882 - protein, 550 aa, Escherichia coli O55:H7 str. RM12579; identical to SEQ ID NO: 4795

SEQ ID NO: 4883 - protein, 235 aa, Escherichia coli O55:H7 str. RM12579; identical to SEQ ID NO: 4796

SEQ ID NO: 4884 - protein, 367 aa, Escherichia coli O55:H7 str. RM12579; identical to SEQ ID NO: 4803

SEQ ID NO: 4885 - protein, 550 aa, Escherichia coli DEC4A; identical to SEQ ID NO: 4795

SEQ ID NO: 4886 - protein, 210 aa, Escherichia coli DEC4A
MAGLMMVFMFISIAYMHYVRIEKEKIKEVAVAYENAQLQLYNALDIEFAKDLQDWDAEIDKQTLEVRFKSPDVLFGLGSTELKPKFKLILDDFFPRYLKVLDNYQEHITEVRIEGHTSTDWTGTTNPDIAYFNNMALSQGRTRAVLQYVYDIKNIATHQQWVKSKFAAVGYSSAHPILDKTGKEDPNRSRRVTFKVVTNAELQIRKIIQE

SEQ ID NO: 4887 - protein, 367 aa, Escherichia coli DEC4A; identical to SEQ ID NO: 4797

SEQ ID NO: 4888 - protein, 498 aa, Escherichia coli DEC4B; identical to SEQ ID NO: 4867

SEQ ID NO: 4889 - protein, 76 aa, Escherichia coli DEC4B
MALSQGRTRAVLQYVYDIKNIATHQQWVKSKFAAVGYSSAHPILDKTGKEDPNRSRRVTFKVVTNAELQIRKIIQE

SEQ ID NO: 4890 - protein, 367 aa, Escherichia coli DEC4B; identical to SEQ ID NO: 4797

SEQ ID NO: 4891 - protein, 498 aa, Escherichia coli DEC5A; identical to SEQ ID NO: 4867

SEQ ID NO: 4892 - protein, 210 aa, Escherichia coli DEC5A; identical to SEQ ID NO: 4886

SEQ ID NO: 4893 - protein, 367 aa, Escherichia coli DEC5A; identical to SEQ ID NO: 4803

SEQ ID NO: 4894 - protein, 550 aa, Escherichia coli DEC5C; identical to SEQ ID NO: 4795

SEQ ID NO: 4895 - protein, 206 aa, Escherichia coli DEC5C; identical to SEQ ID NO: 4874

SEQ ID NO: 4896 - protein, 367 aa, Escherichia coli DEC5C; identical to SEQ ID NO: 4803

SEQ ID NO: 4897 - protein, 498 aa, Escherichia coli DEC5D; identical to SEQ ID NO: 4867

SEQ ID NO: 4898 - protein, 210 aa, Escherichia coli DEC5D; identical to SEQ ID NO: 4886

SEQ ID NO: 4899 - protein, 367 aa, Escherichia coli DEC5D; identical to SEQ ID NO: 4803

SEQ ID NO: 4900 - protein, 550 aa, Escherichia coli M919
MLAQLFEQLFQSIDSTLITNIFIWAVIFVFLSAWWCDKKNIHSKFREYAPTLMGALGILGTFIGIIIGLLNFNTESIDTSIPVLLGGLKTAFITSIVGMFFAILFNGMDAFFFANKRSALAENNLESVTPEHIYHELKEQNQTLTKLVSGINGDSEGSLIAQIKLLRTEISDSSQAQLANHTHFSNKLWEQLEQFADLMAKGATEQIIDALRQVIIDFNQNLTEQFGENFKALDASVKKLVEWQGNYKTQIEQMSEQYQQSVESLVETKTAVAGIWEECKEIPLAMSELREVLQVNQHQISELSRHLETFVAIRDKATTVLPEIQNKMAEVGELLKSGAANVSASLEQTSQQILLNADSMRVALDEGTEGFRQSVTQTQQAFASMAHDVSNSSETLTSTLGETITEMKQSGEEFLKSLESHSKELHRNMEQNTTNVIDMFSKTGEKINHQLSSNADNMFDSIQTSFDKASAGLTSQVRESIEKFALSINEQLHAFEQATEREMNREMQSLGNALLSISKGFVGNYEKLIKDYQIVMGQLQALISANKHRG

SEQ ID NO: 4901 - protein, 235 aa, Escherichia coli M919; identical to SEQ ID NO: 4796

SEQ ID NO: 4902 - protein, 367 aa, Escherichia coli M919; identical to SEQ ID NO: 4821

SEQ ID NO: 4903 - protein, 550 aa, Escherichia coli Xuzhou21; identical to SEQ ID NO: 4795

SEQ ID NO: 4904 - protein, 235 aa, Escherichia coli Xuzhou21; identical to SEQ ID NO: 4796

SEQ ID NO: 4905 - protein, 367 aa, Escherichia coli Xuzhou21; identical to SEQ ID NO: 4797

SEQ ID NO: 4906 - protein, 550 aa, Escherichia coli FDA505; identical to SEQ ID NO: 4795

SEQ ID NO: 4907 - protein, 210 aa, Escherichia coli FDA505; identical to SEQ ID NO: 4886

SEQ ID NO: 4908 - protein, 367 aa, Escherichia coli FDA505; identical to SEQ ID NO: 4797

SEQ ID NO: 4909 - protein, 550 aa, Escherichia coli EC1738; identical to SEQ ID NO: 4795

SEQ ID NO: 4910 - protein, 206 aa, Escherichia coli EC1738; identical to SEQ ID NO: 4874

SEQ ID NO: 4911 - protein, 367 aa, Escherichia coli EC1738; identical to SEQ ID NO: 4797

SEQ ID NO: 4912 - protein, 550 aa, Escherichia coli EC1734; identical to SEQ ID NO: 4795

SEQ ID NO: 4913 - protein, 202 aa, Escherichia coli EC1734
MFISIAYMHYVRIEKEKIKEVAVAYENAQLQLYNALDIEFAKDLQDWDAEIDKQTLEVRFKSPDVLFGLGSTELKPKFKLILDDFFPRYLKVLDNYQEHITEVRIEGHTSTDWTGTTNPDIAYFNNMALSQGRTRAVLQYVYDIKNIATHQQWVKSKFAAVGYSSAHPILDKTGKEDPNRSRRVTFKVVTNAELQIRKIIQE

SEQ ID NO: 4914 - protein, 367 aa, Escherichia coli EC1734; identical to SEQ ID NO: 4797

SEQ ID NO: 4915 - protein, 550 aa, Escherichia coli TW09109; identical to SEQ ID NO: 4795

SEQ ID NO: 4916 - protein, 210 aa, Escherichia coli TW09109; identical to SEQ ID NO: 4886

SEQ ID NO: 4917 - protein, 351 aa, Escherichia coli TW09109
MLPEGVDFFLDESPIDFDPIDIELSTGKEVSIEDLDPGSGLISYHGRQVLLYIRDHSGRYDAAIVDGEKGKRFHIAWCRTLDEMRHKNRFERYHATNRIDGLFEIDDGSGRSQDVDLRVCMNCLERLNYKGSIDKQRKREIFKSFSLNEFFSDYSTCFRHMPKGIYDKTNSGYVENWKEISKEIREKANYVCNDCGVNLSTAKNLCHVHHKNGIKYDNHHENLLVLCKDCHRKQPLHEGIFVTQAEMAIIQRLRSQQGLLKAESWNEIYDLTDPSVHGDINMMQHKGFQPPVPGLDLPNSEHEIIATVEAAWPGLKIAVNLTPAEVEGWRIYTVGELVKEIQTGAFTPAKL

SEQ ID NO: 4918 - protein, 550 aa, Escherichia coli PA22; identical to SEQ ID NO: 4795

SEQ ID NO: 4919 - protein, 202 aa, Escherichia coli PA22; identical to SEQ ID NO: 4913

SEQ ID NO: 4920 - protein, 367 aa, Escherichia coli PA22; identical to SEQ ID NO: 4797

SEQ ID NO: 4921 - protein, 550 aa, Escherichia coli PA40; identical to SEQ ID NO: 4795

SEQ ID NO: 4922 - protein, 210 aa, Escherichia coli PA40; identical to SEQ ID NO: 4886

SEQ ID NO: 4923 - protein, 367 aa, Escherichia coli PA40; identical to SEQ ID NO: 4797

SEQ ID NO: 4924 - protein, 550 aa, Escherichia coli TW06591; identical to SEQ ID NO: 4795

SEQ ID NO: 4925 - protein, 210 aa, Escherichia coli TW06591; identical to SEQ ID NO: 4886

SEQ ID NO: 4926 - protein, 367 aa, Escherichia coli TW06591; identical to SEQ ID NO: 4803

SEQ ID NO: 4927 - protein, 550 aa, Escherichia coli TW10246; identical to SEQ ID NO: 4795

SEQ ID NO: 4928 - protein, 210 aa, Escherichia coli TW10246; identical to SEQ ID NO: 4886

SEQ ID NO: 4929 - protein, 367 aa, Escherichia coli TW10246; identical to SEQ ID NO: 4797

SEQ ID NO: 4930 - protein, 550 aa, Escherichia coli TW11039; identical to SEQ ID NO: 4795

SEQ ID NO: 4931 - protein, 210 aa, Escherichia coli TW11039; identical to SEQ ID NO: 4886

SEQ ID NO: 4932 - protein, 367 aa, Escherichia coli TW11039; identical to SEQ ID NO: 4797

SEQ ID NO: 4933 - protein, 550 aa, Escherichia coli TW10119; identical to SEQ ID NO: 4795

SEQ ID NO: 4934 - protein, 206 aa, Escherichia coli TW10119; identical to SEQ ID NO: 4874

SEQ ID NO: 4935 - protein, 367 aa, Escherichia coli TW10119; identical to SEQ ID NO: 4797

SEQ ID NO: 4936 - protein, 550 aa, Escherichia coli EC1863; identical to SEQ ID NO: 4795

SEQ ID NO: 4937 - protein, 210 aa, Escherichia coli EC1863; identical to SEQ ID NO: 4886

SEQ ID NO: 4938 - protein, 367 aa, Escherichia coli EC1863; identical to SEQ ID NO: 4797

SEQ ID NO: 4939 - protein, 550 aa, Escherichia coli EC1845; identical to SEQ ID NO: 4795

SEQ ID NO: 4940 - protein, 210 aa, Escherichia coli EC1845; identical to SEQ ID NO: 4886

SEQ ID NO: 4941 - protein, 367 aa, Escherichia coli EC1845; identical to SEQ ID NO: 4797

SEQ ID NO: 4942 - protein, 550 aa, Escherichia coli EC4448; identical to SEQ ID NO: 4795

SEQ ID NO: 4943 - protein, 206 aa, Escherichia coli EC4448; identical to SEQ ID NO: 4874

SEQ ID NO: 4944 - protein, 367 aa, Escherichia coli EC4448; identical to SEQ ID NO: 4797

SEQ ID NO: 4945 - protein, 550 aa, Escherichia coli EC4437; identical to SEQ ID NO: 4795

SEQ ID NO: 4946 - protein, 205 aa, Escherichia coli EC4437
MVFMFISIAYMHYVRIEKEKIKEVAVAYENAQLQLYNALDIEFAKDLQDWDAEIDKQTLEVRFKSPDVLFGLGSTELKPKFKLILDDFFPRYLKVLDNYQEHITEVRIEGHTSTDWTGTTNPDIAYFNNMALSQGRTRAVLQYVYDIKNIATHQQWVKSKFAAVGYSSAHPILDKTGKEDPNRSRRVTFKVVTNAELQIRKIIQE

SEQ ID NO: 4947 - protein, 367 aa, Escherichia coli EC4437; identical to SEQ ID NO: 4797

SEQ ID NO: 4948 - protein, 550 aa, Escherichia coli EC4436; identical to SEQ ID NO: 4795

SEQ ID NO: 4949 - protein, 235 aa, Escherichia coli EC4436; identical to SEQ ID NO: 4796

SEQ ID NO: 4950 - protein, 367 aa, Escherichia coli EC4436; identical to SEQ ID NO: 4797

SEQ ID NO: 4951 - protein, 550 aa, Escherichia coli EC4439; identical to SEQ ID NO: 4795

SEQ ID NO: 4952 - protein, 210 aa, Escherichia coli EC4439; identical to SEQ ID NO: 4886

SEQ ID NO: 4953 - protein, 367 aa, Escherichia coli EC4439; identical to SEQ ID NO: 4797

SEQ ID NO: 4954 - protein, 452 aa, Escherichia coli EC4402
MFFAILFNGMDAFFFANKRSALAENNPESVTPEHIYHELKEQNQTLTKLVSGINGDSEGSLIAQIKLLRTEISDSSQAQLANHTHFSNKLWEQLEQFADLMAKGATEQIIDALRQVIIDFNQNLTEQFGENFKALDASVKKLVEWQGNYKTQIEQMSEQYQQSVESLVETKTAVAGIWEECKEIPLAMSELREVLQVNQHQISELSRHLETFVAIRDKATTVLPEIQNKMAEVGELLKSGAANVSASLEQTSQQILLNADSMRVALDEGTEGFRQSVTQTQQAFASMAHDVSNSSETLTSTLGETITEMKQSGEEFLKSLESHSKELHRNMEQNTTNVIDMFSKTGEKINHQLSSNADNMFDSIQTSFDKASAGLTSQVRESIEKFALSINEQLHAFEQATEREMNREMQSLGNALLSISKGFVGNYEKLIKDYQIVMGQLQALISANKHRG

SEQ ID NO: 4955 - protein, 210 aa, Escherichia coli EC4402; identical to SEQ ID NO: 4886

SEQ ID NO: 4956 - protein, 367 aa, Escherichia coli EC4402; identical to SEQ ID NO: 4797

SEQ ID NO: 4957 - protein, 550 aa, Escherichia coli EC4013; identical to SEQ ID NO: 4795

SEQ ID NO: 4958 - protein, 210 aa, Escherichia coli EC4013; identical to SEQ ID NO: 4886

SEQ ID NO: 4959 - protein, 367 aa, Escherichia coli EC4013; identical to SEQ ID NO: 4797

SEQ ID NO: 4960 - protein, 550 aa, Escherichia coli EC4422; identical to SEQ ID NO: 4795

SEQ ID NO: 4961 - protein, 210 aa, Escherichia coli EC4422; identical to SEQ ID NO: 4886

SEQ ID NO: 4962 - protein, 367 aa, Escherichia coli EC4422; identical to SEQ ID NO: 4797

SEQ ID NO: 4963 - protein, 550 aa, Escherichia coli EC4421; identical to SEQ ID NO: 4795

SEQ ID NO: 4964 - protein, 210 aa, Escherichia coli EC4421; identical to SEQ ID NO: 4886

SEQ ID NO: 4965 - protein, 367 aa, Escherichia coli EC4421; identical to SEQ ID NO: 4797

SEQ ID NO: 4966 - protein, 550 aa, Escherichia coli TW14301; identical to SEQ ID NO: 4795

SEQ ID NO: 4967 - protein, 210 aa, Escherichia coli TW14301; identical to SEQ ID NO: 4886

SEQ ID NO: 4968 - protein, 367 aa, Escherichia coli TW14301; identical to SEQ ID NO: 4797

SEQ ID NO: 4969 - protein, 452 aa, Escherichia coli TW14313; identical to SEQ ID NO: 4954

SEQ ID NO: 4970 - protein, 210 aa, Escherichia coli TW14313; identical to SEQ ID NO: 4886

SEQ ID NO: 4971 - protein, 367 aa, Escherichia coli TW14313; identical to SEQ ID NO: 4797

SEQ ID NO: 4972 - protein, 550 aa, Escherichia coli EC4196; identical to SEQ ID NO: 4795

SEQ ID NO: 4973 - protein, 210 aa, Escherichia coli EC4196; identical to SEQ ID NO: 4886

SEQ ID NO: 4974 - protein, 367 aa, Escherichia coli EC4196; identical to SEQ ID NO: 4797

SEQ ID NO: 4975 - protein, 550 aa, Escherichia coli EC4203; identical to SEQ ID NO: 4795

SEQ ID NO: 4976 - protein, 202 aa, Escherichia coli EC4203; identical to SEQ ID NO: 4913

SEQ ID NO: 4977 - protein, 367 aa, Escherichia coli EC4203; identical to SEQ ID NO: 4797

SEQ ID NO: 4978 - protein, 550 aa, Escherichia coli FDA517; identical to SEQ ID NO: 4795

SEQ ID NO: 4979 - protein, 210 aa, Escherichia coli FDA517; identical to SEQ ID NO: 4886

SEQ ID NO: 4980 - protein, 367 aa, Escherichia coli FDA517; identical to SEQ ID NO: 4797

SEQ ID NO: 4981 - protein, 550 aa, Escherichia coli FRIK1996; identical to SEQ ID NO: 4795

SEQ ID NO: 4982 - protein, 210 aa, Escherichia coli FRIK1996; identical to SEQ ID NO: 4886

SEQ ID NO: 4983 - protein, 367 aa, Escherichia coli FRIK1996; identical to SEQ ID NO: 4797

SEQ ID NO: 4984 - protein, 550 aa, Escherichia coli FRIK1985; identical to SEQ ID NO: 4795

SEQ ID NO: 4985 - protein, 210 aa, Escherichia coli FRIK1985; identical to SEQ ID NO: 4886

SEQ ID NO: 4986 - protein, 367 aa, Escherichia coli FRIK1985; identical to SEQ ID NO: 4797

SEQ ID NO: 4987 - protein, 191 aa, Escherichia coli TW09195
MRVALDEGTEGFRQSVTQTQQAFASMAHDVSNSSETLTSTLGETITEMKQSGEEFLKSLESHSKELHRNMEQNTTNVIDMFSKTGEKINHQLSSNADNMFDSIQTSFDKASAGLTSQVRESIEKFALSINEQLHAFEQATEREMNREMQSLGNALLSISKGFVGNYEKLIKDYQIVMGQLQALISANKHRG

SEQ ID NO: 4988 - protein, 202 aa, Escherichia coli TW09195; identical to SEQ ID NO: 4913

SEQ ID NO: 4989 - protein, 39 aa, Escherichia coli TW09195
MKLSIDISELIQLGKKMLPEGVDFFLDESPIDFDPIDIE

SEQ ID NO: 4990 - protein, 550 aa, Escherichia coli TW09098; identical to SEQ ID NO: 4795

SEQ ID NO: 4991 - protein, 210 aa, Escherichia coli TW09098; identical to SEQ ID NO: 4886

SEQ ID NO: 4992 - protein, 367 aa, Escherichia coli TW09098; identical to SEQ ID NO: 4797

SEQ ID NO: 4993 - protein, 550 aa, Escherichia coli TW07945; identical to SEQ ID NO: 4795

SEQ ID NO: 4994 - protein, 210 aa, Escherichia coli TW07945; identical to SEQ ID NO: 4886

SEQ ID NO: 4995 - protein, 162 aa, Escherichia coli TW07945
MKLSIDISELIQLGKKMLPEGVDFFLDESPIDFDPIDIELSTGKEVSIEDLDPGSGLISYHGRQVLLYIRDHSGRYDAAIVDGEKGKRFHIAWCRTLDEMRHKNRFERYHATNRIDGLFEIDDGSGRSQDVDLRVCMNCLERLNYKGSIDKQRKERFLNHSH

SEQ ID NO: 4996 - protein, 550 aa, Escherichia coli PA42; identical to SEQ ID NO: 4795

SEQ ID NO: 4997 - protein, 202 aa, Escherichia coli PA42; identical to SEQ ID NO: 4913

SEQ ID NO: 4998 - protein, 367 aa, Escherichia coli PA42; identical to SEQ ID NO: 4797

SEQ ID NO: 4999 - protein, 550 aa, Escherichia coli PA41; identical to SEQ ID NO: 4795

SEQ ID NO: 5000 - protein, 206 aa, Escherichia coli PA41; identical to SEQ ID NO: 4874

SEQ ID NO: 5001 - protein, 367 aa, Escherichia coli PA41; identical to SEQ ID NO: 4797

SEQ ID NO: 5002 - protein, 452 aa, Escherichia coli PA39; identical to SEQ ID NO: 4954

SEQ ID NO: 5003 - protein, 210 aa, Escherichia coli PA39; identical to SEQ ID NO: 4886

SEQ ID NO: 5004 - protein, 105 aa, Escherichia coli PA39
MAIIQRLRSQQGLLKAESWNEIYDLTDPSVHGDINMMQHKGFQPPVPGLDLPNSEHEIIATVEAAWPGLKIAVNLTPAEVEGWRIYTVGELVKEIQTGAFTPAKL

SEQ ID NO: 5005 - protein, 550 aa, Escherichia coli PA33; identical to SEQ ID NO: 4795

SEQ ID NO: 5006 - protein, 210 aa, Escherichia coli PA33; identical to SEQ ID NO: 4886

SEQ ID NO: 5007 - protein, 367 aa, Escherichia coli PA33; identical to SEQ ID NO: 4797

SEQ ID NO: 5008 - protein, 550 aa, Escherichia coli PA32; identical to SEQ ID NO: 4795

SEQ ID NO: 5009 - protein, 210 aa, Escherichia coli PA32; identical to SEQ ID NO: 4886

SEQ ID NO: 5010 - protein, 367 aa, Escherichia coli PA32; identical to SEQ ID NO: 4797

SEQ ID NO: 5011 - protein, 550 aa, Escherichia coli PA31; identical to SEQ ID NO: 4795

SEQ ID NO: 5012 - protein, 210 aa, Escherichia coli PA31; identical to SEQ ID NO: 4886

SEQ ID NO: 5013 - protein, 367 aa, Escherichia coli PA31; identical to SEQ ID NO: 4797

SEQ ID NO: 5014 - protein, 550 aa, Escherichia coli PA28; identical to SEQ ID NO: 4795

SEQ ID NO: 5015 - protein, 206 aa, Escherichia coli PA28; identical to SEQ ID NO: 4874

SEQ ID NO: 5016 - protein, 367 aa, Escherichia coli PA28; identical to SEQ ID NO: 4797

SEQ ID NO: 5017 - protein, 550 aa, Escherichia coli PA25; identical to SEQ ID NO: 4795

SEQ ID NO: 5018 - protein, 210 aa, Escherichia coli PA25; identical to SEQ ID NO: 4886

SEQ ID NO: 5019 - protein, 367 aa, Escherichia coli PA25; identical to SEQ ID NO: 4797

SEQ ID NO: 5020 - protein, 550 aa, Escherichia coli PA24; identical to SEQ ID NO: 4795

SEQ ID NO: 5021 - protein, 210 aa, Escherichia coli PA24; identical to SEQ ID NO: 4886

SEQ ID NO: 5022 - protein, 367 aa, Escherichia coli PA24; identical to SEQ ID NO: 4797

SEQ ID NO: 5023 - protein, 550 aa, Escherichia coli PA15; identical to SEQ ID NO: 4795

SEQ ID NO: 5024 - protein, 210 aa, Escherichia coli PA15; identical to SEQ ID NO: 4886

SEQ ID NO: 5025 - protein, 367 aa, Escherichia coli PA15; identical to SEQ ID NO: 4797

SEQ ID NO: 5026 - protein, 550 aa, Escherichia coli PA14; identical to SEQ ID NO: 4795

SEQ ID NO: 5027 - protein, 210 aa, Escherichia coli PA14; identical to SEQ ID NO: 4886

SEQ ID NO: 5028 - protein, 367 aa, Escherichia coli PA14; identical to SEQ ID NO: 4797

SEQ ID NO: 5029 - protein, 550 aa, Escherichia coli PA10; identical to SEQ ID NO: 4795

SEQ ID NO: 5030 - protein, 202 aa, Escherichia coli PA10; identical to SEQ ID NO: 4913

SEQ ID NO: 5031 - protein, 367 aa, Escherichia coli PA10; identical to SEQ ID NO: 4797

SEQ ID NO: 5032 - protein, 550 aa, Escherichia coli PA9; identical to SEQ ID NO: 4795

SEQ ID NO: 5033 - protein, 210 aa, Escherichia coli PA9; identical to SEQ ID NO: 4886

SEQ ID NO: 5034 - protein, 367 aa, Escherichia coli PA9; identical to SEQ ID NO: 4797

SEQ ID NO: 5035 - protein, 550 aa, Escherichia coli PA5; identical to SEQ ID NO: 4795

SEQ ID NO: 5036 - protein, 210 aa, Escherichia coli PA5; identical to SEQ ID NO: 4886

SEQ ID NO: 5037 - protein, 367 aa, Escherichia coli PA5; identical to SEQ ID NO: 4797

SEQ ID NO: 5038 - protein, 550 aa, Escherichia coli PA3; identical to SEQ ID NO: 4795

SEQ ID NO: 5039 - protein, 210 aa, Escherichia coli PA3; identical to SEQ ID NO: 4886

SEQ ID NO: 5040 - protein, 367 aa, Escherichia coli PA3; identical to SEQ ID NO: 4797

SEQ ID NO: 5041 - protein, 550 aa, Escherichia coli 93-001; identical to SEQ ID NO: 4795

SEQ ID NO: 5042 - protein, 210 aa, Escherichia coli 93-001; identical to SEQ ID NO: 4886

SEQ ID NO: 5043 - protein, 367 aa, Escherichia coli 93-001; identical to SEQ ID NO: 4797

SEQ ID NO: 5044 - protein, 550 aa, Escherichia coli FRIK1990; identical to SEQ ID NO: 4795

SEQ ID NO: 5045 - protein, 202 aa, Escherichia coli FRIK1990; identical to SEQ ID NO: 4913

SEQ ID NO: 5046 - protein, 367 aa, Escherichia coli FRIK1990; identical to SEQ ID NO: 4797

SEQ ID NO: 5047 - protein, 550 aa, Escherichia coli FRIK920; identical to SEQ ID NO: 4795

SEQ ID NO: 5048 - protein, 205 aa, Escherichia coli FRIK920; identical to SEQ ID NO: 4946

SEQ ID NO: 5049 - protein, 367 aa, Escherichia coli FRIK920; identical to SEQ ID NO: 4797

SEQ ID NO: 5050 - protein, 550 aa, Escherichia coli PA7; identical to SEQ ID NO: 4795

SEQ ID NO: 5051 - protein, 206 aa, Escherichia coli PA7; identical to SEQ ID NO: 4874

SEQ ID NO: 5052 - protein, 367 aa, Escherichia coli PA7; identical to SEQ ID NO: 4797

SEQ ID NO: 5053 - protein, 550 aa, Escherichia coli 0.1304; identical to SEQ ID NO: 4795

SEQ ID NO: 5054 - protein, 210 aa, Escherichia coli 0.1304; identical to SEQ ID NO: 4886

SEQ ID NO: 5055 - protein, 367 aa, Escherichia coli 0.1304; identical to SEQ ID NO: 4797

SEQ ID NO: 5056 - protein, 550 aa, Escherichia coli FRIK523; identical to SEQ ID NO: 4795

SEQ ID NO: 5057 - protein, 210 aa, Escherichia coli FRIK523; identical to SEQ ID NO: 4886

SEQ ID NO: 5058 - protein, 367 aa, Escherichia coli FRIK523; identical to SEQ ID NO: 4797

SEQ ID NO: 5059 - protein, 550 aa, Escherichia coli NE098; identical to SEQ ID NO: 4795

SEQ ID NO: 5060 - protein, 210 aa, Escherichia coli NE098; identical to SEQ ID NO: 4886

SEQ ID NO: 5061 - protein, 367 aa, Escherichia coli NE098; identical to SEQ ID NO: 4797

SEQ ID NO: 5062 - protein, 550 aa, Escherichia coli EC1870; identical to SEQ ID NO: 4795

SEQ ID NO: 5063 - protein, 202 aa, Escherichia coli EC1870; identical to SEQ ID NO: 4913

SEQ ID NO: 5064 - protein, 367 aa, Escherichia coli EC1870; identical to SEQ ID NO: 4797

SEQ ID NO: 5065 - protein, 550 aa, Escherichia coli EC1869; identical to SEQ ID NO: 4795

SEQ ID NO: 5066 - protein, 210 aa, Escherichia coli EC1869; identical to SEQ ID NO: 4886

SEQ ID NO: 5067 - protein, 367 aa, Escherichia coli EC1869; identical to SEQ ID NO: 4797

SEQ ID NO: 5068 - protein, 550 aa, Escherichia coli EC1868; identical to SEQ ID NO: 4795

SEQ ID NO: 5069 - protein, 210 aa, Escherichia coli EC1868; identical to SEQ ID NO: 4886

SEQ ID NO: 5070 - protein, 367 aa, Escherichia coli EC1868; identical to SEQ ID NO: 4797

SEQ ID NO: 5071 - protein, 498 aa, Escherichia coli EC1866; identical to SEQ ID NO: 4867

SEQ ID NO: 5072 - protein, 210 aa, Escherichia coli EC1866; identical to SEQ ID NO: 4886

SEQ ID NO: 5073 - protein, 367 aa, Escherichia coli EC1866; identical to SEQ ID NO: 4797

SEQ ID NO: 5074 - protein, 550 aa, Escherichia coli EC1864; identical to SEQ ID NO: 4795

SEQ ID NO: 5075 - protein, 206 aa, Escherichia coli EC1864; identical to SEQ ID NO: 4874

SEQ ID NO: 5076 - protein, 367 aa, Escherichia coli EC1864; identical to SEQ ID NO: 4797

SEQ ID NO: 5077 - protein, 550 aa, Escherichia coli EC1862; identical to SEQ ID NO: 4795

SEQ ID NO: 5078 - protein, 210 aa, Escherichia coli EC1862; identical to SEQ ID NO: 4886

SEQ ID NO: 5079 - protein, 367 aa, Escherichia coli EC1862; identical to SEQ ID NO: 4797

SEQ ID NO: 5080 - protein, 550 aa, Escherichia coli EC1856; identical to SEQ ID NO: 4795

SEQ ID NO: 5081 - protein, 210 aa, Escherichia coli EC1856; identical to SEQ ID NO: 4886

SEQ ID NO: 5082 - protein, 367 aa, Escherichia coli EC1856; identical to SEQ ID NO: 4797

SEQ ID NO: 5083 - protein, 550 aa, Escherichia coli EC1850; identical to SEQ ID NO: 4795

SEQ ID NO: 5084 - protein, 202 aa, Escherichia coli EC1850; identical to SEQ ID NO: 4913

SEQ ID NO: 5085 - protein, 367 aa, Escherichia coli EC1850; identical to SEQ ID NO: 4797

SEQ ID NO: 5086 - protein, 550 aa, Escherichia coli EC1849; identical to SEQ ID NO: 4795

SEQ ID NO: 5087 - protein, 210 aa, Escherichia coli EC1849; identical to SEQ ID NO: 4886

SEQ ID NO: 5088 - protein, 367 aa, Escherichia coli EC1849; identical to SEQ ID NO: 4797

SEQ ID NO: 5089 - protein, 550 aa, Escherichia coli EC1848; identical to SEQ ID NO: 4795

SEQ ID NO: 5090 - protein, 210 aa, Escherichia coli EC1848; identical to SEQ ID NO: 4886

SEQ ID NO: 5091 - protein, 367 aa, Escherichia coli EC1848; identical to SEQ ID NO: 4797

SEQ ID NO: 5092 - protein, 550 aa, Escherichia coli EC1847; identical to SEQ ID NO: 4795

SEQ ID NO: 5093 - protein, 210 aa, Escherichia coli EC1847; identical to SEQ ID NO: 4886

SEQ ID NO: 5094 - protein, 351 aa, Escherichia coli EC1847; identical to SEQ ID NO: 4917

SEQ ID NO: 5095 - protein, 550 aa, Escherichia coli EC1846; identical to SEQ ID NO: 4795

SEQ ID NO: 5096 - protein, 210 aa, Escherichia coli EC1846; identical to SEQ ID NO: 4886

SEQ ID NO: 5097 - protein, 367 aa, Escherichia coli EC1846; identical to SEQ ID NO: 4797

SEQ ID NO: 5098 - protein, 550 aa, Escherichia coli EC1737; identical to SEQ ID NO: 4795

SEQ ID NO: 5099 - protein, 210 aa, Escherichia coli EC1737; identical to SEQ ID NO: 4886

SEQ ID NO: 5100 - protein, 367 aa, Escherichia coli EC1737; identical to SEQ ID NO: 4797

SEQ ID NO: 5101 - protein, 550 aa, Escherichia coli EC1736; identical to SEQ ID NO: 4795

SEQ ID NO: 5102 - protein, 206 aa, Escherichia coli EC1736; identical to SEQ ID NO: 4874

SEQ ID NO: 5103 - protein, 351 aa, Escherichia coli EC1736; identical to SEQ ID NO: 4917

SEQ ID NO: 5104 - protein, 550 aa, Escherichia coli EC1735; identical to SEQ ID NO: 4795

SEQ ID NO: 5105 - protein, 210 aa, Escherichia coli EC1735; identical to SEQ ID NO: 4886

SEQ ID NO: 5106 - protein, 351 aa, Escherichia coli EC1735; identical to SEQ ID NO: 4917

SEQ ID NO: 5107 - protein, 498 aa, Escherichia coli PA38; identical to SEQ ID NO: 4867

SEQ ID NO: 5108 - protein, 210 aa, Escherichia coli PA38; identical to SEQ ID NO: 4886

SEQ ID NO: 5109 - protein, 367 aa, Escherichia coli PA38; identical to SEQ ID NO: 4797

SEQ ID NO: 5110 - protein, 550 aa, Escherichia coli PA34; identical to SEQ ID NO: 4795

SEQ ID NO: 5111 - protein, 210 aa, Escherichia coli PA34; identical to SEQ ID NO: 4886

SEQ ID NO: 5112 - protein, 367 aa, Escherichia coli PA34; identical to SEQ ID NO: 4797

SEQ ID NO: 5113 - protein, 550 aa, Escherichia coli FDA506; identical to SEQ ID NO: 4795

SEQ ID NO: 5114 - protein, 210 aa, Escherichia coli FDA506; identical to SEQ ID NO: 4886

SEQ ID NO: 5115 - protein, 367 aa, Escherichia coli FDA506; identical to SEQ ID NO: 4797

SEQ ID NO: 5116 - protein, 550 aa, Escherichia coli FDA507; identical to SEQ ID NO: 4795

SEQ ID NO: 5117 - protein, 210 aa, Escherichia coli FDA507; identical to SEQ ID NO: 4886

SEQ ID NO: 5118 - protein, 367 aa, Escherichia coli FDA507; identical to SEQ ID NO: 4797

SEQ ID NO: 5119 - protein, 550 aa, Escherichia coli FDA504; identical to SEQ ID NO: 4795

SEQ ID NO: 5120 - protein, 210 aa, Escherichia coli FDA504; identical to SEQ ID NO: 4886

SEQ ID NO: 5121 - protein, 367 aa, Escherichia coli FDA504; identical to SEQ ID NO: 4797

SEQ ID NO: 5122 - protein, 550 aa, Escherichia coli FRIK1999; identical to SEQ ID NO: 4795

SEQ ID NO: 5123 - protein, 210 aa, Escherichia coli FRIK1999; identical to SEQ ID NO: 4886

SEQ ID NO: 5124 - protein, 367 aa, Escherichia coli FRIK1999; identical to SEQ ID NO: 4797

SEQ ID NO: 5125 - protein, 550 aa, Escherichia coli FRIK1997; identical to SEQ ID NO: 4795

SEQ ID NO: 5126 - protein, 210 aa, Escherichia coli FRIK1997; identical to SEQ ID NO: 4886

SEQ ID NO: 5127 - protein, 367 aa, Escherichia coli FRIK1997; identical to SEQ ID NO: 4797

SEQ ID NO: 5128 - protein, 550 aa, Escherichia coli NE1487; identical to SEQ ID NO: 4795

SEQ ID NO: 5129 - protein, 210 aa, Escherichia coli NE1487; identical to SEQ ID NO: 4886

SEQ ID NO: 5130 - protein, 367 aa, Escherichia coli NE1487; identical to SEQ ID NO: 4797

SEQ ID NO: 5131 - protein, 550 aa, Escherichia coli NE037; identical to SEQ ID NO: 4795

SEQ ID NO: 5132 - protein, 210 aa, Escherichia coli NE037; identical to SEQ ID NO: 4886

SEQ ID NO: 5133 - protein, 367 aa, Escherichia coli NE037; identical to SEQ ID NO: 4797

SEQ ID NO: 5134 - protein, 550 aa, Escherichia coli FRIK2001; identical to SEQ ID NO: 4795

SEQ ID NO: 5135 - protein, 210 aa, Escherichia coli FRIK2001; identical to SEQ ID NO: 4886

SEQ ID NO: 5136 - protein, 367 aa, Escherichia coli FRIK2001; identical to SEQ ID NO: 4797

SEQ ID NO: 5137 - protein, 550 aa, Escherichia coli PA4; identical to SEQ ID NO: 4795

SEQ ID NO: 5138 - protein, 210 aa, Escherichia coli PA4; identical to SEQ ID NO: 4886

SEQ ID NO: 5139 - protein, 367 aa, Escherichia coli PA4; identical to SEQ ID NO: 4797

SEQ ID NO: 5140 - protein, 550 aa, Escherichia coli PA23; identical to SEQ ID NO: 4795

SEQ ID NO: 5141 - protein, 210 aa, Escherichia coli PA23; identical to SEQ ID NO: 4886

SEQ ID NO: 5142 - protein, 367 aa, Escherichia coli PA23; identical to SEQ ID NO: 4797

SEQ ID NO: 5143 - protein, 550 aa, Escherichia coli PA49; identical to SEQ ID NO: 4795

SEQ ID NO: 5144 - protein, 210 aa, Escherichia coli PA49; identical to SEQ ID NO: 4886

SEQ ID NO: 5145 - protein, 367 aa, Escherichia coli PA49; identical to SEQ ID NO: 4797

SEQ ID NO: 5146 - protein, 550 aa, Escherichia coli PA45; identical to SEQ ID NO: 4795

SEQ ID NO: 5147 - protein, 210 aa, Escherichia coli PA45; identical to SEQ ID NO: 4886

SEQ ID NO: 5148 - protein, 367 aa, Escherichia coli PA45; identical to SEQ ID NO: 4797

SEQ ID NO: 5149 - protein, 550 aa, Escherichia coli TT12B; identical to SEQ ID NO: 4795

SEQ ID NO: 5150 - protein, 210 aa, Escherichia coli TT12B; identical to SEQ ID NO: 4886

SEQ ID NO: 5151 - protein, 367 aa, Escherichia coli TT12B; identical to SEQ ID NO: 4797

SEQ ID NO: 5152 - protein, 550 aa, Escherichia coli MA6; identical to SEQ ID NO: 4795

SEQ ID NO: 5153 - protein, 210 aa, Escherichia coli MA6; identical to SEQ ID NO: 4886

SEQ ID NO: 5154 - protein, 367 aa, Escherichia coli MA6; identical to SEQ ID NO: 4797

SEQ ID NO: 5155 - protein, 550 aa, Escherichia coli 5905; identical to SEQ ID NO: 4795

SEQ ID NO: 5156 - protein, 210 aa, Escherichia coli 5905; identical to SEQ ID NO: 4886

SEQ ID NO: 5157 - protein, 367 aa, Escherichia coli 5905; identical to SEQ ID NO: 4803

SEQ ID NO: 5158 - protein, 550 aa, Escherichia coli CB7326
MLAQLFEQLFQSIDSTLITNIFIWAVIFVFLSAWWCDKKNIHSKFREYAPTLMGALGILGTFIGIIIGLLNFNTESIDTSIPVLLGGLKTAFITSIVGMFFAILFNGMDAFFFANKRSALAENNPESVTPEHIYHELKEQNQTLTKLVSGINGDSEGSLIAQIKLLRTEISDSSQAQLANHTHFSNKLWEQLEQFADLMAKGATEQIIDALRQVIIDFNQNLTEQFGENFKALDASVKKLVEWQGNYKTQIEQMSEQYQQSVESLVETKTAVAGIWEECKEIPLAMSELREVLQVNQHQISELSRHLETFVAIRDKATTVLPEIQNKMAEVGELLKSGATNVSASLEQTSQQILLNADSMRVALDEGTEGFRQSVTQTQQAFASMAHDVSNSSETLTSTLGETITEMKQSGEEFLKSLESHSKELHRNMEQNTTNVIDMFSKTGEKINHQLSSNADNMFDSIQTSFDKASAGLTSQVRESIEKFALSINEQLHAFEQATEREMNREMQSLGNALLSISKGFVGNYEKLIKDYQIVMGQLQALISANKHRG

SEQ ID NO: 5159 - protein, 210 aa, Escherichia coli CB7326; identical to SEQ ID NO: 4886

SEQ ID NO: 5160 - protein, 367 aa, Escherichia coli CB7326; identical to SEQ ID NO: 4797

SEQ ID NO: 5161 - protein, 550 aa, Escherichia coli EC96038; identical to SEQ ID NO: 4795

SEQ ID NO: 5162 - protein, 210 aa, Escherichia coli EC96038; identical to SEQ ID NO: 4886

SEQ ID NO: 5163 - protein, 367 aa, Escherichia coli EC96038; identical to SEQ ID NO: 4803

SEQ ID NO: 5164 - protein, 550 aa, Escherichia coli 5412; identical to SEQ ID NO: 4795

SEQ ID NO: 5165 - protein, 210 aa, Escherichia coli 5412; identical to SEQ ID NO: 4886

SEQ ID NO: 5166 - protein, 367 aa, Escherichia coli 5412; identical to SEQ ID NO: 4803

SEQ ID NO: 5167 - protein, 550 aa, Escherichia coli 3.4870; identical to SEQ ID NO: 4795

SEQ ID NO: 5168 - protein, 210 aa, Escherichia coli 3.4870; identical to SEQ ID NO: 4886

SEQ ID NO: 5169 - protein, 367 aa, Escherichia coli 3.4870; identical to SEQ ID NO: 4797

SEQ ID NO: 5170 - protein, 550 aa, Escherichia coli 8.0416; identical to SEQ ID NO: 4795

SEQ ID NO: 5171 - protein, 210 aa, Escherichia coli 8.0416; identical to SEQ ID NO: 4886

SEQ ID NO: 5172 - protein, 367 aa, Escherichia coli 8.0416; identical to SEQ ID NO: 4797

SEQ ID NO: 5173 - protein, 550 aa, Escherichia coli 10.0821; identical to SEQ ID NO: 4795

SEQ ID NO: 5174 - protein, 210 aa, Escherichia coli 10.0821; identical to SEQ ID NO: 4886

SEQ ID NO: 5175 - protein, 367 aa, Escherichia coli 10.0821; identical to SEQ ID NO: 4797

SEQ ID NO: 5176 - protein, 550 aa, Escherichia coli 5.2239; identical to SEQ ID NO: 4795

SEQ ID NO: 5177 - protein, 206 aa, Escherichia coli 5.2239; identical to SEQ ID NO: 4874

SEQ ID NO: 5178 - protein, 367 aa, Escherichia coli 5.2239; identical to SEQ ID NO: 4797

SEQ ID NO: 5179 - protein, 550 aa, Escherichia coli 6.0172; identical to SEQ ID NO: 4795

SEQ ID NO: 5180 - protein, 206 aa, Escherichia coli 6.0172; identical to SEQ ID NO: 4874

SEQ ID NO: 5181 - protein, 351 aa, Escherichia coli 6.0172; identical to SEQ ID NO: 4917

SEQ ID NO: 5182 - protein, 550 aa, Escherichia coli 8.0586; identical to SEQ ID NO: 4795

SEQ ID NO: 5183 - protein, 205 aa, Escherichia coli 8.0586; identical to SEQ ID NO: 4946

SEQ ID NO: 5184 - protein, 367 aa, Escherichia coli 8.0586; identical to SEQ ID NO: 4797

SEQ ID NO: 5185 - protein, 550 aa, Escherichia coli 8.2524; identical to SEQ ID NO: 4795

SEQ ID NO: 5186 - protein, 210 aa, Escherichia coli 8.2524; identical to SEQ ID NO: 4886

SEQ ID NO: 5187 - protein, 367 aa, Escherichia coli 8.2524; identical to SEQ ID NO: 4797

SEQ ID NO: 5188 - protein, 550 aa, Escherichia coli 10.0833; identical to SEQ ID NO: 4795

SEQ ID NO: 5189 - protein, 210 aa, Escherichia coli 10.0833; identical to SEQ ID NO: 4886

SEQ ID NO: 5190 - protein, 367 aa, Escherichia coli 10.0833; identical to SEQ ID NO: 4797

SEQ ID NO: 5191 - protein, 550 aa, Escherichia coli 10.0869; identical to SEQ ID NO: 4795

SEQ ID NO: 5192 - protein, 210 aa, Escherichia coli 10.0869; identical to SEQ ID NO: 4886

SEQ ID NO: 5193 - protein, 367 aa, Escherichia coli 10.0869; identical to SEQ ID NO: 4803

SEQ ID NO: 5194 - protein, 550 aa, Escherichia coli 88.0221; identical to SEQ ID NO: 4795

SEQ ID NO: 5195 - protein, 210 aa, Escherichia coli 88.0221; identical to SEQ ID NO: 4886

SEQ ID NO: 5196 - protein, 367 aa, Escherichia coli 88.0221; identical to SEQ ID NO: 4797

SEQ ID NO: 5197 - protein, 550 aa, Escherichia coli 88.1467; identical to SEQ ID NO: 4795

SEQ ID NO: 5198 - protein, 210 aa, Escherichia coli 88.1467; identical to SEQ ID NO: 4886

SEQ ID NO: 5199 - protein, 367 aa, Escherichia coli 88.1467; identical to SEQ ID NO: 4797

SEQ ID NO: 5200 - protein, 550 aa, Escherichia coli 88.1042; identical to SEQ ID NO: 4795

SEQ ID NO: 5201 - protein, 210 aa, Escherichia coli 88.1042; identical to SEQ ID NO: 4886

SEQ ID NO: 5202 - protein, 367 aa, Escherichia coli 88.1042; identical to SEQ ID NO: 4797

SEQ ID NO: 5203 - protein, 550 aa, Escherichia coli 89.0511; identical to SEQ ID NO: 4795

SEQ ID NO: 5204 - protein, 210 aa, Escherichia coli 89.0511; identical to SEQ ID NO: 4886

SEQ ID NO: 5205 - protein, 367 aa, Escherichia coli 89.0511; identical to SEQ ID NO: 4797

SEQ ID NO: 5206 - protein, 550 aa, Escherichia coli 90.0091; identical to SEQ ID NO: 4795

SEQ ID NO: 5207 - protein, 202 aa, Escherichia coli 90.0091; identical to SEQ ID NO: 4913

SEQ ID NO: 5208 - protein, 367 aa, Escherichia coli 90.0091; identical to SEQ ID NO: 4797

SEQ ID NO: 5209 - protein, 550 aa, Escherichia coli 90.0039; identical to SEQ ID NO: 4795

SEQ ID NO: 5210 - protein, 210 aa, Escherichia coli 90.0039; identical to SEQ ID NO: 4886

SEQ ID NO: 5211 - protein, 367 aa, Escherichia coli 90.0039; identical to SEQ ID NO: 4797

SEQ ID NO: 5212 - protein, 550 aa, Escherichia coli 90.2281; identical to SEQ ID NO: 4795

SEQ ID NO: 5213 - protein, 210 aa, Escherichia coli 90.2281; identical to SEQ ID NO: 4886

SEQ ID NO: 5214 - protein, 367 aa, Escherichia coli 90.2281; identical to SEQ ID NO: 4797

SEQ ID NO: 5215 - protein, 550 aa, Escherichia coli 93.0055; identical to SEQ ID NO: 4795

SEQ ID NO: 5216 - protein, 210 aa, Escherichia coli 93.0055; identical to SEQ ID NO: 4886

SEQ ID NO: 5217 - protein, 367 aa, Escherichia coli 93.0055; identical to SEQ ID NO: 4797

SEQ ID NO: 5218 - protein, 550 aa, Escherichia coli 93.0056; identical to SEQ ID NO: 4795

SEQ ID NO: 5219 - protein, 210 aa, Escherichia coli 93.0056; identical to SEQ ID NO: 4886

SEQ ID NO: 5220 - protein, 367 aa, Escherichia coli 93.0056; identical to SEQ ID NO: 4797

SEQ ID NO: 5221 - protein, 550 aa, Escherichia coli 94.0618; identical to SEQ ID NO: 4795

SEQ ID NO: 5222 - protein, 210 aa, Escherichia coli 94.0618; identical to SEQ ID NO: 4886

SEQ ID NO: 5223 - protein, 367 aa, Escherichia coli 94.0618; identical to SEQ ID NO: 4797

SEQ ID NO: 5224 - protein, 550 aa, Escherichia coli 97.0007; identical to SEQ ID NO: 4795

SEQ ID NO: 5225 - protein, 210 aa, Escherichia coli 97.0007; identical to SEQ ID NO: 4886

SEQ ID NO: 5226 - protein, 351 aa, Escherichia coli 97.0007; identical to SEQ ID NO: 4917

SEQ ID NO: 5227 - protein, 550 aa, Escherichia coli 99.0678; identical to SEQ ID NO: 4795

SEQ ID NO: 5228 - protein, 202 aa, Escherichia coli 99.0678; identical to SEQ ID NO: 4913

SEQ ID NO: 5229 - protein, 367 aa, Escherichia coli 99.0678; identical to SEQ ID NO: 4797

SEQ ID NO: 5230 - protein, 550 aa, Escherichia coli 99.0713; identical to SEQ ID NO: 4795

SEQ ID NO: 5231 - protein, 210 aa, Escherichia coli 99.0713; identical to SEQ ID NO: 4886

SEQ ID NO: 5232 - protein, 367 aa, Escherichia coli 99.0713; identical to SEQ ID NO: 4797

SEQ ID NO: 5233 - protein, 498 aa, Escherichia coli 99.0672; identical to SEQ ID NO: 4867

SEQ ID NO: 5234 - protein, 210 aa, Escherichia coli 99.0672; identical to SEQ ID NO: 4886

SEQ ID NO: 5235 - protein, 367 aa, Escherichia coli 99.0672; identical to SEQ ID NO: 4797

SEQ ID NO: 5236 - protein, 550 aa, Escherichia coli 97.1742; identical to SEQ ID NO: 4795

SEQ ID NO: 5237 - protein, 206 aa, Escherichia coli 97.1742; identical to SEQ ID NO: 4874

SEQ ID NO: 5238 - protein, 367 aa, Escherichia coli 97.1742; identical to SEQ ID NO: 4797

SEQ ID NO: 5239 - protein, 550 aa, Escherichia coli 97.0003; identical to SEQ ID NO: 4795

SEQ ID NO: 5240 - protein, 202 aa, Escherichia coli 97.0003; identical to SEQ ID NO: 4913

SEQ ID NO: 5241 - protein, 367 aa, Escherichia coli 97.0003; identical to SEQ ID NO: 4797

SEQ ID NO: 5242 - protein, 550 aa, Escherichia coli 96.0107; identical to SEQ ID NO: 4795

SEQ ID NO: 5243 - protein, 210 aa, Escherichia coli 96.0107; identical to SEQ ID NO: 4886

SEQ ID NO: 5244 - protein, 351 aa, Escherichia coli 96.0107; identical to SEQ ID NO: 4917

SEQ ID NO: 5245 - protein, 550 aa, Escherichia coli 96.0939; identical to SEQ ID NO: 4795

SEQ ID NO: 5246 - protein, 210 aa, Escherichia coli 96.0939; identical to SEQ ID NO: 4886

SEQ ID NO: 5247 - protein, 367 aa, Escherichia coli 96.0939; identical to SEQ ID NO: 4797

SEQ ID NO: 5248 - protein, 550 aa, Escherichia coli 96.0932; identical to SEQ ID NO: 4795

SEQ ID NO: 5249 - protein, 210 aa, Escherichia coli 96.0932; identical to SEQ ID NO: 4886

SEQ ID NO: 5250 - protein, 367 aa, Escherichia coli 96.0932; identical to SEQ ID NO: 4797

SEQ ID NO: 5251 - protein, 550 aa, Escherichia coli 96.0427; identical to SEQ ID NO: 4795

SEQ ID NO: 5252 - protein, 210 aa, Escherichia coli 96.0427; identical to SEQ ID NO: 4886

SEQ ID NO: 5253 - protein, 367 aa, Escherichia coli 96.0427; identical to SEQ ID NO: 4797

SEQ ID NO: 5254 - protein, 352 aa, Escherichia coli 95.0183
MAKGATEQIIDALRQVIIDFNQNLTEQFGENFKALDASVKKLVEWQGNYKTQIEQMSEQYQQSVESLVETKTAVAGIWEECKEIPLAMSELREVLQVNQHQISELSRHLETFVAIRDKATTVLPEIQNKMAEVGELLKSGAANVSASLEQTSQQILLNADSMRVALDEGTEGFRQSVTQTQQAFASMAHDVSNSSETLTSTLGETITEMKQSGEEFLKSLESHSKELHRNMEQNTTNVIDMFSKTGEKINHQLSSNADNMFDSIQTSFDKASAGLTSQVRESIEKFALSINEQLHAFEQATEREMNREMQSLGNALLSISKGFVGNYEKLIKDYQIVMGQLQALISANKHRG

SEQ ID NO: 5255 - protein, 210 aa, Escherichia coli 95.0183; identical to SEQ ID NO: 4886

SEQ ID NO: 5256 - protein, 367 aa, Escherichia coli 95.0183; identical to SEQ ID NO: 4797

SEQ ID NO: 5257 - protein, 550 aa, Escherichia coli 95.1288; identical to SEQ ID NO: 4795

SEQ ID NO: 5258 - protein, 202 aa, Escherichia coli 95.1288; identical to SEQ ID NO: 4913

SEQ ID NO: 5259 - protein, 105 aa, Escherichia coli 95.1288; identical to SEQ ID NO: 5004

SEQ ID NO: 5260 - protein, 550 aa, Escherichia coli 95.0943; identical to SEQ ID NO: 4795

SEQ ID NO: 5261 - protein, 210 aa, Escherichia coli 95.0943; identical to SEQ ID NO: 4886

SEQ ID NO: 5262 - protein, 351 aa, Escherichia coli 95.0943; identical to SEQ ID NO: 4917

SEQ ID NO: 5263 - protein, 550 aa, Escherichia coli 96.0428; identical to SEQ ID NO: 4795

SEQ ID NO: 5264 - protein, 210 aa, Escherichia coli 96.0428; identical to SEQ ID NO: 4886

SEQ ID NO: 5265 - protein, 367 aa, Escherichia coli 96.0428; identical to SEQ ID NO: 4797

SEQ ID NO: 5266 - protein, 550 aa, Escherichia coli 96.0109; identical to SEQ ID NO: 4795

SEQ ID NO: 5267 - protein, 210 aa, Escherichia coli 96.0109; identical to SEQ ID NO: 4886

SEQ ID NO: 5268 - protein, 367 aa, Escherichia coli 96.0109; identical to SEQ ID NO: 4797

SEQ ID NO: 5269 - protein, 498 aa, Escherichia coli 97.0010; identical to SEQ ID NO: 4867

SEQ ID NO: 5270 - protein, 206 aa, Escherichia coli 97.0010; identical to SEQ ID NO: 4874

SEQ ID NO: 5271 - protein, 367 aa, Escherichia coli 97.0010; identical to SEQ ID NO: 4797

SEQ ID NO: 5272 - protein, 550 aa, Escherichia coli KTE125; identical to SEQ ID NO: 4804

SEQ ID NO: 5273 - protein, 235 aa, Escherichia coli KTE125
MDKIIGKQLPKKDQDNEHWVSMSDLMAGLMMVFMFISIAYMHYVRIEKEKIKEVAVAYENAQLQLYNALDIEFAKDLQDWDAEIDKQTLEVRFKSPDVLFGLGSTELKPKFKLILDDFFPRYLKVLDNYQEHITEVRIEGHTSTDWTGTTNPDIAYFNNMALSQGRTRAVLQYVYDIKNIATHKQWVKSKFAAVGYSSAHPILDKTGKEDPNRSRRVTFKVVTNAELQIRKIIQE

SEQ ID NO: 5274 - protein, 367 aa, Escherichia coli KTE125
MKLSIDISELIQLGKKMLPEGVDFFLDESPIDFDPIDIELSTGKEVSIEDLDPGSGLISYHGRQVLLYIRDHSGRYDAAIIDGEKGKRFHIAWCRTLDEMRHKNRFERYHATNRIDGLFEIDDGSGRSQDVDLRVCMNCLERLNYKGSIDKQRKREIFKSFSLNEFFSDYSTCFRHMPKGIYDKTNSGYVENWKDISKSIREKAKYTCNNCGVNLSTAKNLCHVHHKNGIKYDNHHENLLVLCKDCHRKQPLHEGIFVTQAEMAIIQRLRSQQGLLKAESWNEIYDLTDPSVHGDINMMQHKGFQPPVPGLDLQNSEHEIIATVEAAWPGLKIAVNLTPAEVEGWRIYTVGELVKEIQTGAFTSATL

SEQ ID NO: 5275 - protein, 550 aa, Escherichia coli 99.0815; identical to SEQ ID NO: 4795

SEQ ID NO: 5276 - protein, 210 aa, Escherichia coli 99.0815; identical to SEQ ID NO: 4886

SEQ ID NO: 5277 - protein, 367 aa, Escherichia coli 99.0815; identical to SEQ ID NO: 4797

SEQ ID NO: 5278 - protein, 550 aa, Escherichia coli 99.0816; identical to SEQ ID NO: 4795

SEQ ID NO: 5279 - protein, 210 aa, Escherichia coli 99.0816; identical to SEQ ID NO: 4886

SEQ ID NO: 5280 - protein, 367 aa, Escherichia coli 99.0816; identical to SEQ ID NO: 4797

SEQ ID NO: 5281 - protein, 498 aa, Escherichia coli 99.1793; identical to SEQ ID NO: 4867

SEQ ID NO: 5282 - protein, 210 aa, Escherichia coli 99.1793; identical to SEQ ID NO: 4886

SEQ ID NO: 5283 - protein, 367 aa, Escherichia coli 99.1793; identical to SEQ ID NO: 4797

SEQ ID NO: 5284 - protein, 443 aa, Escherichia coli 99.1805
MDAFFFANKRSALAENNPESVTPEHIYHELKEQNQTLTKLVSGINGDSEGSLIAQIKLLRTEISDSSQAQLANHTHFSNKLWEQLEQFADLMAKGATEQIIDALRQVIIDFNQNLTEQFGENFKALDASVKKLVEWQGNYKTQIEQMSEQYQQSVESLVETKTAVAGIWEECKEIPLAMSELREVLQVNQHQISELSRHLETFVAIRDKATTVLPEIQNKMAEVGELLKSGAANVSASLEQTSQQILLNADSMRVALDEGTEGFRQSVTQTQQAFASMAHDVSNSSETLTSTLGETITEMKQSGEEFLKSLESHSKELHRNMEQNTTNVIDMFSKTGEKINHQLSSNADNMFDSIQTSFDKASAGLTSQVRESIEKFALSINEQLHAFEQATEREMNREMQSLGNALLSISKGFVGNYEKLIKDYQIVMGQLQALISANKHRG

SEQ ID NO: 5285 - protein, 210 aa, Escherichia coli 99.1805; identical to SEQ ID NO: 4886

SEQ ID NO: 5286 - protein, 367 aa, Escherichia coli 99.1805; identical to SEQ ID NO: 4797

SEQ ID NO: 5287 - protein, 550 aa, Escherichia coli ATCC 700728; identical to SEQ ID NO: 4795

SEQ ID NO: 5288 - protein, 210 aa, Escherichia coli ATCC 700728; identical to SEQ ID NO: 4886

SEQ ID NO: 5289 - protein, 367 aa, Escherichia coli ATCC 700728; identical to SEQ ID NO: 4797

SEQ ID NO: 5290 - protein, 550 aa, Escherichia coli PA47; identical to SEQ ID NO: 4795

SEQ ID NO: 5291 - protein, 206 aa, Escherichia coli PA47; identical to SEQ ID NO: 4874

SEQ ID NO: 5292 - protein, 367 aa, Escherichia coli PA47; identical to SEQ ID NO: 4797

SEQ ID NO: 5293 - protein, 550 aa, Escherichia coli PA48; identical to SEQ ID NO: 4795

SEQ ID NO: 5294 - protein, 210 aa, Escherichia coli PA48; identical to SEQ ID NO: 4886

SEQ ID NO: 5295 - protein, 367 aa, Escherichia coli PA48; identical to SEQ ID NO: 4803

SEQ ID NO: 5296 - protein, 550 aa, Escherichia coli 7.1982; identical to SEQ ID NO: 4795

SEQ ID NO: 5297 - protein, 205 aa, Escherichia coli 7.1982; identical to SEQ ID NO: 4946

SEQ ID NO: 5298 - protein, 367 aa, Escherichia coli 7.1982; identical to SEQ ID NO: 4797

SEQ ID NO: 5299 - protein, 550 aa, Escherichia coli 99.1781; identical to SEQ ID NO: 4795

SEQ ID NO: 5300 - protein, 210 aa, Escherichia coli 99.1781; identical to SEQ ID NO: 4886

SEQ ID NO: 5301 - protein, 367 aa, Escherichia coli 99.1781; identical to SEQ ID NO: 4797

SEQ ID NO: 5302 - protein, 550 aa, Escherichia coli 99.1762; identical to SEQ ID NO: 4795

SEQ ID NO: 5303 - protein, 210 aa, Escherichia coli 99.1762; identical to SEQ ID NO: 4886

SEQ ID NO: 5304 - protein, 367 aa, Escherichia coli 99.1762; identical to SEQ ID NO: 4797

SEQ ID NO: 5305 - protein, 550 aa, Escherichia coli PA35; identical to SEQ ID NO: 4795

SEQ ID NO: 5306 - protein, 202 aa, Escherichia coli PA35; identical to SEQ ID NO: 4913

SEQ ID NO: 5307 - protein, 367 aa, Escherichia coli PA35; identical to SEQ ID NO: 4797

SEQ ID NO: 5308 - protein, 550 aa, Escherichia coli 3.4880; identical to SEQ ID NO: 4795

SEQ ID NO: 5309 - protein, 202 aa, Escherichia coli 3.4880; identical to SEQ ID NO: 4913

SEQ ID NO: 5310 - protein, 367 aa, Escherichia coli 3.4880; identical to SEQ ID NO: 4797

SEQ ID NO: 5311 - protein, 550 aa, Escherichia coli 99.0670; identical to SEQ ID NO: 4795

SEQ ID NO: 5312 - protein, 210 aa, Escherichia coli 99.0670; identical to SEQ ID NO: 4886

SEQ ID NO: 5313 - protein, 367 aa, Escherichia coli 99.0670; identical to SEQ ID NO: 4797

SEQ ID NO: 5314 - protein, 550 aa, Escherichia coli 99.0814; identical to SEQ ID NO: 4795

SEQ ID NO: 5315 - protein, 210 aa, Escherichia coli 99.0814; identical to SEQ ID NO: 4886

SEQ ID NO: 5316 - protein, 367 aa, Escherichia coli 99.0814; identical to SEQ ID NO: 4797

SEQ ID NO: 5317 - protein, 550 aa, Escherichia coli 99.0839; identical to SEQ ID NO: 4795

SEQ ID NO: 5318 - protein, 210 aa, Escherichia coli 99.0839; identical to SEQ ID NO: 4886

SEQ ID NO: 5319 - protein, 367 aa, Escherichia coli 99.0839; identical to SEQ ID NO: 4797

SEQ ID NO: 5320 - protein, 550 aa, Escherichia coli 99.0848; identical to SEQ ID NO: 4795

SEQ ID NO: 5321 - protein, 206 aa, Escherichia coli 99.0848; identical to SEQ ID NO: 4874

SEQ ID NO: 5322 - protein, 367 aa, Escherichia coli 99.0848; identical to SEQ ID NO: 4797

SEQ ID NO: 5323 - protein, 452 aa, Escherichia coli 99.1753; identical to SEQ ID NO: 4954

SEQ ID NO: 5324 - protein, 235 aa, Escherichia coli 99.1753; identical to SEQ ID NO: 4796

SEQ ID NO: 5325 - protein, 367 aa, Escherichia coli 99.1753; identical to SEQ ID NO: 4797

SEQ ID NO: 5326 - protein, 550 aa, Escherichia coli 99.1775; identical to SEQ ID NO: 4795

SEQ ID NO: 5327 - protein, 206 aa, Escherichia coli 99.1775; identical to SEQ ID NO: 4874

SEQ ID NO: 5328 - protein, 367 aa, Escherichia coli 99.1775; identical to SEQ ID NO: 4797

SEQ ID NO: 5329 - protein, 550 aa, Escherichia coli PA19; identical to SEQ ID NO: 4795

SEQ ID NO: 5330 - protein, 202 aa, Escherichia coli PA19; identical to SEQ ID NO: 4913

SEQ ID NO: 5331 - protein, 367 aa, Escherichia coli PA19; identical to SEQ ID NO: 4797

SEQ ID NO: 5332 - protein, 550 aa, Escherichia coli PA2; identical to SEQ ID NO: 4795

SEQ ID NO: 5333 - protein, 210 aa, Escherichia coli PA2; identical to SEQ ID NO: 4886

SEQ ID NO: 5334 - protein, 367 aa, Escherichia coli PA2; identical to SEQ ID NO: 4797

SEQ ID NO: 5335 - protein, 550 aa, Escherichia coli PA11; identical to SEQ ID NO: 4795

SEQ ID NO: 5336 - protein, 210 aa, Escherichia coli PA11; identical to SEQ ID NO: 4886

SEQ ID NO: 5337 - protein, 367 aa, Escherichia coli PA11; identical to SEQ ID NO: 4797

SEQ ID NO: 5338 - protein, 550 aa, Escherichia coli PA13; identical to SEQ ID NO: 4795

SEQ ID NO: 5339 - protein, 235 aa, Escherichia coli PA13; identical to SEQ ID NO: 4796

SEQ ID NO: 5340 - protein, 367 aa, Escherichia coli PA13; identical to SEQ ID NO: 4797

SEQ ID NO: 5341 - protein, 550 aa, Escherichia coli PA8; identical to SEQ ID NO: 4795

SEQ ID NO: 5342 - protein, 210 aa, Escherichia coli PA8; identical to SEQ ID NO: 4886

SEQ ID NO: 5343 - protein, 367 aa, Escherichia coli PA8; identical to SEQ ID NO: 4797

SEQ ID NO: 5344 - protein, 550 aa, Escherichia coli 09BKT078844; identical to SEQ ID NO: 4795

SEQ ID NO: 5345 - protein, 210 aa, Escherichia coli 09BKT078844; identical to SEQ ID NO: 4886

SEQ ID NO: 5346 - protein, 351 aa, Escherichia coli 09BKT078844; identical to SEQ ID NO: 4917

SEQ ID NO: 5347 - protein, 550 aa, Escherichia coli ONT:H33 str. C48/93
MLAQLFEQLFQSIDSTLITNIFIWAVIFVFLSAWWCDKKNIHSKFREYAPTLMGALGILGTFIGIIIGLLNFNTESIDTSIPVLLGGLKTAFITSIVGMFFAILFNGMDAFFFANKRSALAENNPESVTPEHIYHELKEQNQTLTKLVSGINGDSEGSLIAQIKLLRTEISDSSQAQLANHTHFSNKLWEQLEQFADLMAKGATEQIIDALRQVIIDFNENLTEQFGENFKALDASVKKLVEWQENYKTQVELMSEQYQQSVESLVETKTAVAGIWEECKEIPLAMSELREVLQVNQHQISELSRHLETFVAIRDKATTVLPEIQNKMAEVGELLKSGAANVSASLEQTSQQILLNADSMRVALDEGTEGFRQSVTQTQQAFASMAHDVSNSSETLTSTLGETITEMKQSGEEFLKSLESHSKKLHRNMEQNTTNVIDMFSKTGEKINHQLSSNADNMFDSIQTSFDKASAGLTSQVRESIEKFALSINEQLHAFEQATEREMNREMQSLGNALLSISKGFVGNYEKLIKDYQIIMGQLQALISANKHRG

SEQ ID NO: 5348 - protein, 235 aa, Escherichia coli ONT:H33 str. C48/93; identical to SEQ ID NO: 4796

SEQ ID NO: 5349 - protein, 367 aa, Escherichia coli ONT:H33 str. C48/93
MKLSIDISELIQLGKKMLPEGVNFFLDESPIDFDPIDIELSTGKEVSIEDLDPGSGLISYHGRQVLLYIRDHSGRYDAAIIDGEKGKRFHIAWCRTLDEMRHKNRFERYHATNRIDGLFEIDDGSGRSQDVDLRVCMNCLERLNYKGSIDKQRKREIFKSFSLNEFFSDYSTCFRHMPKGIYDKTNSGYVENWKDISKSIREKAKYTCNDCGVNLSTAKNLCHVHHKNGIKYDNHHENLLVLCKDCHRKQPLHEGIFVTQAEMAIIQRLRSQQGLLKAESWNEIYDLTDPSVHGDINMMQHKGFQPPVPGLDLQNSEHEIIATVEAAWPGLKIAVNLTPAEVEGWRIYTVGELVKEIQTGAFTSATL

SEQ ID NO: 5350 - protein, 550 aa, Escherichia coli O127:H27 str. C43/90; identical to SEQ ID NO: 4900

SEQ ID NO: 5351 - protein, 235 aa, Escherichia coli O127:H27 str. C43/90; identical to SEQ ID NO: 4796

SEQ ID NO: 5352 - protein, 367 aa, Escherichia coli O127:H27 str. C43/90; identical to SEQ ID NO: 4821

SEQ ID NO: 5353 - protein, 550 aa, Escherichia coli KTE66
MLAQLFEQLFKTTEALLITNFFIWVVISVFLFALWCDKRNIHSEFREYAPTLMGALGILGTFTGIIIGLLNFNTESIDTSIPVLLDGLKTAFITSIVGMFFAILFNGMDVFFFANKRTELAENTPGSVTPEHIYRELKEQNQTLDKLVSGINGDGEGSLIAQIKLLRTEINDVSQEQLDSHSHFSNKLWEQLQQFADLMAKGATEQIIDALRQVIIDFNENLTEQFGENFKALDASVKKLVEWQGNYKTQVEQMSEQYQQCVESLVETKTAVAGIWEECNFIPLAMSSLREVLQVNQHQISELSRHLETFAAIRDRAITVLPEIQNKMAEVGELLKSGAANVSASLEQTSQQILLNADSMRVALDEGTEGFRQSVTQTQQAFASMAHDVSNSSETLTSTLGETITEMKQSGEEFLKSLESHSKELHRNMEQNTTNVIDMFSKTGEKINHQLSSHADNMFDSIQTSFDKASAGLTSQVREAIEKFALSINEQLHAFEQATEREMNREMQSLGNALLSISKGFVNNYEKLIKDYQIVMGQLQTLISANKHRG

SEQ ID NO: 5354 - protein, 235 aa, Escherichia coli KTE66
MDKIIGKQLSPKKQDNEHWVSMSDLMAGLMMVFMFISVAYMHYVRIEKERIKEVAVAYENAQLQLYNALDIEFAKDLQDWDAEIDKQTLEVRFKSPDVLFGLGSTELKPKFKLILDDFFPRYLKVLDNYQEHITEVRIEGHTSTDWTGTTNPDIAYFNNMALSQDRTRAVLQYVYDIKNIATHQQWVKSKFAAVGYSSAHPILDKTGKEDPNRSRRVTFKVVTNAELQIRKIIQE

SEQ ID NO: 5355 - protein, 365 aa, Escherichia coli KTE66
MKLSIDISELIQLGKKMLPEGVDFFLDESPIDFDPIDIELSTGKEVSIEDLDPGSGLISYHGRQVLLYIRDHSGRYDAAIVDGEKGKRFHIAWCRTLDEMRHKNRFERYHATNRIDGLFEIDDGSGRSHDVDLRVCMNCLERLNYKGSIDKQRKREIFKSFSLNEFFSDYSTCFRHMPKGIYDKTNSGYVENWKEISKSIREKTKYTCNDCGVNLSTAKNLCHVHHKNGIKYDNHHENLLVLCKDCHRKQPLHEGIFVTQAEMAIIQRLRSQQGLLKAESWNEIYDLTDPSVHGDINMMQHKGFQLPVLGLELQNSEHKVIATVEAAWPGLKIAVNLIPAKVEGWKIYTAGELIKDIQSDIFTAV

SEQ ID NO: 5356 - protein, 550 aa, Escherichia coli KTE161; identical to SEQ ID NO: 4804

SEQ ID NO: 5357 - protein, 235 aa, Escherichia coli KTE161; identical to SEQ ID NO: 5273

SEQ ID NO: 5358 - protein, 367 aa, Escherichia coli KTE161; identical to SEQ ID NO: 5274

SEQ ID NO: 5359 - protein, 550 aa, Escherichia coli KTE50; identical to SEQ ID NO: 4804

SEQ ID NO: 5360 - protein, 235 aa, Escherichia coli KTE50; identical to SEQ ID NO: 5273

SEQ ID NO: 5361 - protein, 367 aa, Escherichia coli KTE50; identical to SEQ ID NO: 5274

SEQ ID NO: 5362 - protein, 550 aa, Escherichia coli KTE202; identical to SEQ ID NO: 4804

SEQ ID NO: 5363 - protein, 235 aa, Escherichia coli KTE202; identical to SEQ ID NO: 5273

SEQ ID NO: 5364 - protein, 367 aa, Escherichia coli KTE202; identical to SEQ ID NO: 5274

SEQ ID NO: 5365 - protein, 550 aa, Escherichia coli P0304799.3
MLAQFFEQLFQSIDSTLITNIFIWAVIFVFLSAWWCDKKNIHSKFREYAPTLMGALGILGTFIGIIIGLLNFNTESIDTSIPVLLGGLKTAFITSIVGMFFAILFNGMDAFFFANKRSALAENNPESVTPEHIYHELKEQNQALTKLVSGINGDSEGSLIAQIKLLRTEISDSSQAQLANHTYFSNKLWEQLEQFADLMAKGATEQIIDALRQVIIDFNDNLTEQFGENFKALDASVKKLVEWQENYKMQVEQMSEQYQQSVESLVETKTAVAGIWEECKEIPLAMSELREVLQVNQHQISELSRHLETFVAIRDKATTVLPEIQNKMAEVGELLKSGAANVSASLEQTSQQILLNADSMRVALDEGTEGFRQSVTQTQQAFASMAHDVSNSSETLTSTLGETITEMKQSGEEFLKSLESHSKELHRNMEQNTTNVIDMFSKTGEKINHQLSSNADNMFDSIQTSFDKASAGLASQVRESIEKFALSINEQLHAFEQATEREMNREMQSLGNALLSISKGFVGNYEKLIKDYQIVMGQLQALISANKHRG

SEQ ID NO: 5366 - protein, 206 aa, Escherichia coli P0304799.3
MMVFMFISIAYMHYVRIEKEKIKEVAVAYENAQLQLYNALNIEFAKDLQDWDAEIDKQTLEVRFKSPDVLFGLGSTELKPKFKLILDDFFPRYLKVLDNYQEHITEVRIEGHTSTDWTGTTNPDIAYFNNMALSQGRTRSVLQYVYDIKNIATHQQWVKSKFAAVGYSSAHPILDKTGKEDPNRSRRVTFKVVTNAELQIRKIIQE

SEQ ID NO: 5367 - protein, 172 aa, Escherichia coli P0304799.3
MKLSIDISELIQLGKKMLPEGGDFFLDESPVDFEPIDIELSSGKEVSIAELDPGSSLISYHGRQVLLYIRDHSGRYDAAIMDGEKGKRFHIAWCRTLDEMRQKNRFERYHATNRIDGLFEIDDGSGRSQDTDLRVCMNCLERLNYKGSIDRQKRRGVFNSFSLKEFFSDYST

SEQ ID NO: 5368 - protein, 550 aa, Escherichia coli HVH 43 (4-2173468); identical to SEQ ID NO: 4804

SEQ ID NO: 5369 - protein, 235 aa, Escherichia coli HVH 43 (4-2173468); identical to SEQ ID NO: 5273

SEQ ID NO: 5370 - protein, 367 aa, Escherichia coli HVH 43 (4-2173468); identical to SEQ ID NO: 5274

SEQ ID NO: 5371 - protein, 550 aa, Escherichia coli HVH 44 (4-2298570); identical to SEQ ID NO: 4804

SEQ ID NO: 5372 - protein, 235 aa, Escherichia coli HVH 44 (4-2298570); identical to SEQ ID NO: 5273

SEQ ID NO: 5373 - protein, 367 aa, Escherichia coli HVH 44 (4-2298570); identical to SEQ ID NO: 5274

SEQ ID NO: 5374 - protein, 550 aa, Escherichia coli HVH 182 (4-0985554); identical to SEQ ID NO: 4804

SEQ ID NO: 5375 - protein, 235 aa, Escherichia coli HVH 182 (4-0985554); identical to SEQ ID NO: 5273

SEQ ID NO: 5376 - protein, 367 aa, Escherichia coli HVH 182 (4-0985554); identical to SEQ ID NO: 5274

SEQ ID NO: 5377 - protein, 550 aa, Escherichia coli HVH 193 (4-3331423)
MLAQLFEQLFQSIDSTLITNIFIWAVIFVFLSAWWCDKKNIHSKFREYAPTLMGALGILGTFIGIIIGLLNFNTESIDTSIPVLLGGLKTAFITSIVGMFFAILFNGMDAFFFANKRSALAENNPESVTPEHIYHELKEQNQTLTKLVSGINGDSEGSLIAQIKLLRTEISDSSQAQLANHTHFSNKLWEQLEQFADLMAKGATEQIIDALRQVIIDFNENLTEQFGENFKALDASVKKLVEWQGNYKTQVEQMSEQYQQSVDSLVETKTAVAGIWEECKEIPLAMSELREVLQVNQHQISELSRHLETFVAIRDKATTVLPEIQNKMAEVGELLKSGAANVSASLEQTSQQILLNADSMRVALDEGTEGFRQSVTQTQQAFASMAHDVSNSSETLTSTLGETITEMKQSGEEFLKSLESHSKELHRNMEQNTTNVIDMFSKTGEKINHQLSSNADNMFDSIQTSFDKASAGLTSQVRESIEKFALSINEQLHAFEQATEREMNREMQSLGNALLSISKGFVGNYEKLIKDYQIVMGQLQALISANKHRG

SEQ ID NO: 5378 - protein, 235 aa, Escherichia coli HVH 193 (4-3331423)
MDKIIGKQLPKKDQDNEHWVSMSDLMTGLMMVFMFISIAYMHYVRIEKEKIKEVAVAYENAQLQLYNALDIEFAKDLQDWDAEIDKQTLEVRFKSPDVLFGLGSTELKPKFKLILDDFFPRYLKVLDNYQEHITEVRIEGHTSTDWTGTTNPDIAYFNNMALSQGRTHAVLQYVYDIKNIATHQQWVKSKFAAVGYSSAHPILDKTGKEDPNRSRRVTFKVVTNAELQIRKIIQE

SEQ ID NO: 5379 - protein, 367 aa, Escherichia coli HVH 193 (4-3331423)
MKLSIDISELIQLGKKMLPEGVDFFLDESPIDFDPIDIELSTGKEVSIEDLDPGSGLISYHGRQVLLYIRDHSGRYDAAIVDGEKGKRFHIAWCRTLDEMRHKNRFERYHATNRIDGLFEIDDGSGRSQDVDLRVCMNCLERLNYKGSIDKQRKREIFKSFSLNEFFSDYSTCFRHMPKGIYDKTNSGYVENWKKISKEIREKTNYVCNDCGVNLSTAKNLCHVHHKNGIKYDNHHENLLVLCKDCHRKQPLHEGIFVTQAEMAIIQRLRSQQGLLKAESWNEIYDLTDPSVHGDINMMQHKGFQPPVPGLDLQNSEHEIIATVEAAWPGLKIAVNLTPTEVEGWRIYTVGELVKEIQTGAFTPATL

SEQ ID NO: 5380 - protein, 550 aa, Escherichia coli UMEA 3144-1; identical to SEQ ID NO: 4804

SEQ ID NO: 5381 - protein, 235 aa, Escherichia coli UMEA 3144-1; identical to SEQ ID NO: 5273

SEQ ID NO: 5382 - protein, 367 aa, Escherichia coli UMEA 3144-1; identical to SEQ ID NO: 5274

SEQ ID NO: 5383 - protein, 550 aa, Escherichia coli UMEA 3151-1; identical to SEQ ID NO: 4801

SEQ ID NO: 5384 - protein, 235 aa, Escherichia coli UMEA 3151-1; identical to SEQ ID NO: 4796

SEQ ID NO: 5385 - protein, 367 aa, Escherichia coli UMEA 3151-1; identical to SEQ ID NO: 4803

SEQ ID NO: 5386 - protein, 550 aa, Escherichia coli B26-2; identical to SEQ ID NO: 4795

SEQ ID NO: 5387 - protein, 206 aa, Escherichia coli B26-2; identical to SEQ ID NO: 4874

SEQ ID NO: 5388 - protein, 367 aa, Escherichia coli B26-2; identical to SEQ ID NO: 4797

SEQ ID NO: 5389 - protein, 550 aa, Escherichia coli 09BKT076207; identical to SEQ ID NO: 4795

SEQ ID NO: 5390 - protein, 210 aa, Escherichia coli 09BKT076207; identical to SEQ ID NO: 4886

SEQ ID NO: 5391 - protein, 367 aa, Escherichia coli 09BKT076207; identical to SEQ ID NO: 4797

SEQ ID NO: 5392 - protein, 550 aa, Escherichia coli B102; identical to SEQ ID NO: 4795

SEQ ID NO: 5393 - protein, 210 aa, Escherichia coli B102; identical to SEQ ID NO: 4886

SEQ ID NO: 5394 - protein, 367 aa, Escherichia coli B102; identical to SEQ ID NO: 4797

SEQ ID NO: 5395 - protein, 550 aa, Escherichia coli B29-1; identical to SEQ ID NO: 4795

SEQ ID NO: 5396 - protein, 202 aa, Escherichia coli B29-1; identical to SEQ ID NO: 4913

SEQ ID NO: 5397 - protein, 367 aa, Escherichia coli B29-1; identical to SEQ ID NO: 4797

SEQ ID NO: 5398 - protein, 550 aa, Escherichia coli B107; identical to SEQ ID NO: 4795

SEQ ID NO: 5399 - protein, 205 aa, Escherichia coli B107; identical to SEQ ID NO: 4946

SEQ ID NO: 5400 - protein, 367 aa, Escherichia coli B107; identical to SEQ ID NO: 4797

SEQ ID NO: 5401 - protein, 550 aa, Escherichia coli B26-1; identical to SEQ ID NO: 4795

SEQ ID NO: 5402 - protein, 205 aa, Escherichia coli B26-1; identical to SEQ ID NO: 4946

SEQ ID NO: 5403 - protein, 367 aa, Escherichia coli B26-1; identical to SEQ ID NO: 4797

SEQ ID NO: 5404 - protein, 550 aa, Escherichia coli B28-1; identical to SEQ ID NO: 4795

SEQ ID NO: 5405 - protein, 210 aa, Escherichia coli B28-1; identical to SEQ ID NO: 4886

SEQ ID NO: 5406 - protein, 367 aa, Escherichia coli B28-1; identical to SEQ ID NO: 4797

SEQ ID NO: 5407 - protein, 550 aa, Escherichia coli B36-2; identical to SEQ ID NO: 4795

SEQ ID NO: 5408 - protein, 210 aa, Escherichia coli B36-2; identical to SEQ ID NO: 4886

SEQ ID NO: 5409 - protein, 367 aa, Escherichia coli B36-2; identical to SEQ ID NO: 4797

SEQ ID NO: 5410 - protein, 550 aa, Escherichia coli B7-1; identical to SEQ ID NO: 4795

SEQ ID NO: 5411 - protein, 205 aa, Escherichia coli B7-1; identical to SEQ ID NO: 4946

SEQ ID NO: 5412 - protein, 367 aa, Escherichia coli B7-1; identical to SEQ ID NO: 4797

SEQ ID NO: 5413 - protein, 550 aa, Escherichia coli B29-2; identical to SEQ ID NO: 4795

SEQ ID NO: 5414 - protein, 210 aa, Escherichia coli B29-2; identical to SEQ ID NO: 4886

SEQ ID NO: 5415 - protein, 367 aa, Escherichia coli B29-2; identical to SEQ ID NO: 4797

SEQ ID NO: 5416 - protein, 550 aa, Escherichia coli B36-1; identical to SEQ ID NO: 4795

SEQ ID NO: 5417 - protein, 206 aa, Escherichia coli B36-1; identical to SEQ ID NO: 4874

SEQ ID NO: 5418 - protein, 367 aa, Escherichia coli B36-1; identical to SEQ ID NO: 4797

SEQ ID NO: 5419 - protein, 550 aa, Escherichia coli T1282_01; identical to SEQ ID NO: 4795

SEQ ID NO: 5420 - protein, 210 aa, Escherichia coli T1282_01; identical to SEQ ID NO: 4886

SEQ ID NO: 5421 - protein, 367 aa, Escherichia coli T1282_01; identical to SEQ ID NO: 4797

SEQ ID NO: 5422 - protein, 550 aa, Escherichia coli T924_01; identical to SEQ ID NO: 4795

SEQ ID NO: 5423 - protein, 235 aa, Escherichia coli T924_01; identical to SEQ ID NO: 4796

SEQ ID NO: 5424 - protein, 367 aa, Escherichia coli T924_01; identical to SEQ ID NO: 4797

SEQ ID NO: 5425 - protein, 550 aa, Escherichia coli B15; identical to SEQ ID NO: 4795

SEQ ID NO: 5426 - protein, 210 aa, Escherichia coli B15; identical to SEQ ID NO: 4886

SEQ ID NO: 5427 - protein, 367 aa, Escherichia coli B15; identical to SEQ ID NO: 4797

SEQ ID NO: 5428 - protein, 550 aa, Escherichia coli 14A; identical to SEQ ID NO: 4795

SEQ ID NO: 5429 - protein, 206 aa, Escherichia coli 14A; identical to SEQ ID NO: 4874

SEQ ID NO: 5430 - protein, 367 aa, Escherichia coli 14A; identical to SEQ ID NO: 4797

SEQ ID NO: 5431 - protein, 550 aa, Escherichia coli 2886-75; identical to SEQ ID NO: 4795

SEQ ID NO: 5432 - protein, 210 aa, Escherichia coli 2886-75; identical to SEQ ID NO: 4886

SEQ ID NO: 5433 - protein, 367 aa, Escherichia coli 2886-75; identical to SEQ ID NO: 4797

SEQ ID NO: 5434 - protein, 550 aa, Escherichia coli T1840_97; identical to SEQ ID NO: 4795

SEQ ID NO: 5435 - protein, 210 aa, Escherichia coli T1840_97; identical to SEQ ID NO: 4886

SEQ ID NO: 5436 - protein, 367 aa, Escherichia coli T1840_97; identical to SEQ ID NO: 4797

SEQ ID NO: 5437 - protein, 550 aa, Escherichia coli 08BKT055439; identical to SEQ ID NO: 4795

SEQ ID NO: 5438 - protein, 202 aa, Escherichia coli 08BKT055439; identical to SEQ ID NO: 4913

SEQ ID NO: 5439 - protein, 367 aa, Escherichia coli 08BKT055439; identical to SEQ ID NO: 4797

SEQ ID NO: 5440 - protein, 550 aa, Escherichia coli 08BKT77219; identical to SEQ ID NO: 4795

SEQ ID NO: 5441 - protein, 210 aa, Escherichia coli 08BKT77219; identical to SEQ ID NO: 4886

SEQ ID NO: 5442 - protein, 367 aa, Escherichia coli 08BKT77219; identical to SEQ ID NO: 4797

SEQ ID NO: 5443 - protein, 550 aa, Escherichia coli 09BKT024447; identical to SEQ ID NO: 4795

SEQ ID NO: 5444 - protein, 202 aa, Escherichia coli 09BKT024447; identical to SEQ ID NO: 4913

SEQ ID NO: 5445 - protein, 367 aa, Escherichia coli 09BKT024447; identical to SEQ ID NO: 4797

SEQ ID NO: 5446 - protein, 550 aa, Escherichia coli Bd5610_99; identical to SEQ ID NO: 4795

SEQ ID NO: 5447 - protein, 235 aa, Escherichia coli Bd5610_99; identical to SEQ ID NO: 4796

SEQ ID NO: 5448 - protein, 367 aa, Escherichia coli Bd5610_99; identical to SEQ ID NO: 4797

SEQ ID NO: 5449 - protein, 550 aa, Escherichia coli T234_00; identical to SEQ ID NO: 4795

SEQ ID NO: 5450 - protein, 210 aa, Escherichia coli T234_00; identical to SEQ ID NO: 4886

SEQ ID NO: 5451 - protein, 367 aa, Escherichia coli T234_00; identical to SEQ ID NO: 4797

SEQ ID NO: 5452 - protein, 550 aa, Escherichia coli B7-2; identical to SEQ ID NO: 4795

SEQ ID NO: 5453 - protein, 206 aa, Escherichia coli B7-2; identical to SEQ ID NO: 4874

SEQ ID NO: 5454 - protein, 367 aa, Escherichia coli B7-2; identical to SEQ ID NO: 4797

SEQ ID NO: 5455 - protein, 550 aa, Escherichia coli B93; identical to SEQ ID NO: 4795

SEQ ID NO: 5456 - protein, 210 aa, Escherichia coli B93; identical to SEQ ID NO: 4886

SEQ ID NO: 5457 - protein, 367 aa, Escherichia coli B93; identical to SEQ ID NO: 4797

SEQ ID NO: 5458 - protein, 550 aa, Escherichia coli B94; identical to SEQ ID NO: 4795

SEQ ID NO: 5459 - protein, 206 aa, Escherichia coli B94; identical to SEQ ID NO: 4874

SEQ ID NO: 5460 - protein, 367 aa, Escherichia coli B94; identical to SEQ ID NO: 4797

SEQ ID NO: 5461 - protein, 550 aa, Escherichia coli B95; identical to SEQ ID NO: 4795

SEQ ID NO: 5462 - protein, 210 aa, Escherichia coli B95; identical to SEQ ID NO: 4886

SEQ ID NO: 5463 - protein, 367 aa, Escherichia coli B95; identical to SEQ ID NO: 4797

SEQ ID NO: 5464 - protein, 550 aa, Escherichia coli B103; identical to SEQ ID NO: 4795

SEQ ID NO: 5465 - protein, 206 aa, Escherichia coli B103; identical to SEQ ID NO: 4874

SEQ ID NO: 5466 - protein, 367 aa, Escherichia coli B103; identical to SEQ ID NO: 4797

SEQ ID NO: 5467 - protein, 550 aa, Escherichia coli B104; identical to SEQ ID NO: 4795

SEQ ID NO: 5468 - protein, 210 aa, Escherichia coli B104; identical to SEQ ID NO: 4886

SEQ ID NO: 5469 - protein, 367 aa, Escherichia coli B104; identical to SEQ ID NO: 4797

SEQ ID NO: 5470 - protein, 550 aa, Escherichia coli B105; identical to SEQ ID NO: 4795

SEQ ID NO: 5471 - protein, 206 aa, Escherichia coli B105; identical to SEQ ID NO: 4874

SEQ ID NO: 5472 - protein, 367 aa, Escherichia coli B105; identical to SEQ ID NO: 4797

SEQ ID NO: 5473 - protein, 550 aa, Escherichia coli B106; identical to SEQ ID NO: 4795

SEQ ID NO: 5474 - protein, 210 aa, Escherichia coli B106; identical to SEQ ID NO: 4886

SEQ ID NO: 5475 - protein, 367 aa, Escherichia coli B106; identical to SEQ ID NO: 4797

SEQ ID NO: 5476 - protein, 550 aa, Escherichia coli B108; identical to SEQ ID NO: 4795

SEQ ID NO: 5477 - protein, 210 aa, Escherichia coli B108; identical to SEQ ID NO: 4886

SEQ ID NO: 5478 - protein, 367 aa, Escherichia coli B108; identical to SEQ ID NO: 4797

SEQ ID NO: 5479 - protein, 550 aa, Escherichia coli B109; identical to SEQ ID NO: 4795

SEQ ID NO: 5480 - protein, 214 aa, Escherichia coli B109
MSDLMAGLMMVFMFISIAYMHYVRIEKEKIKEVAVAYENAQLQLYNALDIEFAKDLQDWDAEIDKQTLEVRFKSPDVLFGLGSTELKPKFKLILDDFFPRYLKVLDNYQEHITEVRIEGHTSTDWTGTTNPDIAYFNNMALSQGRTRAVLQYVYDIKNIATHQQWVKSKFAAVGYSSAHPILDKTGKEDPNRSRRVTFKVVTNAELQIRKIIQE

SEQ ID NO: 5481 - protein, 367 aa, Escherichia coli B109; identical to SEQ ID NO: 4797

SEQ ID NO: 5482 - protein, 550 aa, Escherichia coli B112; identical to SEQ ID NO: 4795

SEQ ID NO: 5483 - protein, 210 aa, Escherichia coli B112; identical to SEQ ID NO: 4886

SEQ ID NO: 5484 - protein, 367 aa, Escherichia coli B112; identical to SEQ ID NO: 4797

SEQ ID NO: 5485 - protein, 498 aa, Escherichia coli B113; identical to SEQ ID NO: 4867

SEQ ID NO: 5486 - protein, 210 aa, Escherichia coli B113; identical to SEQ ID NO: 4886

SEQ ID NO: 5487 - protein, 367 aa, Escherichia coli B113; identical to SEQ ID NO: 4797

SEQ ID NO: 5488 - protein, 550 aa, Escherichia coli B114; identical to SEQ ID NO: 4795

SEQ ID NO: 5489 - protein, 210 aa, Escherichia coli B114; identical to SEQ ID NO: 4886

SEQ ID NO: 5490 - protein, 367 aa, Escherichia coli B114; identical to SEQ ID NO: 4797

SEQ ID NO: 5491 - protein, 550 aa, Escherichia coli B17; identical to SEQ ID NO: 4795

SEQ ID NO: 5492 - protein, 210 aa, Escherichia coli B17; identical to SEQ ID NO: 4886

SEQ ID NO: 5493 - protein, 367 aa, Escherichia coli B17; identical to SEQ ID NO: 4797

SEQ ID NO: 5494 - protein, 550 aa, Escherichia coli B40-1; identical to SEQ ID NO: 4795

SEQ ID NO: 5495 - protein, 205 aa, Escherichia coli B40-1; identical to SEQ ID NO: 4946

SEQ ID NO: 5496 - protein, 367 aa, Escherichia coli B40-1; identical to SEQ ID NO: 4797

SEQ ID NO: 5497 - protein, 550 aa, Escherichia coli B40-2; identical to SEQ ID NO: 4795

SEQ ID NO: 5498 - protein, 202 aa, Escherichia coli B40-2; identical to SEQ ID NO: 4913

SEQ ID NO: 5499 - protein, 367 aa, Escherichia coli B40-2; identical to SEQ ID NO: 4797

SEQ ID NO: 5500 - protein, 498 aa, Escherichia coli B49-2; identical to SEQ ID NO: 4867

SEQ ID NO: 5501 - protein, 210 aa, Escherichia coli B49-2; identical to SEQ ID NO: 4886

SEQ ID NO: 5502 - protein, 367 aa, Escherichia coli B49-2; identical to SEQ ID NO: 4797

SEQ ID NO: 5503 - protein, 550 aa, Escherichia coli B5-2; identical to SEQ ID NO: 4795

SEQ ID NO: 5504 - protein, 206 aa, Escherichia coli B5-2; identical to SEQ ID NO: 4874

SEQ ID NO: 5505 - protein, 367 aa, Escherichia coli B5-2; identical to SEQ ID NO: 4797

SEQ ID NO: 5506 - protein, 550 aa, Escherichia coli B83; identical to SEQ ID NO: 4795

SEQ ID NO: 5507 - protein, 210 aa, Escherichia coli B83; identical to SEQ ID NO: 4886

SEQ ID NO: 5508 - protein, 367 aa, Escherichia coli B83; identical to SEQ ID NO: 4797

SEQ ID NO: 5509 - protein, 550 aa, Escherichia coli B84; identical to SEQ ID NO: 4795

SEQ ID NO: 5510 - protein, 210 aa, Escherichia coli B84; identical to SEQ ID NO: 4886

SEQ ID NO: 5511 - protein, 367 aa, Escherichia coli B84; identical to SEQ ID NO: 4797

SEQ ID NO: 5512 - protein, 550 aa, Escherichia coli B85; identical to SEQ ID NO: 4795

SEQ ID NO: 5513 - protein, 210 aa, Escherichia coli B85; identical to SEQ ID NO: 4886

SEQ ID NO: 5514 - protein, 367 aa, Escherichia coli B85; identical to SEQ ID NO: 4797

SEQ ID NO: 5515 - protein, 498 aa, Escherichia coli B86; identical to SEQ ID NO: 4867

SEQ ID NO: 5516 - protein, 205 aa, Escherichia coli B86; identical to SEQ ID NO: 4946

SEQ ID NO: 5517 - protein, 367 aa, Escherichia coli B86; identical to SEQ ID NO: 4797

SEQ ID NO: 5518 - protein, 550 aa, Escherichia coli B89; identical to SEQ ID NO: 4795

SEQ ID NO: 5519 - protein, 210 aa, Escherichia coli B89; identical to SEQ ID NO: 4886

SEQ ID NO: 5520 - protein, 367 aa, Escherichia coli B89; identical to SEQ ID NO: 4797

SEQ ID NO: 5521 - protein, 550 aa, Escherichia coli B90; identical to SEQ ID NO: 4795

SEQ ID NO: 5522 - protein, 210 aa, Escherichia coli B90; identical to SEQ ID NO: 4886

SEQ ID NO: 5523 - protein, 367 aa, Escherichia coli B90; identical to SEQ ID NO: 4797

SEQ ID NO: 5524 - protein, 550 aa, Escherichia coli Tx1686; identical to SEQ ID NO: 4795

SEQ ID NO: 5525 - protein, 210 aa, Escherichia coli Tx1686; identical to SEQ ID NO: 4886

SEQ ID NO: 5526 - protein, 367 aa, Escherichia coli Tx1686; identical to SEQ ID NO: 4797

SEQ ID NO: 5527 - protein, 550 aa, Escherichia coli Tx3800; identical to SEQ ID NO: 4795

SEQ ID NO: 5528 - protein, 202 aa, Escherichia coli Tx3800; identical to SEQ ID NO: 4913

SEQ ID NO: 5529 - protein, 367 aa, Escherichia coli Tx3800; identical to SEQ ID NO: 4797

SEQ ID NO: 5530 - protein, 550 aa, Escherichia coli ATCC 35150
MLAQLFEQLFQSIDSTLITNIFIWAVIFVFLSAWWCDKKNIHSKFREYAPTLMGALGILGTFIGIIIGLLNFNTESIDTSIPVLLGGLKTAFITSIVGMFFAILFNGMDAFFFANKRSALAENNPESVTPEHIYHELKEQNQTLTKLVSGINGDSEGSLIAQIKLLRTDISDSSQAQLANHTHFSNKLWEQLEQFADLMAKGATEQIIDALRQVIIDFNQNLTEQFGENFKALDASVKKLVEWQGNYKTQIEQMSEQYQQSVESLVETKTAVAGIWEECKEIPLAMSELREVLQVNQHQISELSRHLETFVAIRDKATTVLPEIQNKMAEVGELLKSGAANVSASLEQTSQQILLNADSMRVALDEGTEGFRQSVTQTQQAFASMAHDVSNSSETLTSTLGETITEMKQSGEEFLKSLESHSKELHRNMEQNTTNVIDMFSKTGEKINHQLSSNADNMFDSIQTSFDKASAGLTSQVRESIEKFALSINEQLHAFEQATEREMNREMQSLGNALLSISKGFVGNYEKLIKDYQIVMGQLQALISANKHRG

SEQ ID NO: 5531 - protein, 235 aa, Escherichia coli ATCC 35150; identical to SEQ ID NO: 4796

SEQ ID NO: 5532 - protein, 367 aa, Escherichia coli ATCC 35150; identical to SEQ ID NO: 4821

SEQ ID NO: 5533 - protein, 550 aa, Escherichia coli B28-2; identical to SEQ ID NO: 4795

SEQ ID NO: 5534 - protein, 206 aa, Escherichia coli B28-2; identical to SEQ ID NO: 4874

SEQ ID NO: 5535 - protein, 367 aa, Escherichia coli B28-2; identical to SEQ ID NO: 4797

SEQ ID NO: 5536 - protein, 550 aa, Escherichia coli 907672; identical to SEQ ID NO: 4804

SEQ ID NO: 5537 - protein, 235 aa, Escherichia coli 907672; identical to SEQ ID NO: 4796

SEQ ID NO: 5538 - protein, 367 aa, Escherichia coli 907672; identical to SEQ ID NO: 4806

SEQ ID NO: 5539 - protein, 550 aa, Escherichia coli BIDMC 39; identical to SEQ ID NO: 4801

SEQ ID NO: 5540 - protein, 235 aa, Escherichia coli BIDMC 39; identical to SEQ ID NO: 4796

SEQ ID NO: 5541 - protein, 367 aa, Escherichia coli BIDMC 39; identical to SEQ ID NO: 4803

SEQ ID NO: 5542 - protein, 550 aa, Escherichia coli HVH 136 (4-5970458); identical to SEQ ID NO: 4804

SEQ ID NO: 5543 - protein, 235 aa, Escherichia coli HVH 136 (4-5970458); identical to SEQ ID NO: 5273

SEQ ID NO: 5544 - protein, 367 aa, Escherichia coli HVH 136 (4-5970458); identical to SEQ ID NO: 5274

SEQ ID NO: 5545 - protein, 550 aa, Escherichia coli ATCC BAA-2192; identical to SEQ ID NO: 4795

SEQ ID NO: 5546 - protein, 235 aa, Escherichia coli ATCC BAA-2192; identical to SEQ ID NO: 4796

SEQ ID NO: 5547 - protein, 367 aa, Escherichia coli ATCC BAA-2192; identical to SEQ ID NO: 4797

SEQ ID NO: 5548 - protein, 550 aa, Escherichia coli P4-96; identical to SEQ ID NO: 4819

SEQ ID NO: 5549 - protein, 55 aa, Escherichia coli P4-96
MDKIIGKQLPKKDQDNEHWVSMSDLMAGLMMVFMFISIAYMHYVRIEKEKLKKLP

SEQ ID NO: 5550 - protein, 367 aa, Escherichia coli P4-96; identical to SEQ ID NO: 4821

SEQ ID NO: 5551 - protein, 550 aa, Escherichia coli P4-NR; identical to SEQ ID NO: 4819

SEQ ID NO: 5552 - protein, 235 aa, Escherichia coli P4-NR; identical to SEQ ID NO: 4820

SEQ ID NO: 5553 - protein, 367 aa, Escherichia coli P4-NR; identical to SEQ ID NO: 4821

SEQ ID NO: 5554 - protein, 498 aa, Escherichia coli O145:H28 str. RM13514
MGALGILGTFIGIIIGLLNFNTESIDTSIPVLLGGLKTAFITSIVGMFFAILFNGMDAFFFANKRSALAENNPESVTPEHIYHELKEQNQTLTKLVSGINGDSEGSLIAQIKLLRTDISDSSQAQLANHTHFSNKLWEQLEQFADLMAKGATEQIIDALRQVIIDFNQNLTEQFGENFKALDASVKKLVEWQGNYKTQIEQMSEQYQQSVESLVETKTAVAGIWEECKEIPLAMSELREVLQVNQHQISELSRHLETFVAIRDKATTVLPEIQNKMAEVGELLKSGAANVSASLEQTSQQILLNADSMRVALDEGTEGFRQSVTQTQQAFASMAHDVSNSSETLTSTLGETITEMKQSGEEFLKSLESHSKELHRNMEQNTTNVIDMFSKTGEKINHQLSSNADNMFDSIQTSFDKASAGLTSQVRESIEKFALSINEQLHAFEQATEREMNREMQSLGNALLSISKGFVGNYEKLIKDYQIVMGQLQALISANKHRG

SEQ ID NO: 5555 - protein, 210 aa, Escherichia coli O145:H28 str. RM13514; identical to SEQ ID NO: 4886

SEQ ID NO: 5556 - protein, 367 aa, Escherichia coli O145:H28 str. RM13514; identical to SEQ ID NO: 4821

SEQ ID NO: 5557 - protein, 550 aa, Escherichia coli 1-110-08_S3_C1
MLAQLFEQLFQSIDSTLITNIFIWAVIFVFLSAWWCDKKNIHSKFREYAPTLMGALGILGTFIGIIIGLLNFNTESIDTSIPVLLGGLKTAFITSIVGMFFAILFNGMDAFFFANKRSALAENNPESVTPEHIYHELKEQNQTLTKLVSGINGDSEGSLIAQIKLLRTEISDSSQAQLANHTHFSNKLWEQLEQFADLMAKGATEQIIDALRQVIIDFNENLTEQFGENFKALDASVKKLVEWQENYKKQVELMSEQYQQSVESLVETKTAVAGIWEECKEIPLAMSELREVLQVNQHQISELSRHLETFVAIRDKATTVLPEIQNKMAEVGELLKSGAANVSASLEQTSQQILLNADSMRVALDEGTEGFRQSVTQTQQAFASMAHDVSNSSETLTSTLGETITEMKQSGEEFLKSLESHSKELHRNMEQNTTNVIDMFSKTGEKINHQLSSNADNMFDSIQTSFDKASAGLTSQVRESIEKFALSINEQLHAFEQATEREMNREMQSLGNALLSISKGFVGNYEKLIKDYQIIMGQLQALISANKHRG

SEQ ID NO: 5558 - protein, 235 aa, Escherichia coli 1-110-08_S3_C1; identical to SEQ ID NO: 5273

SEQ ID NO: 5559 - protein, 367 aa, Escherichia coli 1-110-08_S3_C1; identical to SEQ ID NO: 5274

SEQ ID NO: 5560 - protein, 550 aa, Escherichia coli 1-110-08_S3_C2; identical to SEQ ID NO: 4804

SEQ ID NO: 5561 - protein, 235 aa, Escherichia coli 1-110-08_S3_C2; identical to SEQ ID NO: 5273

SEQ ID NO: 5562 - protein, 367 aa, Escherichia coli 1-110-08_S3_C2; identical to SEQ ID NO: 5274

SEQ ID NO: 5563 - protein, 550 aa, Escherichia coli 1-110-08_S3_C3; identical to SEQ ID NO: 4804

SEQ ID NO: 5564 - protein, 210 aa, Escherichia coli 1-110-08_S3_C3
MAGLMMVFMFISIAYMHYVRIEKEKIKEVAVAYENAQLQLYNALDIEFAKDLQDWDAEIDKQTLEVRFKSPDVLFGLGSTELKPKFKLILDDFFPRYLKVLDNYQEHITEVRIEGHTSTDWTGTTNPDIAYFNNMALSQGRTRAVLQYVYDIKNIATHKQWVKSKFAAVGYSSAHPILDKTGKEDPNRSRRVTFKVVTNAELQIRKIIQE

SEQ ID NO: 5565 - protein, 367 aa, Escherichia coli 1-110-08_S3_C3; identical to SEQ ID NO: 5274

SEQ ID NO: 5566 - protein, 550 aa, Escherichia coli O157:H7 str. 2011EL-2288; identical to SEQ ID NO: 4795

SEQ ID NO: 5567 - protein, 210 aa, Escherichia coli O157:H7 str. 2011EL-2288; identical to SEQ ID NO: 4886

SEQ ID NO: 5568 - protein, 367 aa, Escherichia coli O157:H7 str. 2011EL-2288; identical to SEQ ID NO: 4797

SEQ ID NO: 5569 - protein, 550 aa, Escherichia coli O157:H7 str. 2011EL-2114; identical to SEQ ID NO: 4795

SEQ ID NO: 5570 - protein, 210 aa, Escherichia coli O157:H7 str. 2011EL-2114; identical to SEQ ID NO: 4886

SEQ ID NO: 5571 - protein, 367 aa, Escherichia coli O157:H7 str. 2011EL-2114; identical to SEQ ID NO: 4797

SEQ ID NO: 5572 - protein, 550 aa, Escherichia coli O157:H7 str. 2011EL-2286; identical to SEQ ID NO: 4795

SEQ ID NO: 5573 - protein, 210 aa, Escherichia coli O157:H7 str. 2011EL-2286; identical to SEQ ID NO: 4886

SEQ ID NO: 5574 - protein, 367 aa, Escherichia coli O157:H7 str. 2011EL-2286; identical to SEQ ID NO: 4797

SEQ ID NO: 5575 - protein, 550 aa, Escherichia coli O157:H7 str. 2011EL-2312; identical to SEQ ID NO: 4795

SEQ ID NO: 5576 - protein, 210 aa, Escherichia coli O157:H7 str. 2011EL-2312; identical to SEQ ID NO: 4886

SEQ ID NO: 5577 - protein, 367 aa, Escherichia coli O157:H7 str. 2011EL-2312
MKLSIDISELIQLGKKMLPEGVDFFLDESPIDFDPIDIELSTGKEVSIEDLDPGSGLISYHGRQVLLYIRDHSGRYDAAIVDGEKGKHFHIAWCRTLDEMRHKNRFERYHATNRIDGLFEIDDGSGRSQDVDLRVCMNCLERLNYKGSIDKQRKREIFKSFSLNEFFSDYSTCFRHMPKGIYDKTNSGYVENWKEISKEIREKANYVCNDCGVNLSTAKNLCHVHHKNGIKYDNHHENLLVLCKDCHRKQPLHEGIFVTQAEMAIIQRLRSQQGLLKAESWNEIYDLTDPSVHGDINMMQHKGFQPPVPGLDLPNSEHEIIATVEAAWPGLKIAVNLTPAEVEGWRIYTVGELVKEIQTGAFTPAKL

SEQ ID NO: 5578 - protein, 550 aa, Escherichia coli O157:H7 str. 2011EL-2287; identical to SEQ ID NO: 4795

SEQ ID NO: 5579 - protein, 210 aa, Escherichia coli O157:H7 str. 2011EL-2287; identical to SEQ ID NO: 4886

SEQ ID NO: 5580 - protein, 367 aa, Escherichia coli O157:H7 str. 2011EL-2287; identical to SEQ ID NO: 4797

SEQ ID NO: 5581 - protein, 550 aa, Escherichia coli O157:H7 str. 2011EL-2113; identical to SEQ ID NO: 4795

SEQ ID NO: 5582 - protein, 210 aa, Escherichia coli O157:H7 str. 2011EL-2113; identical to SEQ ID NO: 4886

SEQ ID NO: 5583 - protein, 367 aa, Escherichia coli O157:H7 str. 2011EL-2113; identical to SEQ ID NO: 4797

SEQ ID NO: 5584 - protein, 550 aa, Escherichia coli O157:H7 str. 2011EL-2289; identical to SEQ ID NO: 4795

SEQ ID NO: 5585 - protein, 210 aa, Escherichia coli O157:H7 str. 2011EL-2289; identical to SEQ ID NO: 4886

SEQ ID NO: 5586 - protein, 367 aa, Escherichia coli O157:H7 str. 2011EL-2289; identical to SEQ ID NO: 4797

SEQ ID NO: 5587 - protein, 550 aa, Escherichia coli O157:H7 str. F7350; identical to SEQ ID NO: 4795

SEQ ID NO: 5588 - protein, 210 aa, Escherichia coli O157:H7 str. F7350; identical to SEQ ID NO: 4886

SEQ ID NO: 5589 - protein, 367 aa, Escherichia coli O157:H7 str. F7350; identical to SEQ ID NO: 4797

SEQ ID NO: 5590 - protein, 550 aa, Escherichia coli O157:H7 str. 2010C-4979C1; identical to SEQ ID NO: 4795

SEQ ID NO: 5591 - protein, 210 aa, Escherichia coli O157:H7 str. 2010C-4979C1; identical to SEQ ID NO: 4886

SEQ ID NO: 5592 - protein, 367 aa, Escherichia coli O157:H7 str. 2010C-4979C1; identical to SEQ ID NO: 4803

SEQ ID NO: 5593 - protein, 550 aa, Escherichia coli O157:H7 str. 2009EL1705; identical to SEQ ID NO: 4795

SEQ ID NO: 5594 - protein, 210 aa, Escherichia coli O157:H7 str. 2009EL1705; identical to SEQ ID NO: 4886

SEQ ID NO: 5595 - protein, 367 aa, Escherichia coli O157:H7 str. 2009EL1705; identical to SEQ ID NO: 4797

SEQ ID NO: 5596 - protein, 550 aa, Escherichia coli O157:H7 str. 2009EL2109; identical to SEQ ID NO: 4795

SEQ ID NO: 5597 - protein, 210 aa, Escherichia coli O157:H7 str. 2009EL2109; identical to SEQ ID NO: 4886

SEQ ID NO: 5598 - protein, 367 aa, Escherichia coli O157:H7 str. 2009EL2109; identical to SEQ ID NO: 4797

SEQ ID NO: 5599 - protein, 550 aa, Escherichia coli O145:NM str. 2010C-3507; identical to SEQ ID NO: 5530

SEQ ID NO: 5600 - protein, 210 aa, Escherichia coli O145:NM str. 2010C-3507; identical to SEQ ID NO: 4886

SEQ ID NO: 5601 - protein, 367 aa, Escherichia coli O145:NM str. 2010C-3507; identical to SEQ ID NO: 4821

SEQ ID NO: 5602 - protein, 550 aa, Escherichia coli O145:NM str. 2010C-3509; identical to SEQ ID NO: 5530

SEQ ID NO: 5603 - protein, 210 aa, Escherichia coli O145:NM str. 2010C-3509; identical to SEQ ID NO: 4886

SEQ ID NO: 5604 - protein, 367 aa, Escherichia coli O145:NM str. 2010C-3509; identical to SEQ ID NO: 4821

SEQ ID NO: 5605 - protein, 550 aa, Escherichia coli O145:NM str. 2010C-3510; identical to SEQ ID NO: 5530

SEQ ID NO: 5606 - protein, 210 aa, Escherichia coli O145:NM str. 2010C-3510; identical to SEQ ID NO: 4886

SEQ ID NO: 5607 - protein, 367 aa, Escherichia coli O145:NM str. 2010C-3510; identical to SEQ ID NO: 4821

SEQ ID NO: 5608 - protein, 550 aa, Escherichia coli O145:NM str. 2010C-3511; identical to SEQ ID NO: 5530

SEQ ID NO: 5609 - protein, 210 aa, Escherichia coli O145:NM str. 2010C-3511; identical to SEQ ID NO: 4886

SEQ ID NO: 5610 - protein, 367 aa, Escherichia coli O145:NM str. 2010C-3511; identical to SEQ ID NO: 4821

SEQ ID NO: 5611 - protein, 550 aa, Escherichia coli O145:NM str. 2010C-3516; identical to SEQ ID NO: 5530

SEQ ID NO: 5612 - protein, 210 aa, Escherichia coli O145:NM str. 2010C-3516; identical to SEQ ID NO: 4886

SEQ ID NO: 5613 - protein, 367 aa, Escherichia coli O145:NM str. 2010C-3516; identical to SEQ ID NO: 4821

SEQ ID NO: 5614 - protein, 550 aa, Escherichia coli O145:NM str. 2010C-3517; identical to SEQ ID NO: 5530

SEQ ID NO: 5615 - protein, 210 aa, Escherichia coli O145:NM str. 2010C-3517; identical to SEQ ID NO: 4886

SEQ ID NO: 5616 - protein, 367 aa, Escherichia coli O145:NM str. 2010C-3517; identical to SEQ ID NO: 4821

SEQ ID NO: 5617 - protein, 550 aa, Escherichia coli O145:NM str. 2010C-3518; identical to SEQ ID NO: 5530

SEQ ID NO: 5618 - protein, 210 aa, Escherichia coli O145:NM str. 2010C-3518; identical to SEQ ID NO: 4886

SEQ ID NO: 5619 - protein, 367 aa, Escherichia coli O145:NM str. 2010C-3518; identical to SEQ ID NO: 4821

SEQ ID NO: 5620 - protein, 550 aa, Escherichia coli O145:NM str. 2010C-3521; identical to SEQ ID NO: 5530

SEQ ID NO: 5621 - protein, 210 aa, Escherichia coli O145:NM str. 2010C-3521; identical to SEQ ID NO: 4886

SEQ ID NO: 5622 - protein, 367 aa, Escherichia coli O145:NM str. 2010C-3521; identical to SEQ ID NO: 4821

SEQ ID NO: 5623 - protein, 550 aa, Escherichia coli O145:NM str. 2010C-3526; identical to SEQ ID NO: 5530

SEQ ID NO: 5624 - protein, 210 aa, Escherichia coli O145:NM str. 2010C-3526; identical to SEQ ID NO: 4886

SEQ ID NO: 5625 - protein, 367 aa, Escherichia coli O145:NM str. 2010C-3526; identical to SEQ ID NO: 4821

SEQ ID NO: 5626 - protein, 550 aa, Escherichia coli O157:H7 str. 2011EL-2101; identical to SEQ ID NO: 4795

SEQ ID NO: 5627 - protein, 210 aa, Escherichia coli O157:H7 str. 2011EL-2101; identical to SEQ ID NO: 4886

SEQ ID NO: 5628 - protein, 367 aa, Escherichia coli O157:H7 str. 2011EL-2101; identical to SEQ ID NO: 4797

SEQ ID NO: 5629 - protein, 550 aa, Escherichia coli O157:H7 str. 2011EL-2103; identical to SEQ ID NO: 4795

SEQ ID NO: 5630 - protein, 210 aa, Escherichia coli O157:H7 str. 2011EL-2103; identical to SEQ ID NO: 4886

SEQ ID NO: 5631 - protein, 367 aa, Escherichia coli O157:H7 str. 2011EL-2103; identical to SEQ ID NO: 4797

SEQ ID NO: 5632 - protein, 550 aa, Escherichia coli O157:H7 str. 2011EL-2104; identical to SEQ ID NO: 4795

SEQ ID NO: 5633 - protein, 210 aa, Escherichia coli O157:H7 str. 2011EL-2104; identical to SEQ ID NO: 4886

SEQ ID NO: 5634 - protein, 367 aa, Escherichia coli O157:H7 str. 2011EL-2104; identical to SEQ ID NO: 4797

SEQ ID NO: 5635 - protein, 550 aa, Escherichia coli O157:H7 str. 2011EL-2105; identical to SEQ ID NO: 4795

SEQ ID NO: 5636 - protein, 210 aa, Escherichia coli O157:H7 str. 2011EL-2105; identical to SEQ ID NO: 4886

SEQ ID NO: 5637 - protein, 367 aa, Escherichia coli O157:H7 str. 2011EL-2105; identical to SEQ ID NO: 4797

SEQ ID NO: 5638 - protein, 550 aa, Escherichia coli O157:H7 str. 2011EL-2106; identical to SEQ ID NO: 4795

SEQ ID NO: 5639 - protein, 210 aa, Escherichia coli O157:H7 str. 2011EL-2106; identical to SEQ ID NO: 4886

SEQ ID NO: 5640 - protein, 367 aa, Escherichia coli O157:H7 str. 2011EL-2106; identical to SEQ ID NO: 4797

SEQ ID NO: 5641 - protein, 550 aa, Escherichia coli O157:H7 str. 2011EL-2107; identical to SEQ ID NO: 4795

SEQ ID NO: 5642 - protein, 210 aa, Escherichia coli O157:H7 str. 2011EL-2107; identical to SEQ ID NO: 4886

SEQ ID NO: 5643 - protein, 367 aa, Escherichia coli O157:H7 str. 2011EL-2107; identical to SEQ ID NO: 4797

SEQ ID NO: 5644 - protein, 550 aa, Escherichia coli O157:H7 str. 2011EL-2108; identical to SEQ ID NO: 4795

SEQ ID NO: 5645 - protein, 210 aa, Escherichia coli O157:H7 str. 2011EL-2108; identical to SEQ ID NO: 4886

SEQ ID NO: 5646 - protein, 367 aa, Escherichia coli O157:H7 str. 2011EL-2108; identical to SEQ ID NO: 4797

SEQ ID NO: 5647 - protein, 550 aa, Escherichia coli O157:H7 str. 2011EL-2109; identical to SEQ ID NO: 4795

SEQ ID NO: 5648 - protein, 210 aa, Escherichia coli O157:H7 str. 2011EL-2109; identical to SEQ ID NO: 4886

SEQ ID NO: 5649 - protein, 367 aa, Escherichia coli O157:H7 str. 2011EL-2109; identical to SEQ ID NO: 4797

SEQ ID NO: 5650 - protein, 550 aa, Escherichia coli O157:H7 str. 2011EL-2111; identical to SEQ ID NO: 4795

SEQ ID NO: 5651 - protein, 210 aa, Escherichia coli O157:H7 str. 2011EL-2111; identical to SEQ ID NO: 4886

SEQ ID NO: 5652 - protein, 367 aa, Escherichia coli O157:H7 str. 2011EL-2111; identical to SEQ ID NO: 4797

SEQ ID NO: 5653 - protein, 550 aa, Escherichia coli O157:H7 str. 2011EL-2112; identical to SEQ ID NO: 4795

SEQ ID NO: 5654 - protein, 210 aa, Escherichia coli O157:H7 str. 2011EL-2112; identical to SEQ ID NO: 4886

SEQ ID NO: 5655 - protein, 367 aa, Escherichia coli O157:H7 str. 2011EL-2112; identical to SEQ ID NO: 4797

SEQ ID NO: 5656 - protein, 550 aa, Escherichia coli O157:H7 str. 2011EL-1107; identical to SEQ ID NO: 4795

SEQ ID NO: 5657 - protein, 210 aa, Escherichia coli O157:H7 str. 2011EL-1107; identical to SEQ ID NO: 4886

SEQ ID NO: 5658 - protein, 367 aa, Escherichia coli O157:H7 str. 2011EL-1107; identical to SEQ ID NO: 4797

SEQ ID NO: 5659 - protein, 550 aa, Escherichia coli O157:H7 str. 2011EL-2090; identical to SEQ ID NO: 4795

SEQ ID NO: 5660 - protein, 210 aa, Escherichia coli O157:H7 str. 2011EL-2090; identical to SEQ ID NO: 4886

SEQ ID NO: 5661 - protein, 367 aa, Escherichia coli O157:H7 str. 2011EL-2090; identical to SEQ ID NO: 4797

SEQ ID NO: 5662 - protein, 550 aa, Escherichia coli O157:H7 str. 2011EL-2091; identical to SEQ ID NO: 4795

SEQ ID NO: 5663 - protein, 210 aa, Escherichia coli O157:H7 str. 2011EL-2091; identical to SEQ ID NO: 4886

SEQ ID NO: 5664 - protein, 367 aa, Escherichia coli O157:H7 str. 2011EL-2091; identical to SEQ ID NO: 4797

SEQ ID NO: 5665 - protein, 550 aa, Escherichia coli O157:H7 str. 2011EL-2092; identical to SEQ ID NO: 4795

SEQ ID NO: 5666 - protein, 210 aa, Escherichia coli O157:H7 str. 2011EL-2092; identical to SEQ ID NO: 4886

SEQ ID NO: 5667 - protein, 367 aa, Escherichia coli O157:H7 str. 2011EL-2092; identical to SEQ ID NO: 4797

SEQ ID NO: 5668 - protein, 550 aa, Escherichia coli O157:H7 str. 2011EL-2093; identical to SEQ ID NO: 4795

SEQ ID NO: 5669 - protein, 210 aa, Escherichia coli O157:H7 str. 2011EL-2093; identical to SEQ ID NO: 4886

SEQ ID NO: 5670 - protein, 367 aa, Escherichia coli O157:H7 str. 2011EL-2093; identical to SEQ ID NO: 4797

SEQ ID NO: 5671 - protein, 550 aa, Escherichia coli O157:H7 str. 2011EL-2094; identical to SEQ ID NO: 4795

SEQ ID NO: 5672 - protein, 210 aa, Escherichia coli O157:H7 str. 2011EL-2094; identical to SEQ ID NO: 4886

SEQ ID NO: 5673 - protein, 367 aa, Escherichia coli O157:H7 str. 2011EL-2094; identical to SEQ ID NO: 4797

SEQ ID NO: 5674 - protein, 550 aa, Escherichia coli O157:H7 str. 2011EL-2096; identical to SEQ ID NO: 4795

SEQ ID NO: 5675 - protein, 210 aa, Escherichia coli O157:H7 str. 2011EL-2096; identical to SEQ ID NO: 4886

SEQ ID NO: 5676 - protein, 367 aa, Escherichia coli O157:H7 str. 2011EL-2096; identical to SEQ ID NO: 4797

SEQ ID NO: 5677 - protein, 550 aa, Escherichia coli O157:H7 str. 2011EL-2097; identical to SEQ ID NO: 4795

SEQ ID NO: 5678 - protein, 210 aa, Escherichia coli O157:H7 str. 2011EL-2097; identical to SEQ ID NO: 4886

SEQ ID NO: 5679 - protein, 367 aa, Escherichia coli O157:H7 str. 2011EL-2097; identical to SEQ ID NO: 4797

SEQ ID NO: 5680 - protein, 550 aa, Escherichia coli O157:H7 str. 2011EL-2098; identical to SEQ ID NO: 4795

SEQ ID NO: 5681 - protein, 210 aa, Escherichia coli O157:H7 str. 2011EL-2098; identical to SEQ ID NO: 4886

SEQ ID NO: 5682 - protein, 367 aa, Escherichia coli O157:H7 str. 2011EL-2098; identical to SEQ ID NO: 4797

SEQ ID NO: 5683 - protein, 550 aa, Escherichia coli O157:H7 str. 08-3037; identical to SEQ ID NO: 4795

SEQ ID NO: 5684 - protein, 210 aa, Escherichia coli O157:H7 str. 08-3037; identical to SEQ ID NO: 4886

SEQ ID NO: 5685 - protein, 367 aa, Escherichia coli O157:H7 str. 08-3037; identical to SEQ ID NO: 4797

SEQ ID NO: 5686 - protein, 550 aa, Escherichia coli O157:H7 str. 08-3527; identical to SEQ ID NO: 4795

SEQ ID NO: 5687 - protein, 210 aa, Escherichia coli O157:H7 str. 08-3527; identical to SEQ ID NO: 4886

SEQ ID NO: 5688 - protein, 367 aa, Escherichia coli O157:H7 str. 08-3527; identical to SEQ ID NO: 4797

SEQ ID NO: 5689 - protein, 550 aa, Escherichia coli O157:H7 str. 08-4169; identical to SEQ ID NO: 4795

SEQ ID NO: 5690 - protein, 210 aa, Escherichia coli O157:H7 str. 08-4169; identical to SEQ ID NO: 4886

SEQ ID NO: 5691 - protein, 367 aa, Escherichia coli O157:H7 str. 08-4169; identical to SEQ ID NO: 4797

SEQ ID NO: 5692 - protein, 550 aa, Escherichia coli O145:NM str. 08-4270; identical to SEQ ID NO: 5530

SEQ ID NO: 5693 - protein, 210 aa, Escherichia coli O145:NM str. 08-4270; identical to SEQ ID NO: 4886

SEQ ID NO: 5694 - protein, 367 aa, Escherichia coli O145:NM str. 08-4270; identical to SEQ ID NO: 4821

SEQ ID NO: 5695 - protein, 550 aa, Escherichia coli O157:H7 str. 2011EL-2099; identical to SEQ ID NO: 4795

SEQ ID NO: 5696 - protein, 210 aa, Escherichia coli O157:H7 str. 2011EL-2099; identical to SEQ ID NO: 4886

SEQ ID NO: 5697 - protein, 367 aa, Escherichia coli O157:H7 str. 2011EL-2099; identical to SEQ ID NO: 4797

SEQ ID NO: 5698 - protein, 550 aa, Escherichia coli O157:H7 str. K5806; identical to SEQ ID NO: 4795

SEQ ID NO: 5699 - protein, 210 aa, Escherichia coli O157:H7 str. K5806; identical to SEQ ID NO: 4886

SEQ ID NO: 5700 - protein, 367 aa, Escherichia coli O157:H7 str. K5806; identical to SEQ ID NO: 4797

SEQ ID NO: 5701 - protein, 550 aa, Escherichia coli O145:NM str. 06-3484; identical to SEQ ID NO: 5530

SEQ ID NO: 5702 - protein, 210 aa, Escherichia coli O145:NM str. 06-3484; identical to SEQ ID NO: 4886

SEQ ID NO: 5703 - protein, 367 aa, Escherichia coli O145:NM str. 06-3484; identical to SEQ ID NO: 4821

SEQ ID NO: 5704 - protein, 550 aa, Escherichia coli O55:H7 str. 06-3555; identical to SEQ ID NO: 4795

SEQ ID NO: 5705 - protein, 210 aa, Escherichia coli O55:H7 str. 06-3555; identical to SEQ ID NO: 4886

SEQ ID NO: 5706 - protein, 367 aa, Escherichia coli O55:H7 str. 06-3555; identical to SEQ ID NO: 4803

SEQ ID NO: 5707 - protein, 550 aa, Escherichia coli O157:H7 str. 06-3745; identical to SEQ ID NO: 4795

SEQ ID NO: 5708 - protein, 210 aa, Escherichia coli O157:H7 str. 06-3745; identical to SEQ ID NO: 4886

SEQ ID NO: 5709 - protein, 367 aa, Escherichia coli O157:H7 str. 06-3745; identical to SEQ ID NO: 4797

SEQ ID NO: 5710 - protein, 550 aa, Escherichia coli O157:H7 str. 07-3091; identical to SEQ ID NO: 4795

SEQ ID NO: 5711 - protein, 210 aa, Escherichia coli O157:H7 str. 07-3091; identical to SEQ ID NO: 4886

SEQ ID NO: 5712 - protein, 367 aa, Escherichia coli O157:H7 str. 07-3091; identical to SEQ ID NO: 4797

SEQ ID NO: 5713 - protein, 550 aa, Escherichia coli O157:H7 str. 06-4039; identical to SEQ ID NO: 4795

SEQ ID NO: 5714 - protein, 210 aa, Escherichia coli O157:H7 str. 06-4039; identical to SEQ ID NO: 4886

SEQ ID NO: 5715 - protein, 367 aa, Escherichia coli O157:H7 str. 06-4039; identical to SEQ ID NO: 4797

SEQ ID NO: 5716 - protein, 550 aa, Escherichia coli O157:H7 str. 07-3391; identical to SEQ ID NO: 4795

SEQ ID NO: 5717 - protein, 210 aa, Escherichia coli O157:H7 str. 07-3391; identical to SEQ ID NO: 4886

SEQ ID NO: 5718 - protein, 367 aa, Escherichia coli O157:H7 str. 07-3391; identical to SEQ ID NO: 4797

SEQ ID NO: 5719 - protein, 550 aa, Escherichia coli O145:NM str. 2010C-4557C2; identical to SEQ ID NO: 5530

SEQ ID NO: 5720 - protein, 210 aa, Escherichia coli O145:NM str. 2010C-4557C2; identical to SEQ ID NO: 4886

SEQ ID NO: 5721 - protein, 367 aa, Escherichia coli O145:NM str. 2010C-4557C2; identical to SEQ ID NO: 4821

SEQ ID NO: 5722 - protein, 550 aa, Escherichia coli O157:H7 str. K4405; identical to SEQ ID NO: 4795

SEQ ID NO: 5723 - protein, 210 aa, Escherichia coli O157:H7 str. K4405; identical to SEQ ID NO: 4886

SEQ ID NO: 5724 - protein, 367 aa, Escherichia coli O157:H7 str. K4405; identical to SEQ ID NO: 4797

SEQ ID NO: 5725 - protein, 550 aa, Escherichia coli O157:H7 str. K1420; identical to SEQ ID NO: 4795

SEQ ID NO: 5726 - protein, 210 aa, Escherichia coli O157:H7 str. K1420; identical to SEQ ID NO: 4886

SEQ ID NO: 5727 - protein, 367 aa, Escherichia coli O157:H7 str. K1420; identical to SEQ ID NO: 4797

SEQ ID NO: 5728 - protein, 550 aa, Escherichia coli O157:H7 str. F6749; identical to SEQ ID NO: 4795

SEQ ID NO: 5729 - protein, 210 aa, Escherichia coli O157:H7 str. F6749; identical to SEQ ID NO: 4886

SEQ ID NO: 5730 - protein, 367 aa, Escherichia coli O157:H7 str. F6749; identical to SEQ ID NO: 4797

SEQ ID NO: 5731 - protein, 550 aa, Escherichia coli O157:H7 str. F7384; identical to SEQ ID NO: 4795

SEQ ID NO: 5732 - protein, 210 aa, Escherichia coli O157:H7 str. F7384; identical to SEQ ID NO: 4886

SEQ ID NO: 5733 - protein, 367 aa, Escherichia coli O157:H7 str. F7384; identical to SEQ ID NO: 4797

SEQ ID NO: 5734 - protein, 550 aa, Escherichia coli O157:H7 str. F6142; identical to SEQ ID NO: 4795

SEQ ID NO: 5735 - protein, 210 aa, Escherichia coli O157:H7 str. F6142; identical to SEQ ID NO: 4886

SEQ ID NO: 5736 - protein, 367 aa, Escherichia coli O157:H7 str. F6142; identical to SEQ ID NO: 4797

SEQ ID NO: 5737 - protein, 550 aa, Escherichia coli O157:H7 str. G5303; identical to SEQ ID NO: 4795

SEQ ID NO: 5738 - protein, 210 aa, Escherichia coli O157:H7 str. G5303; identical to SEQ ID NO: 4886

SEQ ID NO: 5739 - protein, 367 aa, Escherichia coli O157:H7 str. G5303; identical to SEQ ID NO: 4797

SEQ ID NO: 5740 - protein, 550 aa, Escherichia coli O157:H7 str. F7377; identical to SEQ ID NO: 4795

SEQ ID NO: 5741 - protein, 210 aa, Escherichia coli O157:H7 str. F7377; identical to SEQ ID NO: 4886

SEQ ID NO: 5742 - protein, 367 aa, Escherichia coli O157:H7 str. F7377; identical to SEQ ID NO: 4797

SEQ ID NO: 5743 - protein, 550 aa, Escherichia coli O157:H7 str. H2495; identical to SEQ ID NO: 4795

SEQ ID NO: 5744 - protein, 210 aa, Escherichia coli O157:H7 str. H2495; identical to SEQ ID NO: 4886

SEQ ID NO: 5745 - protein, 367 aa, Escherichia coli O157:H7 str. H2495; identical to SEQ ID NO: 4797

SEQ ID NO: 5746 - protein, 550 aa, Escherichia coli O157:H7 str. F6751; identical to SEQ ID NO: 4795

SEQ ID NO: 5747 - protein, 210 aa, Escherichia coli O157:H7 str. F6751; identical to SEQ ID NO: 4886

SEQ ID NO: 5748 - protein, 367 aa, Escherichia coli O157:H7 str. F6751; identical to SEQ ID NO: 4797

SEQ ID NO: 5749 - protein, 550 aa, Escherichia coli O157:H7 str. H2498; identical to SEQ ID NO: 4795

SEQ ID NO: 5750 - protein, 210 aa, Escherichia coli O157:H7 str. H2498; identical to SEQ ID NO: 4886

SEQ ID NO: 5751 - protein, 367 aa, Escherichia coli O157:H7 str. H2498; identical to SEQ ID NO: 4797

SEQ ID NO: 5752 - protein, 550 aa, Escherichia coli O157:H7 str. F6750; identical to SEQ ID NO: 4795

SEQ ID NO: 5753 - protein, 210 aa, Escherichia coli O157:H7 str. F6750; identical to SEQ ID NO: 4886

SEQ ID NO: 5754 - protein, 367 aa, Escherichia coli O157:H7 str. F6750; identical to SEQ ID NO: 4797

SEQ ID NO: 5755 - protein, 550 aa, Escherichia coli O157:H7 str. K1796; identical to SEQ ID NO: 4795

SEQ ID NO: 5756 - protein, 210 aa, Escherichia coli O157:H7 str. K1796; identical to SEQ ID NO: 4886

SEQ ID NO: 5757 - protein, 367 aa, Escherichia coli O157:H7 str. K1796; identical to SEQ ID NO: 4797

SEQ ID NO: 5758 - protein, 550 aa, Escherichia coli O157:H7 str. K1845; identical to SEQ ID NO: 4795

SEQ ID NO: 5759 - protein, 210 aa, Escherichia coli O157:H7 str. K1845; identical to SEQ ID NO: 4886

SEQ ID NO: 5760 - protein, 367 aa, Escherichia coli O157:H7 str. K1845; identical to SEQ ID NO: 4797

SEQ ID NO: 5761 - protein, 550 aa, Escherichia coli O157:H7 str. K1795; identical to SEQ ID NO: 4795

SEQ ID NO: 5762 - protein, 210 aa, Escherichia coli O157:H7 str. K1795; identical to SEQ ID NO: 4886

SEQ ID NO: 5763 - protein, 367 aa, Escherichia coli O157:H7 str. K1795; identical to SEQ ID NO: 4797

SEQ ID NO: 5764 - protein, 550 aa, Escherichia coli O157:H7 str. K1921; identical to SEQ ID NO: 4795

SEQ ID NO: 5765 - protein, 210 aa, Escherichia coli O157:H7 str. K1921; identical to SEQ ID NO: 4886

SEQ ID NO: 5766 - protein, 367 aa, Escherichia coli O157:H7 str. K1921; identical to SEQ ID NO: 4797

SEQ ID NO: 5767 - protein, 550 aa, Escherichia coli O157:H7 str. K1927; identical to SEQ ID NO: 4795

SEQ ID NO: 5768 - protein, 210 aa, Escherichia coli O157:H7 str. K1927; identical to SEQ ID NO: 4886

SEQ ID NO: 5769 - protein, 367 aa, Escherichia coli O157:H7 str. K1927; identical to SEQ ID NO: 4797

SEQ ID NO: 5770 - protein, 550 aa, Escherichia coli O157:H7 str. K2188; identical to SEQ ID NO: 4795

SEQ ID NO: 5771 - protein, 210 aa, Escherichia coli O157:H7 str. K2188; identical to SEQ ID NO: 4886

SEQ ID NO: 5772 - protein, 367 aa, Escherichia coli O157:H7 str. K2188; identical to SEQ ID NO: 4797

SEQ ID NO: 5773 - protein, 264 aa, Escherichia coli O157:H7 str. K2191
SELREVLQVNQHQISELSRHLETFVAIRDKATTVLPEIQNKMAEVGELLKSGAANVSASLEQTSQQILLNADSMRVALDEGTEGFRQSVTQTQQAFASMAHDVSNSSETLTSTLGETITEMKQSGEEFLKSLESHSKELHRNMEQNTTNVIDMFSKTGEKINHQLSSNADNMFDSIQTSFDKASAGLTSQVRESIEKFALSINEQLHAFEQATEREMNREMQSLGNALLSISKGFVGNYEKLIKDYQIVMGQLQALISANKHRG

SEQ ID NO: 5774 - protein, 210 aa, Escherichia coli O157:H7 str. K2191; identical to SEQ ID NO: 4886

SEQ ID NO: 5775 - protein, 367 aa, Escherichia coli O157:H7 str. K2191; identical to SEQ ID NO: 4797

SEQ ID NO: 5776 - protein, 498 aa, Escherichia coli O157:H7 str. K2581; identical to SEQ ID NO: 4867

SEQ ID NO: 5777 - protein, 210 aa, Escherichia coli O157:H7 str. K2581; identical to SEQ ID NO: 4886

SEQ ID NO: 5778 - protein, 367 aa, Escherichia coli O157:H7 str. K2581; identical to SEQ ID NO: 4797

SEQ ID NO: 5779 - protein, 550 aa, Escherichia coli O157:H7 str. K2622; identical to SEQ ID NO: 4795

SEQ ID NO: 5780 - protein, 210 aa, Escherichia coli O157:H7 str. K2622; identical to SEQ ID NO: 4886

SEQ ID NO: 5781 - protein, 367 aa, Escherichia coli O157:H7 str. K2622; identical to SEQ ID NO: 4797

SEQ ID NO: 5782 - protein, 550 aa, Escherichia coli O157:H7 str. K2845; identical to SEQ ID NO: 4795

SEQ ID NO: 5783 - protein, 210 aa, Escherichia coli O157:H7 str. K2845; identical to SEQ ID NO: 4886

SEQ ID NO: 5784 - protein, 367 aa, Escherichia coli O157:H7 str. K2845; identical to SEQ ID NO: 4797

SEQ ID NO: 5785 - protein, 550 aa, Escherichia coli O157:H7 str. K2854; identical to SEQ ID NO: 4795

SEQ ID NO: 5786 - protein, 210 aa, Escherichia coli O157:H7 str. K2854; identical to SEQ ID NO: 4886

SEQ ID NO: 5787 - protein, 367 aa, Escherichia coli O157:H7 str. K2854; identical to SEQ ID NO: 4797

SEQ ID NO: 5788 - protein, 550 aa, Escherichia coli O157:H7 str. K4396; identical to SEQ ID NO: 4795

SEQ ID NO: 5789 - protein, 210 aa, Escherichia coli O157:H7 str. K4396; identical to SEQ ID NO: 4886

SEQ ID NO: 5790 - protein, 367 aa, Escherichia coli O157:H7 str. K4396; identical to SEQ ID NO: 4797

SEQ ID NO: 5791 - protein, 550 aa, Escherichia coli O157:H7 str. K4406; identical to SEQ ID NO: 4795

SEQ ID NO: 5792 - protein, 210 aa, Escherichia coli O157:H7 str. K4406; identical to SEQ ID NO: 4886

SEQ ID NO: 5793 - protein, 367 aa, Escherichia coli O157:H7 str. K4406; identical to SEQ ID NO: 4797

SEQ ID NO: 5794 - protein, 550 aa, Escherichia coli O157:H7 str. K2324; identical to SEQ ID NO: 4795

SEQ ID NO: 5795 - protein, 210 aa, Escherichia coli O157:H7 str. K2324; identical to SEQ ID NO: 4886

SEQ ID NO: 5796 - protein, 367 aa, Escherichia coli O157:H7 str. K2324; identical to SEQ ID NO: 4797

SEQ ID NO: 5797 - protein, 550 aa, Escherichia coli O157:H7 str. K4527; identical to SEQ ID NO: 4795

SEQ ID NO: 5798 - protein, 210 aa, Escherichia coli O157:H7 str. K4527; identical to SEQ ID NO: 4886

SEQ ID NO: 5799 - protein, 367 aa, Escherichia coli O157:H7 str. K4527; identical to SEQ ID NO: 4797

SEQ ID NO: 5800 - protein, 550 aa, Escherichia coli O157:H7 str. K5418; identical to SEQ ID NO: 4795

SEQ ID NO: 5801 - protein, 210 aa, Escherichia coli O157:H7 str. K5418; identical to SEQ ID NO: 4886

SEQ ID NO: 5802 - protein, 367 aa, Escherichia coli O157:H7 str. K5418; identical to SEQ ID NO: 4797

SEQ ID NO: 5803 - protein, 550 aa, Escherichia coli O157:H7 str. K5448; identical to SEQ ID NO: 4795

SEQ ID NO: 5804 - protein, 210 aa, Escherichia coli O157:H7 str. K5448; identical to SEQ ID NO: 4886

SEQ ID NO: 5805 - protein, 367 aa, Escherichia coli O157:H7 str. K5448; identical to SEQ ID NO: 4797

SEQ ID NO: 5806 - protein, 550 aa, Escherichia coli O157:H7 str. K5449; identical to SEQ ID NO: 4795

SEQ ID NO: 5807 - protein, 210 aa, Escherichia coli O157:H7 str. K5449; identical to SEQ ID NO: 4886

SEQ ID NO: 5808 - protein, 367 aa, Escherichia coli O157:H7 str. K5449; identical to SEQ ID NO: 4797

SEQ ID NO: 5809 - protein, 550 aa, Escherichia coli O157:H7 str. K5453; identical to SEQ ID NO: 4795

SEQ ID NO: 5810 - protein, 210 aa, Escherichia coli O157:H7 str. K5453; identical to SEQ ID NO: 4886

SEQ ID NO: 5811 - protein, 367 aa, Escherichia coli O157:H7 str. K5453; identical to SEQ ID NO: 4797

SEQ ID NO: 5812 - protein, 550 aa, Escherichia coli O157:H7 str. K5467; identical to SEQ ID NO: 4795

SEQ ID NO: 5813 - protein, 210 aa, Escherichia coli O157:H7 str. K5467; identical to SEQ ID NO: 4886

SEQ ID NO: 5814 - protein, 367 aa, Escherichia coli O157:H7 str. K5467; identical to SEQ ID NO: 4797

SEQ ID NO: 5815 - protein, 550 aa, Escherichia coli O157:H7 str. K5602; identical to SEQ ID NO: 4795

SEQ ID NO: 5816 - protein, 210 aa, Escherichia coli O157:H7 str. K5602; identical to SEQ ID NO: 4886

SEQ ID NO: 5817 - protein, 367 aa, Escherichia coli O157:H7 str. K5602; identical to SEQ ID NO: 4797

SEQ ID NO: 5818 - protein, 550 aa, Escherichia coli O157:H7 str. K5607; identical to SEQ ID NO: 4795

SEQ ID NO: 5819 - protein, 210 aa, Escherichia coli O157:H7 str. K5607; identical to SEQ ID NO: 4886

SEQ ID NO: 5820 - protein, 367 aa, Escherichia coli O157:H7 str. K5607; identical to SEQ ID NO: 4797

SEQ ID NO: 5821 - protein, 550 aa, Escherichia coli O157:H7 str. K5460; identical to SEQ ID NO: 4795

SEQ ID NO: 5822 - protein, 210 aa, Escherichia coli O157:H7 str. K5460; identical to SEQ ID NO: 4886

SEQ ID NO: 5823 - protein, 367 aa, Escherichia coli O157:H7 str. K5460; identical to SEQ ID NO: 4797

SEQ ID NO: 5824 - protein, 550 aa, Escherichia coli O157:H7 str. K7140; identical to SEQ ID NO: 4795

SEQ ID NO: 5825 - protein, 210 aa, Escherichia coli O157:H7 str. K7140; identical to SEQ ID NO: 4886

SEQ ID NO: 5826 - protein, 367 aa, Escherichia coli O157:H7 str. K7140; identical to SEQ ID NO: 4797

SEQ ID NO: 5827 - protein, 550 aa, Escherichia coli O157:H7 str. 2011EL-2290; identical to SEQ ID NO: 4795

SEQ ID NO: 5828 - protein, 210 aa, Escherichia coli O157:H7 str. 2011EL-2290; identical to SEQ ID NO: 4886

SEQ ID NO: 5829 - protein, 367 aa, Escherichia coli O157:H7 str. 2011EL-2290; identical to SEQ ID NO: 4797

SEQ ID NO: 5830 - protein, 550 aa, Escherichia coli O157:H7 str. 2011EL-2313; identical to SEQ ID NO: 4795

SEQ ID NO: 5831 - protein, 210 aa, Escherichia coli O157:H7 str. 2011EL-2313; identical to SEQ ID NO: 4886

SEQ ID NO: 5832 - protein, 367 aa, Escherichia coli O157:H7 str. 2011EL-2313; identical to SEQ ID NO: 4797

SEQ ID NO: 5833 - protein, 550 aa, Escherichia coli O157:H7 str. 2009C-4258; identical to SEQ ID NO: 4795

SEQ ID NO: 5834 - protein, 210 aa, Escherichia coli O157:H7 str. 2009C-4258; identical to SEQ ID NO: 4886

SEQ ID NO: 5835 - protein, 367 aa, Escherichia coli O157:H7 str. 2009C-4258; identical to SEQ ID NO: 4797

SEQ ID NO: 5836 - protein, 550 aa, Escherichia coli O157:H7 str. 2009EL1449; identical to SEQ ID NO: 4795

SEQ ID NO: 5837 - protein, 210 aa, Escherichia coli O157:H7 str. 2009EL1449; identical to SEQ ID NO: 4886

SEQ ID NO: 5838 - protein, 367 aa, Escherichia coli O157:H7 str. 2009EL1449; identical to SEQ ID NO: 4797

SEQ ID NO: 5839 - protein, 550 aa, Escherichia coli O157:H7 str. 2009EL1913; identical to SEQ ID NO: 4795

SEQ ID NO: 5840 - protein, 210 aa, Escherichia coli O157:H7 str. 2009EL1913; identical to SEQ ID NO: 4886

SEQ ID NO: 5841 - protein, 367 aa, Escherichia coli O157:H7 str. 2009EL1913; identical to SEQ ID NO: 4797

SEQ ID NO: 5842 - protein, 550 aa, Escherichia coli O145:NM str. 2010C-3508; identical to SEQ ID NO: 5530

SEQ ID NO: 5843 - protein, 210 aa, Escherichia coli O145:NM str. 2010C-3508; identical to SEQ ID NO: 4886

SEQ ID NO: 5844 - protein, 367 aa, Escherichia coli O145:NM str. 2010C-3508; identical to SEQ ID NO: 4821

SEQ ID NO: 5845 - protein, 550 aa, Escherichia coli O157:H7 str. K5852; identical to SEQ ID NO: 4795

SEQ ID NO: 5846 - protein, 210 aa, Escherichia coli O157:H7 str. K5852; identical to SEQ ID NO: 4886

SEQ ID NO: 5847 - protein, 367 aa, Escherichia coli O157:H7 str. K5852; identical to SEQ ID NO: 4797

SEQ ID NO: 5848 - protein, 476 aa, Escherichia coli O157:H7 str. K6590
ESIDTSIPVLLGGLKTAFITSIVGMFFAILFNGMDAFFFANKRSALAENNPESVTPEHIYHELKEQNQTLTKLVSGINGDSEGSLIAQIKLLRTEISDSSQAQLANHTHFSNKLWEQLEQFADLMAKGATEQIIDALRQVIIDFNQNLTEQFGENFKALDASVKKLVEWQGNYKTQIEQMSEQYQQSVESLVETKTAVAGIWEECKEIPLAMSELREVLQVNQHQISELSRHLETFVAIRDKATTVLPEIQNKMAEVGELLKSGAANVSASLEQTSQQILLNADSMRVALDEGTEGFRQSVTQTQQAFASMAHDVSNSSETLTSTLGETITEMKQSGEEFLKSLESHSKELHRNMEQNTTNVIDMFSKTGEKINHQLSSNADNMFDSIQTSFDKASAGLTSQVRESIEKFALSINEQLHAFEQATEREMNREMQSLGNALLSISKGFVGNYEKLIKDYQIVMGQLQALISANKHRG

SEQ ID NO: 5849 - protein, 210 aa, Escherichia coli O157:H7 str. K6590; identical to SEQ ID NO: 4886

SEQ ID NO: 5850 - protein, 367 aa, Escherichia coli O157:H7 str. K6590; identical to SEQ ID NO: 4797

SEQ ID NO: 5851 - protein, 550 aa, Escherichia coli O157:H7 str. K6676; identical to SEQ ID NO: 4795

SEQ ID NO: 5852 - protein, 210 aa, Escherichia coli O157:H7 str. K6676; identical to SEQ ID NO: 4886

SEQ ID NO: 5853 - protein, 367 aa, Escherichia coli O157:H7 str. K6676; identical to SEQ ID NO: 4797

SEQ ID NO: 5854 - protein, 550 aa, Escherichia coli O157:H7 str. K6687; identical to SEQ ID NO: 4795

SEQ ID NO: 5855 - protein, 210 aa, Escherichia coli O157:H7 str. K6687; identical to SEQ ID NO: 4886

SEQ ID NO: 5856 - protein, 367 aa, Escherichia coli O157:H7 str. K6687; identical to SEQ ID NO: 4797

SEQ ID NO: 5857 - protein, 550 aa, Escherichia coli O157:H7 str. K5609; identical to SEQ ID NO: 4795

SEQ ID NO: 5858 - protein, 210 aa, Escherichia coli O157:H7 str. K5609; identical to SEQ ID NO: 4886

SEQ ID NO: 5859 - protein, 367 aa, Escherichia coli O157:H7 str. K5609; identical to SEQ ID NO: 4797

SEQ ID NO: 5860 - protein, 550 aa, Escherichia coli O157:H7 str. 08-4529; identical to SEQ ID NO: 4795

SEQ ID NO: 5861 - protein, 210 aa, Escherichia coli O157:H7 str. 08-4529; identical to SEQ ID NO: 4886

SEQ ID NO: 5862 - protein, 367 aa, Escherichia coli O157:H7 str. 08-4529; identical to SEQ ID NO: 4797

SEQ ID NO: 5863 - protein, 550 aa, Escherichia coli O157:NM str. 08-4540; identical to SEQ ID NO: 4795

SEQ ID NO: 5864 - protein, 210 aa, Escherichia coli O157:NM str. 08-4540; identical to SEQ ID NO: 4886

SEQ ID NO: 5865 - protein, 367 aa, Escherichia coli O157:NM str. 08-4540; identical to SEQ ID NO: 4797

SEQ ID NO: 5866 - protein, 550 aa, Escherichia coli 1-250-04_S3_C1; identical to SEQ ID NO: 4801

SEQ ID NO: 5867 - protein, 205 aa, Escherichia coli 1-250-04_S3_C1; identical to SEQ ID NO: 4946

SEQ ID NO: 5868 - protein, 367 aa, Escherichia coli 1-250-04_S3_C1
MKLSIDISELIQLGKKMLPEGVDFFLDESPIDFDPIDIELSTGKEVSIEDLDPGSGLISYHGRQVLLYIRDHSGRYDAAIVDGEKGKRFHIAWCRTLDEMRHKNRFERYHATNRIDGLFEIDDGSGRSQDVDLRVCMNCLERLNYKGSIDKQRKREIFKSFSLNEFFSDYSTCFRHMPKGIYDKTNSGYVENWKEISKEIREKANYVCNDCGVNLSTAKNLCHVHHKNGIKYDNHHENLLVLCKDCHRKQPLHEGIFVTQAEMAIIQRLRSQQGLLKAESWNEIYDLTDPSVHGDINIMQHKGFQPPVPGLDLQNSEHEIIATVEAAWPGLKIAVNLTPAEVEGWRIYTVGELVKEIQTGAFTPAKL

SEQ ID NO: 5869 - protein, 498 aa, Escherichia coli 1-182-04_S3_C2
MGALGILGTFIGIIIGLLNFNTESIDTSIPVLLGGLKTAFITSIVGMFFAILFNGMDAFFFANKRSALAENNPESVTPEHIYHELKEQNQTLTKLVSGINGDSEGSLIAQIKLLRTEISDSSQAQLANHTHFSNKLWEQLEQFADLMAKGATEQIIDALRQVIIDFNENLTEQFGENFKALDASVKKLVEWQGNYKTQIEQMSEQYQQSVESLVETKTAVAGIWEECKEIPLAMSELREVLQVNQHQISELSRHLETFVAIRDKATTVLPEIQNKMAEVGELLKSGAANVSASLEQTSQQILLNADSMRVALDEGTEGFRQSVTQTQQAFASMAHDVSNSSETLTSTLGETITEMKQSGEEFLKSLESHSKELHRNMEQNTTNVIDMFSKTGEKINHQLSSNADNMFDSIQTSFDKAGAGLTSQVRESIEKFALSINEQLHAFEQATEREMNREMQSLGNALLSISKGFVGNYEKLIKDYQIVMGQLQALISANKHRG

SEQ ID NO: 5870 - protein, 206 aa, Escherichia coli 1-182-04_S3_C2; identical to SEQ ID NO: 4874

SEQ ID NO: 5871 - protein, 367 aa, Escherichia coli 1-182-04_S3_C2; identical to SEQ ID NO: 4803

SEQ ID NO: 5872 - protein, 550 aa, Escherichia coli 1-182-04_S3_C3; identical to SEQ ID NO: 4801

SEQ ID NO: 5873 - protein, 206 aa, Escherichia coli 1-182-04_S3_C3; identical to SEQ ID NO: 4874

SEQ ID NO: 5874 - protein, 367 aa, Escherichia coli 1-182-04_S3_C3; identical to SEQ ID NO: 4803

SEQ ID NO: 5875 - protein, 550 aa, Escherichia coli 1-182-04_S3_C1; identical to SEQ ID NO: 4801

SEQ ID NO: 5876 - protein, 235 aa, Escherichia coli 1-182-04_S3_C1; identical to SEQ ID NO: 4796

SEQ ID NO: 5877 - protein, 367 aa, Escherichia coli 1-182-04_S3_C1; identical to SEQ ID NO: 4803

SEQ ID NO: 5878 - protein, 550 aa, Escherichia coli O157: str. 2010EL-2044; identical to SEQ ID NO: 4795

SEQ ID NO: 5879 - protein, 210 aa, Escherichia coli O157: str. 2010EL-2044; identical to SEQ ID NO: 4886

SEQ ID NO: 5880 - protein, 367 aa, Escherichia coli O157: str. 2010EL-2044; identical to SEQ ID NO: 4797

SEQ ID NO: 5881 - protein, 550 aa, Escherichia coli O157: str. 2010EL-2045; identical to SEQ ID NO: 4795

SEQ ID NO: 5882 - protein, 210 aa, Escherichia coli O157: str. 2010EL-2045; identical to SEQ ID NO: 4886

SEQ ID NO: 5883 - protein, 367 aa, Escherichia coli O157: str. 2010EL-2045; identical to SEQ ID NO: 4797

SEQ ID NO: 5884 - protein, 498 aa, Escherichia coli O145:H28 str. RM12581; identical to SEQ ID NO: 5554

SEQ ID NO: 5885 - protein, 210 aa, Escherichia coli O145:H28 str. RM12581; identical to SEQ ID NO: 4886

SEQ ID NO: 5886 - protein, 367 aa, Escherichia coli O145:H28 str. RM12581; identical to SEQ ID NO: 4821

SEQ ID NO: 5887 - protein, 550 aa, Escherichia coli 2-005-03_S3_C2; identical to SEQ ID NO: 4804

SEQ ID NO: 5888 - protein, 214 aa, Escherichia coli 2-005-03_S3_C2
MSDLMAGLMMVFMFISIAYMHYVRIEKEKIKEVAVAYENAQLQLYNALDIEFAKDLQDWDAEIDKQTLEVRFKSPDVLFGLGSTELKPKFKLILDDFFPRYLKVLDNYQEHITEVRIEGHTSTDWTGTTNPDIAYFNNMALSQGRTRAVLQYVYDIKNIATHKQWVKSKFAAVGYSSAHPILDKTGKEDPNRSRRVTFKVVTNAELQIRKIIQE

SEQ ID NO: 5889 - protein, 367 aa, Escherichia coli 2-005-03_S3_C2; identical to SEQ ID NO: 5274

SEQ ID NO: 5890 - protein, 498 aa, Escherichia coli 2-011-08_S1_C1
MGALGILGTFIGIIIGLLNFNTESIDTSIPVLLGGLKTAFITSIVGMFFAILFNGMDAFFFANKRSALAENNPESVTPEHIYHELKEQNQTLNKLVSGINGDSEGSLIAQIKLLRTEISDSSQAQLANHTYFSNKLWEQLEQFADLMAKGATEQIIDALRQVIIDFNDNLTEQFGENFKALDASVKKLVEWQENYKTQVEQMSEQYQQSVESLVETKTAVAGIWEECKEIPLAMSELREVLQVNQHQISELSRHLETFVAIRDKATTVLPEIQNKMAEVGELLKSGAANVSASLEQTSQQILLNADSMRVALDEGTEGFRQSVTQTQQAFASMAHDVSNSSETLTSTLGETITEMKQSGEEFLKSLESHSKELHRNMEQNTTNVIDMFSKTGEKINHQLSSNADNMFDSIQTSFDKASAGLASQVRESIEKFALSINEQLHAFEQATEREMNREMQSLGNALLSISKGFVGNYEKLIKDYQIVMGQLQALISANKHRG

SEQ ID NO: 5891 - protein, 210 aa, Escherichia coli 2-011-08_S1_C1
MAGLMMVFMFISIAYMHYVRIEKEKIKEVAVAYENAQLQLYNALDIEFAKDLQDWDAEIDKQTLEVRFKSPDVLFGLGSTKLKPKFKLILDDFFPRYLKVLDNYQEHITEVRIEGHTSTDWTGTTNPDIAYFNNMALSQGRTRSVLQYVYDIKNIATHQQWVKSKFAAVGYSSAHPILDKTGKEDPNRSRRVTFKVVTNAELQIRKIIQE

SEQ ID NO: 5892 - protein, 365 aa, Escherichia coli 2-011-08_S1_C1
MKLSIDISELIQLGKKMLPEGVDFFLDESPVDFEPIDIELSSGKEVSIAELDPGSSLISYHGRQVLLYIRDHSGCYDAAIMDGEKGKRFHIAWCRTLDEMRQKNRFERYHATNRIDGLFEIDDGSGRSQDTDLRVCMNCLERLNYKGSIDRQKRRGVFNSFSLKEFFSDYSTCFCHMPKENYDKTNSGYVENWKDISKSMRESANYICNDCGVNLSTAKNLCHVHHKNGIKYDNSPENLLVLCKDCHRRQPLHEGIFVTRTEMSVIQRLRSQQGLLMAASWSEIYELTDSSVHGDISMMQYKGYCPPVPGLEIRNSEHEIIATVEAAWPEIKIAVNVTPVEVDGWKIYTVGELVKDVQGGIFITA

SEQ ID NO: 5893 - protein, 550 aa, Escherichia coli O145:H28 str. 4865/96; identical to SEQ ID NO: 5530

SEQ ID NO: 5894 - protein, 210 aa, Escherichia coli O145:H28 str. 4865/96; identical to SEQ ID NO: 4886

SEQ ID NO: 5895 - protein, 367 aa, Escherichia coli O145:H28 str. 4865/96; identical to SEQ ID NO: 4821

SEQ ID NO: 5896 - protein, 550 aa, Escherichia coli; identical to SEQ ID NO: 5530

SEQ ID NO: 5897 - protein, 210 aa, Escherichia coli; identical to SEQ ID NO: 4886

SEQ ID NO: 5898 - protein, 367 aa, Escherichia coli; identical to SEQ ID NO: 4821

SEQ ID NO: 5899 - protein, 550 aa, Escherichia coli 3-475-03_S1_C1; identical to SEQ ID NO: 4801

SEQ ID NO: 5900 - protein, 235 aa, Escherichia coli 3-475-03_S1_C1; identical to SEQ ID NO: 4796

SEQ ID NO: 5901 - protein, 367 aa, Escherichia coli 3-475-03_S1_C1; identical to SEQ ID NO: 4803

SEQ ID NO: 5902 - protein, 498 aa, Escherichia coli 2-177-06_S3_C2; identical to SEQ ID NO: 5890

SEQ ID NO: 5903 - protein, 235 aa, Escherichia coli 2-177-06_S3_C2
MDKIIGKQLPKKDQDNEHWVSMSDLMAGLMMVFMFISIAYMHYVRIEKEKIKEVAVAYENAQLQLYNALDIEFAKDLQDWDAEIDKQTLEVRFKSPDVLFGLGSTKLKPKFKLILDDFFPRYLKVLDNYQEHITEVRIEGHTSTDWTGTTNPDIAYFNNMALSQGRTRSVLQYVYDIKNIATHQQWVKSKFAAVGYSSAHPILDKTGKEDPNRSRRVTFKVVTNAELQIRKIIQE

SEQ ID NO: 5904 - protein, 365 aa, Escherichia coli 2-177-06_S3_C2; identical to SEQ ID NO: 5892

SEQ ID NO: 5905 - protein, 550 aa, Escherichia coli 2-316-03_S1_C2; identical to SEQ ID NO: 4804

SEQ ID NO: 5906 - protein, 235 aa, Escherichia coli 2-316-03_S1_C2; identical to SEQ ID NO: 5273

SEQ ID NO: 5907 - protein, 367 aa, Escherichia coli 2-316-03_S1_C2; identical to SEQ ID NO: 5274

SEQ ID NO: 5908 - protein, 550 aa, Escherichia coli 2-316-03_S1_C1; identical to SEQ ID NO: 4804

SEQ ID NO: 5909 - protein, 210 aa, Escherichia coli 2-316-03_S1_C1; identical to SEQ ID NO: 5564

SEQ ID NO: 5910 - protein, 367 aa, Escherichia coli 2-316-03_S1_C1; identical to SEQ ID NO: 5274

SEQ ID NO: 5911 - protein, 550 aa, Escherichia coli 6-175-07_S4_C3; identical to SEQ ID NO: 4801

SEQ ID NO: 5912 - protein, 210 aa, Escherichia coli 6-175-07_S4_C3; identical to SEQ ID NO: 4886

SEQ ID NO: 5913 - protein, 367 aa, Escherichia coli 6-175-07_S4_C3; identical to SEQ ID NO: 4803

SEQ ID NO: 5914 - protein, 550 aa, Escherichia coli 6-537-08_S4_C1; identical to SEQ ID NO: 4801

SEQ ID NO: 5915 - protein, 210 aa, Escherichia coli 6-537-08_S4_C1; identical to SEQ ID NO: 4886

SEQ ID NO: 5916 - protein, 367 aa, Escherichia coli 6-537-08_S4_C1; identical to SEQ ID NO: 4803

SEQ ID NO: 5917 - protein, 550 aa, Escherichia coli 6-537-08_S4_C2; identical to SEQ ID NO: 4801

SEQ ID NO: 5918 - protein, 210 aa, Escherichia coli 6-537-08_S4_C2; identical to SEQ ID NO: 4886

SEQ ID NO: 5919 - protein, 367 aa, Escherichia coli 6-537-08_S4_C2; identical to SEQ ID NO: 4803

SEQ ID NO: 5920 - protein, 498 aa, Escherichia coli 2-177-06_S3_C3; identical to SEQ ID NO: 5890

SEQ ID NO: 5921 - protein, 235 aa, Escherichia coli 2-177-06_S3_C3; identical to SEQ ID NO: 5903

SEQ ID NO: 5922 - protein, 365 aa, Escherichia coli 2-177-06_S3_C3; identical to SEQ ID NO: 5892

SEQ ID NO: 5923 - protein, 550 aa, Escherichia coli 1-250-04_S3_C2; identical to SEQ ID NO: 4801

SEQ ID NO: 5924 - protein, 235 aa, Escherichia coli 1-250-04_S3_C2; identical to SEQ ID NO: 4796

SEQ ID NO: 5925 - protein, 367 aa, Escherichia coli 1-250-04_S3_C2; identical to SEQ ID NO: 5868

SEQ ID NO: 5926 - protein, 550 aa, Escherichia coli 3-475-03_S1_C2; identical to SEQ ID NO: 4804

SEQ ID NO: 5927 - protein, 235 aa, Escherichia coli 3-475-03_S1_C2; identical to SEQ ID NO: 5273

SEQ ID NO: 5928 - protein, 367 aa, Escherichia coli 3-475-03_S1_C2; identical to SEQ ID NO: 5274

SEQ ID NO: 5929 - protein, 550 aa, Escherichia coli 4-203-08_S3_C3; identical to SEQ ID NO: 4801

SEQ ID NO: 5930 - protein, 235 aa, Escherichia coli 4-203-08_S3_C3; identical to SEQ ID NO: 4796

SEQ ID NO: 5931 - protein, 367 aa, Escherichia coli 4-203-08_S3_C3; identical to SEQ ID NO: 4803

SEQ ID NO: 5932 - protein, 550 aa, Escherichia coli 4-203-08_S3_C2; identical to SEQ ID NO: 4801

SEQ ID NO: 5933 - protein, 206 aa, Escherichia coli 4-203-08_S3_C2; identical to SEQ ID NO: 4874

SEQ ID NO: 5934 - protein, 367 aa, Escherichia coli 4-203-08_S3_C2; identical to SEQ ID NO: 4803

SEQ ID NO: 5935 - protein, 550 aa, Escherichia coli 6-175-07_S4_C1; identical to SEQ ID NO: 4801

SEQ ID NO: 5936 - protein, 235 aa, Escherichia coli 6-175-07_S4_C1; identical to SEQ ID NO: 4796

SEQ ID NO: 5937 - protein, 367 aa, Escherichia coli 6-175-07_S4_C1; identical to SEQ ID NO: 4803

SEQ ID NO: 5938 - protein, 550 aa, Escherichia coli 6-175-07_S4_C2; identical to SEQ ID NO: 4801

SEQ ID NO: 5939 - protein, 235 aa, Escherichia coli 6-175-07_S4_C2; identical to SEQ ID NO: 4796

SEQ ID NO: 5940 - protein, 367 aa, Escherichia coli 6-175-07_S4_C2; identical to SEQ ID NO: 4803

SEQ ID NO: 5941 - protein, 550 aa, Escherichia coli O157:H7 str. SS17; identical to SEQ ID NO: 4795

SEQ ID NO: 5942 - protein, 235 aa, Escherichia coli O157:H7 str. SS17; identical to SEQ ID NO: 4796

SEQ ID NO: 5943 - protein, 367 aa, Escherichia coli O157:H7 str. SS17; identical to SEQ ID NO: 4797

SEQ ID NO: 5944 - protein, 550 aa, Escherichia coli O157:H7 str. EDL933; identical to SEQ ID NO: 4795

SEQ ID NO: 5945 - protein, 205 aa, Escherichia coli O157:H7 str. EDL933; identical to SEQ ID NO: 4946

SEQ ID NO: 5946 - protein, 367 aa, Escherichia coli O157:H7 str. EDL933; identical to SEQ ID NO: 4797

SEQ ID NO: 5947 - protein, 550 aa, Escherichia coli; identical to SEQ ID NO: 4795

SEQ ID NO: 5948 - protein, 235 aa, Escherichia coli; identical to SEQ ID NO: 4796

SEQ ID NO: 5949 - protein, 367 aa, Escherichia coli; identical to SEQ ID NO: 4821

SEQ ID NO: 5950 - protein, 550 aa, Escherichia coli
MLAQLFEQLFKTTDALLITNFFIWVVISVFLFALWCDKRNIHSEFREYAPTLMGALGILGTFTGIIIGLLNFDTESIDTSIPVLLDGLKTAFITSIVGMFFAILFNGVDVFFFANKRTELAENTPGAVTPEHIYRELKEQNQTLDKLVSGINGDGEGSLIAQIKLLRTEINDASQEQLDSHSHFSNKLWEQLQQFADLMAKGATEQIIDALRQVIIDFNENLTEQFGENFKALDASVKKLVEWQGNYKTQVEQMSEQYQQCVESLVETKTAVAGIWEECNFIPLAMSSLREVLQVNQHQISELSRHLETFAAIRDRAITVLPEIQNKMAEVGELLKSGAANVSASLEQTSQQILLNADSMRVALDEGTEGFRQSVTQTQQAFASMAHDVSNSSETLTSTLGETITEMKQSGEEFLKSLESHSKELHRNMEQNTTNVIDMFSKTGEKINHQLSSHADNMFDSIQTSFDKASAGLTSQVREAIEKFALSINEQLHAFEQATEREMNREMQSLGNALLSISKGFVNNYEKLIKDYQIVMGQLQTLISANKHRG

SEQ ID NO: 5951 - protein, 235 aa, Escherichia coli
MDKIIGKQLSPKKQDNEHWVSMSDLMAGLMMVFMFISVAYMHYVRIEKERIKEVAVAYENAQLQLYNALDIEFAKDLQDWDAEIDKQTLEVRFKSPDVLFGLGSTELKPKFKLILDDFFPRYLKVLDNYQEHITEVRIEGHTSTDWTGTTNPDIAYFNNMALSQGRTRAVLQYVYGIKNIVAHQQWVKNKFAAVGYSSAHPILDKTGKEDPNRSRRVTFKVVTNAELQIRKIIQE

SEQ ID NO: 5952 - protein, 365 aa, Escherichia coli
MKLSINISELIQLGKKMLPEGVDFFLDESPVGLEPIDIELSTSKEVSIADLDPGSGLISYHGRQVLLYIRDHSGCYDATIVDGKKGKRYHIAWCRTLDEMRQKNRFERYHATNRIDGLFEIDDGSGRSQDADLRVCMNCLERLNYKGSVDRQKRRENFNSFSLNDFFSDYSVCFRHMPKGIYDKTNSGYVENWKDISKLMREKANYICNDCGVNLSTAKNLCHVHHKNGIKYDNHHENLCVLCKDCHRKQPLHEGMFVTQSEMVIIQRLRSQQGLLKAESWNEIYDLTDPSVHGDINMMQHKGFQLPVLGLDLQNSEHKVIATVEAAWPGLKIAVNLIPAKVEGWKIYTAGELIKDIQSGIFTAV

SEQ ID NO: 5953 - protein, 550 aa, Escherichia coli; identical to SEQ ID NO: 4900

SEQ ID NO: 5954 - protein, 235 aa, Escherichia coli; identical to SEQ ID NO: 4796

SEQ ID NO: 5955 - protein, 367 aa, Escherichia coli; identical to SEQ ID NO: 4821

SEQ ID NO: 5956 - protein, 550 aa, Escherichia coli O157:H7 str. SS52; identical to SEQ ID NO: 4795

SEQ ID NO: 5957 - protein, 235 aa, Escherichia coli O157:H7 str. SS52; identical to SEQ ID NO: 4796

SEQ ID NO: 5958 - protein, 367 aa, Escherichia coli O157:H7 str. SS52; identical to SEQ ID NO: 4797

SEQ ID NO: 5959 - protein, 550 aa, Escherichia coli; identical to SEQ ID NO: 4795

SEQ ID NO: 5960 - protein, 235 aa, Escherichia coli; identical to SEQ ID NO: 4796

SEQ ID NO: 5961 - protein, 367 aa, Escherichia coli; identical to SEQ ID NO: 4821

SEQ ID NO: 5962 - protein, 550 aa, Escherichia coli; identical to SEQ ID NO: 4795

SEQ ID NO: 5963 - protein, 235 aa, Escherichia coli; identical to SEQ ID NO: 4796

SEQ ID NO: 5964 - protein, 367 aa, Escherichia coli; identical to SEQ ID NO: 4797

SEQ ID NO: 5965 - protein, 550 aa, Escherichia coli; identical to SEQ ID NO: 4795

SEQ ID NO: 5966 - protein, 235 aa, Escherichia coli; identical to SEQ ID NO: 4796

SEQ ID NO: 5967 - protein, 367 aa, Escherichia coli; identical to SEQ ID NO: 4797

SEQ ID NO: 5968 - protein, 550 aa, Escherichia coli; identical to SEQ ID NO: 4795

SEQ ID NO: 5969 - protein, 235 aa, Escherichia coli; identical to SEQ ID NO: 4796

SEQ ID NO: 5970 - protein, 367 aa, Escherichia coli; identical to SEQ ID NO: 4803

SEQ ID NO: 5971 - protein, 550 aa, Escherichia coli; identical to SEQ ID NO: 5530

SEQ ID NO: 5972 - protein, 235 aa, Escherichia coli; identical to SEQ ID NO: 4796

SEQ ID NO: 5973 - protein, 367 aa, Escherichia coli; identical to SEQ ID NO: 4821

SEQ ID NO: 5974 - protein, 550 aa, Escherichia coli; identical to SEQ ID NO: 5530

SEQ ID NO: 5975 - protein, 235 aa, Escherichia coli; identical to SEQ ID NO: 4796

SEQ ID NO: 5976 - protein, 367 aa, Escherichia coli; identical to SEQ ID NO: 4821

SEQ ID NO: 5977 - protein, 550 aa, Escherichia coli O157:H7; identical to SEQ ID NO: 4795

SEQ ID NO: 5978 - protein, 235 aa, Escherichia coli O157:H7; identical to SEQ ID NO: 4796

SEQ ID NO: 5979 - protein, 367 aa, Escherichia coli O157:H7; identical to SEQ ID NO: 4797

SEQ ID NO: 5980 - protein, 550 aa, Escherichia coli O157:H7; identical to SEQ ID NO: 4795

SEQ ID NO: 5981 - protein, 235 aa, Escherichia coli O157:H7; identical to SEQ ID NO: 4796

SEQ ID NO: 5982 - protein, 367 aa, Escherichia coli O157:H7; identical to SEQ ID NO: 4797

SEQ ID NO: 5983 - protein, 550 aa, Escherichia coli; identical to SEQ ID NO: 4795

SEQ ID NO: 5984 - protein, 235 aa, Escherichia coli; identical to SEQ ID NO: 4796

SEQ ID NO: 5985 - protein, 367 aa, Escherichia coli; identical to SEQ ID NO: 4797

SEQ ID NO: 5986 - protein, 550 aa, Escherichia coli O157:H7; identical to SEQ ID NO: 4795

SEQ ID NO: 5987 - protein, 235 aa, Escherichia coli O157:H7; identical to SEQ ID NO: 4796

SEQ ID NO: 5988 - protein, 149 aa, Escherichia coli O157:H7
MKLSIDISELIQLGKKMLPEGVDFFLDESPIDFDPIDIELSTGKEVSIEDLDPGSGLISYHGRQVLLYIRDHSGRYDAAIVDGEKGKRFHIAWCRTLDEMRHKNRFERYHATNRIDGLFEIDDGSGRSQDVDLRVCMNCLERLNYKGSI

SEQ ID NO: 5989 - protein, 550 aa, Escherichia coli; identical to SEQ ID NO: 5530

SEQ ID NO: 5990 - protein, 235 aa, Escherichia coli; identical to SEQ ID NO: 4796

SEQ ID NO: 5991 - protein, 367 aa, Escherichia coli; identical to SEQ ID NO: 4821

SEQ ID NO: 5992 - protein, 550 aa, Escherichia coli; identical to SEQ ID NO: 5530

SEQ ID NO: 5993 - protein, 235 aa, Escherichia coli; identical to SEQ ID NO: 4796

SEQ ID NO: 5994 - protein, 367 aa, Escherichia coli; identical to SEQ ID NO: 4821

SEQ ID NO: 5995 - protein, 550 aa, Escherichia coli; identical to SEQ ID NO: 5530

SEQ ID NO: 5996 - protein, 235 aa, Escherichia coli; identical to SEQ ID NO: 4796

SEQ ID NO: 5997 - protein, 367 aa, Escherichia coli; identical to SEQ ID NO: 4821

SEQ ID NO: 5998 - protein, 550 aa, Escherichia coli; identical to SEQ ID NO: 5530

SEQ ID NO: 5999 - protein, 235 aa, Escherichia coli; identical to SEQ ID NO: 4796

SEQ ID NO: 6000 - protein, 367 aa, Escherichia coli; identical to SEQ ID NO: 4821

SEQ ID NO: 6001 - protein, 550 aa, Escherichia coli; identical to SEQ ID NO: 5530

SEQ ID NO: 6002 - protein, 235 aa, Escherichia coli; identical to SEQ ID NO: 4796

SEQ ID NO: 6003 - protein, 367 aa, Escherichia coli; identical to SEQ ID NO: 4821

SEQ ID NO: 6004 - protein, 550 aa, Escherichia coli
MLAQLFEQLFQSIDSTLITNIFIWAVIFVFLSAWWCDKKNIHSKFREYAPTLMGALGILGTFIGIIIGLLNFNTESIDTSIPVLLGGLKTAFITSIVGMFFAILFNGMDAFFFANKRSALAENNPESVTPEHIYHELKEQNQTLTKLASGINGDSEGSLIAQIKLLRTEISDSSQAQLANHTHFSNKLWEQLEQFADLMAKGATEQIIDALRQVIIDFNENLTEQFGENFKALDASVKKLVEWQENYKTQVELMSEQYQQSVESLVETKTAVAGIWEECKEIPLAMSELREVLQVNQHQISELSRHLETFVAIRDKATTVLPEIQNKMAEVGELLKSGAANVSASLEQTSQQILLNADSMRVALDEGTEGFRQSVTQTQQAFASMAHEVSNSSETLTSTLGETITEMKQSGEEFLKSLESHSKELHRNMEQNTTNVIDMFSKTGEKINHQLSSNADNMFDSIQTSFDKASAGLTSQVRESIEKFALSINEQLHAFEQATEREMNREMQSLGNALLSISKGFVGNYEKLIKDYQIVMGQLQALISANKHRG

SEQ ID NO: 6005 - protein, 235 aa, Escherichia coli; identical to SEQ ID NO: 4796

SEQ ID NO: 6006 - protein, 367 aa, Escherichia coli
MKLSIDISELIQLGKKMLPEGVDFFLDESPIDFDPIDIELSTGKEVSIEDLDPGSGLISYHGRQVLLYIRDHSGRYDAAIVDGEKGKRFHIAWCRTLDEMRHKNRFERYHATNRIDGLFEIDDGSGRSQDVDLRVCMNCLERLNYKGSIDKQRKREIFKSFSLNEFFSDYSTCFRHMPKGIYDKTNSGYVENWKDISKSIREKVKYTCNDCGVNLSTAKNLCHVHHKNGIKYDNHHENLLVLCKDCHRKQPLHEGIFVTQAEMAIIQRLRSQQGLLKAESWNEIYDLTDPSVHGDINMMQHKGFQPPVPGLDLQNSEHEIIATVEAAWPGLKIAVNLTPAEVEGWRIYTVGELVKEIQTGAFTSATL

SEQ ID NO: 6007 - protein, 550 aa, Escherichia coli; identical to SEQ ID NO: 4795

SEQ ID NO: 6008 - protein, 235 aa, Escherichia coli; identical to SEQ ID NO: 4796

SEQ ID NO: 6009 - protein, 367 aa, Escherichia coli; identical to SEQ ID NO: 4797

SEQ ID NO: 6010 - protein, 550 aa, Escherichia coli; identical to SEQ ID NO: 4795

SEQ ID NO: 6011 - protein, 235 aa, Escherichia coli; identical to SEQ ID NO: 4796

SEQ ID NO: 6012 - protein, 367 aa, Escherichia coli; identical to SEQ ID NO: 4797

SEQ ID NO: 6013 - protein, 550 aa, Escherichia coli; identical to SEQ ID NO: 4795

SEQ ID NO: 6014 - protein, 235 aa, Escherichia coli; identical to SEQ ID NO: 4796

SEQ ID NO: 6015 - protein, 367 aa, Escherichia coli; identical to SEQ ID NO: 4803

SEQ ID NO: 6016 - protein, 550 aa, Escherichia coli; identical to SEQ ID NO: 4795

SEQ ID NO: 6017 - protein, 235 aa, Escherichia coli; identical to SEQ ID NO: 4796

SEQ ID NO: 6018 - protein, 367 aa, Escherichia coli; identical to SEQ ID NO: 4797

SEQ ID NO: 6019 - protein, 550 aa, Escherichia coli; identical to SEQ ID NO: 4795

SEQ ID NO: 6020 - protein, 235 aa, Escherichia coli; identical to SEQ ID NO: 4796

SEQ ID NO: 6021 - protein, 367 aa, Escherichia coli; identical to SEQ ID NO: 4797

SEQ ID NO: 6022 - protein, 550 aa, Escherichia coli; identical to SEQ ID NO: 4795

SEQ ID NO: 6023 - protein, 235 aa, Escherichia coli; identical to SEQ ID NO: 4796

SEQ ID NO: 6024 - protein, 367 aa, Escherichia coli; identical to SEQ ID NO: 4797

SEQ ID NO: 6025 - protein, 550 aa, Escherichia coli; identical to SEQ ID NO: 4795

SEQ ID NO: 6026 - protein, 235 aa, Escherichia coli; identical to SEQ ID NO: 4796

SEQ ID NO: 6027 - protein, 367 aa, Escherichia coli; identical to SEQ ID NO: 4797

SEQ ID NO: 6028 - protein, 550 aa, Escherichia coli; identical to SEQ ID NO: 4795

SEQ ID NO: 6029 - protein, 235 aa, Escherichia coli; identical to SEQ ID NO: 4796

SEQ ID NO: 6030 - protein, 367 aa, Escherichia coli; identical to SEQ ID NO: 4797

SEQ ID NO: 6031 - protein, 550 aa, Escherichia coli; identical to SEQ ID NO: 4795

SEQ ID NO: 6032 - protein, 235 aa, Escherichia coli; identical to SEQ ID NO: 4796

SEQ ID NO: 6033 - protein, 367 aa, Escherichia coli; identical to SEQ ID NO: 4797

SEQ ID NO: 6034 - protein, 550 aa, Escherichia coli; identical to SEQ ID NO: 4795

SEQ ID NO: 6035 - protein, 235 aa, Escherichia coli; identical to SEQ ID NO: 4796

SEQ ID NO: 6036 - protein, 367 aa, Escherichia coli; identical to SEQ ID NO: 4797

SEQ ID NO: 6037 - protein, 550 aa, Escherichia coli; identical to SEQ ID NO: 4795

SEQ ID NO: 6038 - protein, 235 aa, Escherichia coli; identical to SEQ ID NO: 4796

SEQ ID NO: 6039 - protein, 367 aa, Escherichia coli; identical to SEQ ID NO: 4797

SEQ ID NO: 6040 - protein, 550 aa, Escherichia coli; identical to SEQ ID NO: 4795

SEQ ID NO: 6041 - protein, 235 aa, Escherichia coli; identical to SEQ ID NO: 4796

SEQ ID NO: 6042 - protein, 367 aa, Escherichia coli; identical to SEQ ID NO: 4797

SEQ ID NO: 6043 - protein, 550 aa, Escherichia coli; identical to SEQ ID NO: 4795

SEQ ID NO: 6044 - protein, 235 aa, Escherichia coli; identical to SEQ ID NO: 4796

SEQ ID NO: 6045 - protein, 367 aa, Escherichia coli; identical to SEQ ID NO: 4803

SEQ ID NO: 6046 - protein, 550 aa, Escherichia coli; identical to SEQ ID NO: 4795

SEQ ID NO: 6047 - protein, 235 aa, Escherichia coli; identical to SEQ ID NO: 4796

SEQ ID NO: 6048 - protein, 367 aa, Escherichia coli
MKLSIDISELIQLGKKMLPEGVDFFLDESPIDFDPIDIELSTGKEVSIEDLDPGSGLISYHGRQVLLYIRDHSGRYDAAIVDGEKGKRFHIAWCRTLDEMRHKNRFERYHATNRIDGLFEIDDGSGRSQDVDLRVCMNCLERLNYKGSIDKQRKREIFKSFSLNEFFSDYSTCFRHMPKGIYDKTNSGYVENWKEISKEIREKANYVCNDCGVNLSTAKNLCHVHHKNGIKYDNHHENLLVLCKDCHRKQPLHEGIFVTQTEMAIIQRLRSQQGLLKAESWNEIYDLTDPSVHGDINMMQHKGFQPPVPGLDLPNSEHEIIATVEAAWPGLKIAVNLTPAEVEGWRIYTVGELVKEIQTGAFTPAKL

SEQ ID NO: 6049 - protein, 550 aa, Escherichia coli; identical to SEQ ID NO: 4795

SEQ ID NO: 6050 - protein, 235 aa, Escherichia coli; identical to SEQ ID NO: 4796

SEQ ID NO: 6051 - protein, 367 aa, Escherichia coli; identical to SEQ ID NO: 4803

SEQ ID NO: 6052 - protein, 550 aa, Escherichia coli; identical to SEQ ID NO: 4795

SEQ ID NO: 6053 - protein, 235 aa, Escherichia coli; identical to SEQ ID NO: 4796

SEQ ID NO: 6054 - protein, 367 aa, Escherichia coli; identical to SEQ ID NO: 4803

SEQ ID NO: 6055 - protein, 550 aa, Escherichia coli; identical to SEQ ID NO: 4795

SEQ ID NO: 6056 - protein, 235 aa, Escherichia coli; identical to SEQ ID NO: 4796

SEQ ID NO: 6057 - protein, 367 aa, Escherichia coli; identical to SEQ ID NO: 4803

SEQ ID NO: 6058 - protein, 550 aa, Escherichia coli; identical to SEQ ID NO: 4795

SEQ ID NO: 6059 - protein, 235 aa, Escherichia coli; identical to SEQ ID NO: 4796

SEQ ID NO: 6060 - protein, 367 aa, Escherichia coli; identical to SEQ ID NO: 4797

SEQ ID NO: 6061 - protein, 550 aa, Escherichia coli; identical to SEQ ID NO: 4795

SEQ ID NO: 6062 - protein, 235 aa, Escherichia coli; identical to SEQ ID NO: 4796

SEQ ID NO: 6063 - protein, 367 aa, Escherichia coli; identical to SEQ ID NO: 4797

SEQ ID NO: 6064 - protein, 550 aa, Escherichia coli; identical to SEQ ID NO: 4795

SEQ ID NO: 6065 - protein, 235 aa, Escherichia coli; identical to SEQ ID NO: 4796

SEQ ID NO: 6066 - protein, 367 aa, Escherichia coli; identical to SEQ ID NO: 4797

SEQ ID NO: 6067 - protein, 550 aa, Escherichia coli; identical to SEQ ID NO: 4795

SEQ ID NO: 6068 - protein, 235 aa, Escherichia coli; identical to SEQ ID NO: 4796

SEQ ID NO: 6069 - protein, 367 aa, Escherichia coli; identical to SEQ ID NO: 4797

SEQ ID NO: 6070 - protein, 550 aa, Escherichia coli O157:H7; identical to SEQ ID NO: 4795

SEQ ID NO: 6071 - protein, 235 aa, Escherichia coli O157:H7; identical to SEQ ID NO: 4796

SEQ ID NO: 6072 - protein, 367 aa, Escherichia coli O157:H7; identical to SEQ ID NO: 4797

SEQ ID NO: 6073 - protein, 550 aa, Escherichia coli; identical to SEQ ID NO: 4795

SEQ ID NO: 6074 - protein, 235 aa, Escherichia coli; identical to SEQ ID NO: 4796

SEQ ID NO: 6075 - protein, 367 aa, Escherichia coli; identical to SEQ ID NO: 4797

SEQ ID NO: 6076 - protein, 550 aa, Escherichia coli; identical to SEQ ID NO: 5530

SEQ ID NO: 6077 - protein, 235 aa, Escherichia coli; identical to SEQ ID NO: 4796

SEQ ID NO: 6078 - protein, 367 aa, Escherichia coli; identical to SEQ ID NO: 4821

SEQ ID NO: 6079 - protein, 550 aa, Escherichia coli; identical to SEQ ID NO: 5530

SEQ ID NO: 6080 - protein, 235 aa, Escherichia coli; identical to SEQ ID NO: 4796

SEQ ID NO: 6081 - protein, 367 aa, Escherichia coli; identical to SEQ ID NO: 4821

SEQ ID NO: 6082 - protein, 550 aa, Escherichia coli; identical to SEQ ID NO: 4795

SEQ ID NO: 6083 - protein, 235 aa, Escherichia coli; identical to SEQ ID NO: 4796

SEQ ID NO: 6084 - protein, 367 aa, Escherichia coli; identical to SEQ ID NO: 4797

SEQ ID NO: 6085 - protein, 550 aa, Escherichia coli; identical to SEQ ID NO: 4795

SEQ ID NO: 6086 - protein, 235 aa, Escherichia coli; identical to SEQ ID NO: 4796

SEQ ID NO: 6087 - protein, 367 aa, Escherichia coli; identical to SEQ ID NO: 4797

SEQ ID NO: 6088 - protein, 550 aa, Escherichia coli; identical to SEQ ID NO: 4795

SEQ ID NO: 6089 - protein, 235 aa, Escherichia coli; identical to SEQ ID NO: 4796

SEQ ID NO: 6090 - protein, 367 aa, Escherichia coli; identical to SEQ ID NO: 4797

SEQ ID NO: 6091 - protein, 550 aa, Escherichia coli; identical to SEQ ID NO: 4795

SEQ ID NO: 6092 - protein, 235 aa, Escherichia coli; identical to SEQ ID NO: 4796

SEQ ID NO: 6093 - protein, 367 aa, Escherichia coli; identical to SEQ ID NO: 4797

SEQ ID NO: 6094 - protein, 550 aa, Escherichia coli; identical to SEQ ID NO: 4795

SEQ ID NO: 6095 - protein, 235 aa, Escherichia coli; identical to SEQ ID NO: 4796

SEQ ID NO: 6096 - protein, 367 aa, Escherichia coli; identical to SEQ ID NO: 4797

SEQ ID NO: 6097 - protein, 550 aa, Escherichia coli; identical to SEQ ID NO: 4795

SEQ ID NO: 6098 - protein, 235 aa, Escherichia coli; identical to SEQ ID NO: 4796

SEQ ID NO: 6099 - protein, 367 aa, Escherichia coli; identical to SEQ ID NO: 4797

SEQ ID NO: 6100 - protein, 550 aa, Escherichia coli; identical to SEQ ID NO: 4795

SEQ ID NO: 6101 - protein, 235 aa, Escherichia coli; identical to SEQ ID NO: 4796

SEQ ID NO: 6102 - protein, 367 aa, Escherichia coli; identical to SEQ ID NO: 4797

SEQ ID NO: 6103 - protein, 550 aa, Escherichia coli; identical to SEQ ID NO: 4795

SEQ ID NO: 6104 - protein, 235 aa, Escherichia coli; identical to SEQ ID NO: 4796

SEQ ID NO: 6105 - protein, 367 aa, Escherichia coli; identical to SEQ ID NO: 4797

SEQ ID NO: 6106 - protein, 550 aa, Escherichia coli O157:H7; identical to SEQ ID NO: 4795

SEQ ID NO: 6107 - protein, 235 aa, Escherichia coli O157:H7; identical to SEQ ID NO: 4796

SEQ ID NO: 6108 - protein, 367 aa, Escherichia coli O157:H7; identical to SEQ ID NO: 4797

SEQ ID NO: 6109 - protein, 550 aa, Escherichia coli
MLAQLFEQLFQSIDSTLITNIFIWAVIFVFLSAWWCDKKNIHSKFREYAPTLMGALGILGTFIGIIIGLLNFNTESIDTSIPVLLGGLKTAFITSIVGMFFAILFNGMDAFFFANKRSALAENNPESVTPEHIYHELKEQNQTLTKLVSGINGDSEGSLIAQIKLLRTEISDSSQAQLANHTHFSNKLWEQLEQFADLMAKGATEQIIDALRQVIIDFNQNLTEQFGENFKALDASVKKLVEWQGNYKTQIEQMSEQYQQSVESLVETKTAVAGIWEECKEIPLAMSELREVLQVNQHQISELSRHLETFVAIRDKATTVLPEIQNKMAEVGELLKSGAANVSASLEQTSQQILLNADSMRVALDEGTEGFRQSVTQTQQAFASMAHDVSNSSETLTSTLGETITEMKQSGEEFLKSLESHSKELHRNMEQNTTNVIDMFSKTGEKINHQLSSNADNMFDSIQTSFDKAGAGLTSQVRESIEKFALSINEQLHAFEQATEREMNREMQSLGNALLSISKGFVGNYEKLIKDYQIVMGQLQALISANKHRG

SEQ ID NO: 6110 - protein, 235 aa, Escherichia coli; identical to SEQ ID NO: 4796

SEQ ID NO: 6111 - protein, 367 aa, Escherichia coli; identical to SEQ ID NO: 4803

SEQ ID NO: 6112 - protein, 550 aa, Escherichia coli; identical to SEQ ID NO: 6109

SEQ ID NO: 6113 - protein, 235 aa, Escherichia coli; identical to SEQ ID NO: 4796

SEQ ID NO: 6114 - protein, 367 aa, Escherichia coli; identical to SEQ ID NO: 4803

SEQ ID NO: 6115 - protein, 550 aa, Escherichia coli; identical to SEQ ID NO: 4804

SEQ ID NO: 6116 - protein, 235 aa, Escherichia coli; identical to SEQ ID NO: 5273

SEQ ID NO: 6117 - protein, 367 aa, Escherichia coli; identical to SEQ ID NO: 5274

SEQ ID NO: 6118 - protein, 550 aa, Escherichia coli; identical to SEQ ID NO: 4804

SEQ ID NO: 6119 - protein, 235 aa, Escherichia coli; identical to SEQ ID NO: 4796

SEQ ID NO: 6120 - protein, 367 aa, Escherichia coli; identical to SEQ ID NO: 4806

SEQ ID NO: 6121 - protein, 550 aa, Escherichia coli; identical to SEQ ID NO: 4804

SEQ ID NO: 6122 - protein, 235 aa, Escherichia coli; identical to SEQ ID NO: 5273

SEQ ID NO: 6123 - protein, 367 aa, Escherichia coli; identical to SEQ ID NO: 5274

SEQ ID NO: 6124 - protein, 550 aa, Escherichia coli; identical to SEQ ID NO: 4804

SEQ ID NO: 6125 - protein, 235 aa, Escherichia coli; identical to SEQ ID NO: 4796

SEQ ID NO: 6126 - protein, 367 aa, Escherichia coli; identical to SEQ ID NO: 4806

SEQ ID NO: 6127 - protein, 550 aa, Escherichia coli; identical to SEQ ID NO: 4804

SEQ ID NO: 6128 - protein, 235 aa, Escherichia coli; identical to SEQ ID NO: 5273

SEQ ID NO: 6129 - protein, 367 aa, Escherichia coli; identical to SEQ ID NO: 5274

SEQ ID NO: 6130 - protein, 550 aa, Escherichia coli; identical to SEQ ID NO: 4804

SEQ ID NO: 6131 - protein, 235 aa, Escherichia coli; identical to SEQ ID NO: 5273

SEQ ID NO: 6132 - protein, 367 aa, Escherichia coli; identical to SEQ ID NO: 5274

SEQ ID NO: 6133 - protein, 550 aa, Escherichia coli; identical to SEQ ID NO: 4804

SEQ ID NO: 6134 - protein, 235 aa, Escherichia coli; identical to SEQ ID NO: 5273

SEQ ID NO: 6135 - protein, 367 aa, Escherichia coli; identical to SEQ ID NO: 5274

SEQ ID NO: 6136 - protein, 550 aa, Escherichia coli; identical to SEQ ID NO: 4804

SEQ ID NO: 6137 - protein, 235 aa, Escherichia coli; identical to SEQ ID NO: 5273

SEQ ID NO: 6138 - protein, 367 aa, Escherichia coli; identical to SEQ ID NO: 5274

SEQ ID NO: 6139 - protein, 550 aa, Escherichia coli; identical to SEQ ID NO: 4804

SEQ ID NO: 6140 - protein, 235 aa, Escherichia coli; identical to SEQ ID NO: 5273

SEQ ID NO: 6141 - protein, 367 aa, Escherichia coli; identical to SEQ ID NO: 5274

SEQ ID NO: 6142 - protein, 550 aa, Escherichia coli; identical to SEQ ID NO: 4804

SEQ ID NO: 6143 - protein, 235 aa, Escherichia coli; identical to SEQ ID NO: 5273

SEQ ID NO: 6144 - protein, 367 aa, Escherichia coli; identical to SEQ ID NO: 5274

SEQ ID NO: 6145 - protein, 550 aa, Escherichia coli; identical to SEQ ID NO: 4804

SEQ ID NO: 6146 - protein, 235 aa, Escherichia coli; identical to SEQ ID NO: 5273

SEQ ID NO: 6147 - protein, 367 aa, Escherichia coli; identical to SEQ ID NO: 5274

SEQ ID NO: 6148 - protein, 550 aa, Escherichia coli; identical to SEQ ID NO: 4804

SEQ ID NO: 6149 - protein, 235 aa, Escherichia coli; identical to SEQ ID NO: 4796

SEQ ID NO: 6150 - protein, 367 aa, Escherichia coli; identical to SEQ ID NO: 4806

SEQ ID NO: 6151 - protein, 550 aa, Escherichia coli; identical to SEQ ID NO: 4795

SEQ ID NO: 6152 - protein, 235 aa, Escherichia coli; identical to SEQ ID NO: 4796

SEQ ID NO: 6153 - protein, 367 aa, Escherichia coli; identical to SEQ ID NO: 4797

SEQ ID NO: 6154 - protein, 550 aa, Escherichia coli; identical to SEQ ID NO: 4846

SEQ ID NO: 6155 - protein, 235 aa, Escherichia coli; identical to SEQ ID NO: 4796

SEQ ID NO: 6156 - protein, 367 aa, Escherichia coli; identical to SEQ ID NO: 4848

SEQ ID NO: 6157 - protein, 550 aa, Escherichia coli
MLAQLFEQLFQSIDSTLITNIFIWAVIFVFLSAWWCDKKNIHSKFREYAPTLMGALGILGTFIGIIIGLLNFNTESIDTSIPVLLGGLKTAFITSIVGMFFAILFNGMDTFFFANKRSALAENNPESVTPEHIYHELKEQNQTLTKLVSGINGDSEGSLIAQIKLLRTEISDSSQAQLANHTHFSNKLWEQLEQFADLMAKGATEQIIDALRQVIIDFNENLTEQFGENFKALDASVKKLVEWQENYKTQVELMSEQYQQSVESLVETKTAVAGIWEECKEIPLAMSELREVLQVNQHQISELSRHLETFVAIRDKATTVLPEIQNKMAEVGELLKSGAANVSASLEQTSQQILLNADSMRVALDEGTEGFRQSVTQTQQAFASMAHDVSNSSETLTSTLGETITEMKQSGEEFLKSLESHSKELHRNMEQNTTNVIDMFSKTGEKINHQLSSNADNMFDSIQTSFDKASAGLTSQVRESIEKFALSINEQLHAFEQATEREMNREMQSLGNALLSISKGFVGNYEKLIKDYQIIMGQLQALISANKHRG

SEQ ID NO: 6158 - protein, 235 aa, Escherichia coli; identical to SEQ ID NO: 4796

SEQ ID NO: 6159 - protein, 367 aa, Escherichia coli; identical to SEQ ID NO: 5349

SEQ ID NO: 6160 - protein, 550 aa, Escherichia coli; identical to SEQ ID NO: 5950

SEQ ID NO: 6161 - protein, 235 aa, Escherichia coli; identical to SEQ ID NO: 5951

SEQ ID NO: 6162 - protein, 365 aa, Escherichia coli; identical to SEQ ID NO: 5952

SEQ ID NO: 6163 - protein, 550 aa, Escherichia coli; identical to SEQ ID NO: 5950

SEQ ID NO: 6164 - protein, 235 aa, Escherichia coli; identical to SEQ ID NO: 5951

SEQ ID NO: 6165 - protein, 365 aa, Escherichia coli; identical to SEQ ID NO: 5952

SEQ ID NO: 6166 - protein, 550 aa, Klebsiella oxytoca G54
MLAQLFEHLFQSIDSTLVTNIFIWAVIFVFCAAWWCDHKNIHNKFREYAPTLMGALGILGTFIGIIIGLLNFNTESIDTSIPVLLGGLKTAFITSIVGMFFAILFNGLDAFFFANKRRLLEANTPASVTPEHIHQELKEQNKHLVKLISGMSGSEEGSIVAQIKLLRNEISDASRAQISNHSNFSNKLWEQLQQFADLMAKGATEQIIDALRQVIIDFNNNLTEQFGENFKALDTSVKKLVDWQENYKNQVEQMGEQYQQSVESLVETRKAVAGIWEECKEIPLAMAELRDVLQVNQHQIGELSRHLETFVAIRDKATDVLPEIQTKMSEVGELLKLGAANVSASLEQTSQQILINADSMRVALDEGTEGFRQSVTQTQQAFASMAHDVSNSSETLTSTLGDTITEMKQSGDEFLKSLETHSRELHRNMEQNTTNVIDMFSKTGEKFNQQLSSNADNMFGSMQSSFDKASAGLTSQVKESIEKFGSSINEQLHAFEQATEREMNREMQSLGNALLSISKGFVGNYERLLKEYQAVMGQLQTLISANQKRG

SEQ ID NO: 6167 - protein, 235 aa, Klebsiella oxytoca G54; identical to SEQ ID NO: 4781

SEQ ID NO: 6168 - protein, 363 aa, Klebsiella oxytoca G54
MKLSIDISELIQLGRKMLPEGVDFFLDETPVVFDPIDIELSAGKEVRIEDLDPGSGLISYQGRQVLLYIRDHTGRYDAAIEDGEKGKRFHIAWCRTLDDMRQKNRFERYHATNRVDGLFEIDDGLGRSQDVALKVCMNCLERLNYKGSIDKQQKRVIFKSFSLNEFFSDYSTCFRHMPKGIYDKSNSGYVENWKDISRTTREQANYKCSDCGVNLMSMKSLCDVHHKNGIKYDNSAENLLVLCKDCHRKQPLHEGIFVTQADMAIIQRLRSQQGLLKAESWKDIYDLTDPSIHGDINIMQHKGYPPPVPGLDLQNAEHEIIATVEAAWPVSKIAVNLTPVKVDGWKVFSVGELVKEIQSGVIF

SEQ ID NO: 6169 - protein, 550 aa, Klebsiella oxytoca 10-5249; identical to SEQ ID NO: 6166

SEQ ID NO: 6170 - protein, 235 aa, Klebsiella oxytoca 10-5249; identical to SEQ ID NO: 4781

SEQ ID NO: 6171 - protein, 363 aa, Klebsiella oxytoca 10-5249; identical to SEQ ID NO: 6168

SEQ ID NO: 6172 - protein, 550 aa, Klebsiella pneumoniae MGH 18; identical to SEQ ID NO: 6166

SEQ ID NO: 6173 - protein, 235 aa, Klebsiella pneumoniae MGH 18; identical to SEQ ID NO: 4781

SEQ ID NO: 6174 - protein, 363 aa, Klebsiella pneumoniae MGH 18
MKLSIDISELIQLGRKMLPEGVDFFLDETPVVFDPIDIELSAGKEVRIEDLDPGSGLISYQGRQVLLYIRDHTGRYDAAIEDGEKGKRFHIAWCRTLDDMRHKNRFERYHATNRVDGLFEIDDGLGRSQDVALKVCMNCLERLNYKGSIDKQQKRVIFKSFSLNEFFSDYSTCFRHMPKGIYDKSNSGYVENWKDISRTTREQANYKCNDCGVNLMSMKSLCDVHHKNGIKYDNSAENLLVLCKDCHRKQPLHEGIFVTQADMAIIQRLRSQQGLLKAESWKDIYDLTDPSIHGDINIMQHKGYPPPVPGLDLQNAEHEIIATVEAAWPVSKIAVNLTPVKVDGWKVFSVGELVKEIQSGVIF

SEQ ID NO: 6175 - protein, 550 aa, Klebsiella pneumoniae MGH 74; identical to SEQ ID NO: 6166

SEQ ID NO: 6176 - protein, 235 aa, Klebsiella pneumoniae MGH 74
MDKILGKQAPKKDQDNEHWVSMSDLMAGLMMVFMFISIAYMHYVRIEKEKIKEVAVAYENAQLQLYNALETEFTKDLPAWDAEIDKQTLEVRFKSPDVLFGLGSTELKPKFKQILDNFFPRYLKVLDNYQEHITEVRIEGHTSTDWNGASNSDMAYFNNMELSQGRTRAVLQYVYGLKESAAHQKWVKSKFAAVGYSSAHPILDKSGKEDPNRSRRVTFKVVTNAELQIRKIIQE

SEQ ID NO: 6177 - protein, 363 aa, Klebsiella pneumoniae MGH 74
MKLSIDISELIQLGRKMLPEGVDFFLDETSVVFDPIDIELSAGKEVRIEDLDPGSGLISYQGRQVLLYIRDHTGRYDAAIEDGEKGKRFHIAWCRTLDDMRQKNRFERYHATNRVDGLFEIDDGLGRSQDVALKVCMNCLERLNYKGSIDKQQKRVIFKSFSLNEFFSDYSTCFRHMPKGIYDKSNSGYVENWKDISRTTREQANYKCNDCGVNLMSMKSLCDVHHKNGIKYDNSAENLLVLCKDCHRKQPLHEGIFVTQADMAIIQRLRSQQGLLKAESWKDIYDLTDPSIHGDINIMQHKGYPPPVPGLDLQNAEHEIIATVEAAWPVSKIAVNLTPVKVDGWKVFSVGELVKEIQSGVIF

SEQ ID NO: 6178 - protein, 550 aa, Klebsiella pneumoniae
MLAQLFEHLFQSIDSTLVTNIFIWAVIFVFCAAWWCDHKNIHIKFREYAPTLMGALGILGTFIGIIIGLLNFNTESIDTSIPVLLGGLKTAFITSIVGMFFAILFNGLDAFFFANKRRLLEANTPASVTPEHIHQELKEQNKHLVKLISGMSGSEEGSIVAQIKLLRNEISDASRAQISNHSNFSNKLWEQLQQFADLMAKGATEQIIDALRQVIIDFNNNLTEQFGENFKALDTSVKKLVDWQENYKNQVEQMGEQYQQSVESLVETRKAVAGIWEECKEIPLAMAELRDVLQVNQHQIGELSRHLETFVAIRDKATDVLPEIQTKMSEVGELLKLGAANVSASLEQTSQQILINADSMRVALDEGTEGFRQSVTQTQQAFASMAHDVSNSSETLTSTLGDTITEMKQSGDEFLKSLETHSRELHRNMEQNTTNVIDMFSKTGEKFNQQLSSNADNMFGSMQSSFDKASAGLTSQVKESIEKFGSSINEQLHAFEQATEREMNREMQSLGNALLSISKGFVGNYERLLKEYQAVMGQLQTLISANQKRG

SEQ ID NO: 6179 - protein, 235 aa, Klebsiella pneumoniae; identical to SEQ ID NO: 4781

SEQ ID NO: 6180 - protein, 363 aa, Klebsiella pneumoniae; identical to SEQ ID NO: 4782

SEQ ID NO: 6181 - protein, 550 aa, Klebsiella pneumoniae; identical to SEQ ID NO: 6166

SEQ ID NO: 6182 - protein, 235 aa, Klebsiella pneumoniae; identical to SEQ ID NO: 4781

SEQ ID NO: 6183 - protein, 363 aa, Klebsiella pneumoniae; identical to SEQ ID NO: 6174

SEQ ID NO: 6184 - protein, 550 aa, Serratia marcescens
MLAQLFEHLFRSIDSMFVTNFFIWAVVFIFFSAWWCDYKNIHSKFREYAPTLMGALGILGTFIGIIIGLLNFNTESIDTSIPLLLGGLKTAFITSIIGMFFAILFNALDAFFFANKRDNLTESVPETITPEHIHHELKENNQYLEKMISGLSGNEEGSLVAQVKLLRNEINDASRAQLSHHTEFSNKLWEQLKQFADLMAKGATEQIIDALKQVIIDFNNNLTEQFGENFKALDASVKKLVDWQDNYKNQIENMSEQYQQSVDSLVETRGAVAGIWEECKEIPLAMATLHDVLKVNQHQINELSQHLDAFVLLRDKATDAVPVIHEKLDEVGELLKAGALSVSSSLDQTGAELLANANAMRIALDEGSEGFRQSVTQTQQAFASMAHDVSNSSETLTSTLGETITEMKQSGDDFLKSLEAHSKELHRNMEKNTTDVIELFSKTGDKFNQQLSSNAENMFGTMQSSFDKASAGLTSQVKESVERFGGAINEQLHAFEQATEREMNREMQSLGNALLSISQGFVKNYDHLIKEYQSVLGQLQPLINSRQHRG

SEQ ID NO: 6185 - protein, 205 aa, Serratia marcescens
MVFMFISIAYMHYVRIEKEKIKEVAVAYEQAQQQLYNALNVEFSKDLPDWDAEIDKQTLEVRFKSPDVLFGLGSSELKPKFKEILNNFFPRYLKVLDQYKEHITEVRIEGHTSTDWTGAANQDEAYFNNMELSQGRTRAVLQYVHSLKESSAHQKWVKSKFSAVGYSSSHPILNAMGKEDQNRSRRVTFKVITNAELQIRRIIQE

SEQ ID NO: 6186 - protein, 363 aa, Serratia marcescens
MKLTVDFSELIALGKKMLPSGAEFSLAEAPVVFDPIDIELSAGKEVSIDDLDPGSGLISYQGRQVLLYIRDHTGRYDAAIEDGENGKRFHIAWCRKLDEMRQKNRFERYHATNRVDGFFEIDDGAGRYQDADLKVCKFCLERLNYKGSIDYRTRQKIFTQFTLDDFFSHYSTCFRHMPKGIYDKANSGYVDNWKDISRSIREHANYKCNDCGVNLTSSRHLCDVHHKNGVKYDNSAENLHVVCKDCHRKQPFHEGMFISQADMETIQHLRSQQGLLKVDSWKDIYDLTDASIHGDINIMQHKGYPLPVLRFDLQNSTHKTITTVEAAWPKFKIAINLTEVKVEGWKIFTVGELVKSIQSGVVF

SEQ ID NO: 6187 - protein, 550 aa, Serratia marcescens; identical to SEQ ID NO: 6184

SEQ ID NO: 6188 - protein, 205 aa, Serratia marcescens; identical to SEQ ID NO: 6185

SEQ ID NO: 6189 - protein, 363 aa, Serratia marcescens; identical to SEQ ID NO: 6186

SEQ ID NO: 6190 - protein, 550 aa, Serratia marcescens; identical to SEQ ID NO: 6184

SEQ ID NO: 6191 - protein, 205 aa, Serratia marcescens; identical to SEQ ID NO: 6185

SEQ ID NO: 6192 - protein, 363 aa, Serratia marcescens; identical to SEQ ID NO: 6186

SEQ ID NO: 6193 - protein, 550 aa, Serratia marcescens; identical to SEQ ID NO: 6184

SEQ ID NO: 6194 - protein, 205 aa, Serratia marcescens; identical to SEQ ID NO: 6185

SEQ ID NO: 6195 - protein, 363 aa, Serratia marcescens; identical to SEQ ID NO: 6186

SEQ ID NO: 6196 - protein, 550 aa, Serratia marcescens; identical to SEQ ID NO: 6184

SEQ ID NO: 6197 - protein, 205 aa, Serratia marcescens; identical to SEQ ID NO: 6185

SEQ ID NO: 6198 - protein, 363 aa, Serratia marcescens; identical to SEQ ID NO: 6186

SEQ ID NO: 6199 - protein, 550 aa, Serratia marcescens; identical to SEQ ID NO: 6184

SEQ ID NO: 6200 - protein, 205 aa, Serratia marcescens; identical to SEQ ID NO: 6185

SEQ ID NO: 6201 - protein, 363 aa, Serratia marcescens; identical to SEQ ID NO: 6186

SEQ ID NO: 6202 - protein, 550 aa, Serratia marcescens
MLAQLFEHLFRSIDSMFVTNFFIWAVVFIFFSAWWCDYKNIHSKFREYAPTLMGALGILGTFIGIIIGLLNFNTESIDTSIPLLLGGLKTAFITSIIGMFFAILFNALDAFFFANKRDNLTESVPETITPEHIHHELKENNQYLEKMISGLSGNEEGSLVAQVKLLRNEINDASRAQLSHHTEFSNKLWEQLKQFADLMAKGATEQIIDALKQVIIDFNNNLTEQFGENFKALDASVKKLVDWQDNYKNQIENMSEQYQQSVDSLVETRGAVAGIWEECKEIPLAMAALHDVMKVNQHQINELSQHLDAFVLLRDKATDAVPVIHEKLDEVGELLKAGALSVSSSLDQTGAELLANANAMRIALDEGSEGFRQSVTQTQQAFASMAHDVSNSSETLTSTLGETITEMKQSGDDFLKSLEAHSKELHRNMEKNTTDVIELFSKSGDKFNQQLSSNAENMFGAMQSSFDKASAGLTSQVKESVDRFGGAINEQLHAFEQATEREMNREMQSLGNALLSISQGFVKNYDHLIKEYQSVLGQLQPLINSRQHRG

SEQ ID NO: 6203 - protein, 205 aa, Serratia marcescens
MVFMFISIAYMHYVRIEKEKIKEVAVAYEQAQQQLYNALNIEFSNDLPDWDAEIDKQTLEVRFKSPDVLFGLGSSELKPKFKEILNNFFPRYLKVLDQYKEHITEVRIEGHTSTDWTGAANQDEAYFNNMELSQGRTRAVLQYVHSLKESSAHQKWVKSKFSAVGYSSSHPILNTMGKEDQNRSRRVTFKVITNAELQIRRIIQE

SEQ ID NO: 6204 - protein, 363 aa, Serratia marcescens
MKLTVDFSELIALGKKMLPSGAEFSLTEAPVVFDPIDIELSAGKEVSIDDLDPGSGLISYQGRQVLLYIRDHTGRYDAAIEDGKNGKRFHIAWCRKLDEMRQKNRFERYHATNRVDGFFEIDDGAGRYQDADLKVCKLCLERLNYKGSIDYRTRQKIFTQFTLNDFFSHYSTCFRHMPKGIHDKANSGYVDNWKYISRSVREHANYKCNDCGVNLTSSRHLCDVHHKNGVKYDNSAENLHVVCKDCHRKQPFHEGMFISQADMATIQHLRSQQGLLKVDSWKDIYDLTDASIHGDINIMQHKGYPLPVLRFDLQNSTHKTITTVEAAWPKFKIAINLTEVKVEDWKIFTVGELVKSIQSGVVF

SEQ ID NO: 6205 - protein, 550 aa, Serratia marcescens; identical to SEQ ID NO: 6184

SEQ ID NO: 6206 - protein, 205 aa, Serratia marcescens; identical to SEQ ID NO: 6185

SEQ ID NO: 6207 - protein, 363 aa, Serratia marcescens; identical to SEQ ID NO: 6186

SEQ ID NO: 6208 - protein, 550 aa, Serratia marcescens; identical to SEQ ID NO: 6184

SEQ ID NO: 6209 - protein, 205 aa, Serratia marcescens; identical to SEQ ID NO: 6185

SEQ ID NO: 6210 - protein, 363 aa, Serratia marcescens; identical to SEQ ID NO: 6186

SEQ ID NO: 6211 - protein, 550 aa, Serratia marcescens; identical to SEQ ID NO: 6184

SEQ ID NO: 6212 - protein, 205 aa, Serratia marcescens; identical to SEQ ID NO: 6185

SEQ ID NO: 6213 - protein, 363 aa, Serratia marcescens; identical to SEQ ID NO: 6186

SEQ ID NO: 6214 - protein, 550 aa, Serratia marcescens
MLAQLFEHLFRSIDSMFVTNFFIWAVVFIFFSAWWCDYKNIHGKFREYAPTLMGALGILGTFIGIIIGLLNFNTESIDTSIPLLLGGLKTAFITSIIGMFFAILFNALDAFFFANKRDNLTESVPETITPEHIHHELKENNQYLEKLISGLSGNEEGSLVAQVKLLRNEINDASRAQLSHHTEFSNKLWEQLKQFADLMAQGATEQIIDALKQVIIDFNNNLTEQFGENFKALDASVKKLVDWQDNYKNQIENMSEQYQQSVDSLVETRGAVAGIWEECKDIPLAMAALHDVMKVNQHQINELSQHLDAFVLLRDKATDAVPVIHEKLDEVGELLKAGALSVSSSLDQTGAELLANANAMRIALDEGSEGFRQSVTQTQQAFASMAHDVSNSSETLTSTLGETITEMKQSGDDFLKSLEAHSKELHRNMEKNTTDVIELFSKSGDKFNQQLSSNAENMFGAMQSSFDKASAGLTSQVKESVDRFGGAINEQLHAFEQATEREMNREMQSLGNALLSISQGFVKNYDHLIKEYQSVLGQLQPLINSRQHRG

SEQ ID NO: 6215 - protein, 205 aa, Serratia marcescens
MVFMFISIAYMHYVRIEKEKIKEVAVAYEQAQQQLYNALNIEFSNDLPDWDAEIDKQTLEVRFKSPDVLFGLGSSELKPKFKEILNNFFPRYLKVLDQYKEHITEVRIEGHTSTDWTGAANQDEAYFNNMELSQGRTRAVLQYVHSLKESSAHQKWVKSKFSAVGYSSSHPILNAMGKEDQNRSRRVTFKVITNAELQIRRIIQE

SEQ ID NO: 6216 - protein, 363 aa, Serratia marcescens
MKLTVDFSELIALGKKMLPSGAEFSLTEAPVVFDPIDIELSAGKEVSIDDLDPGSGLISYQGRQVLLYIRDHTGRYDAAIEDGKNGKRFHIAWCRKLDEMRQKNRFERYHATNRVDGFFEIDDGAGRYQDADLKVCKFCLERLNYKGSIDYRTRQKIFTQFTLNDFFSHYSTCFRHMPKGIHDKANSGYVDNWKYISRSVREHANYKCNDCGVNLTSSRHLCDVHHKNGVKYDNSAENLHVVCKDCHRKQPFHEGMFISQADMATIQHLRSQQGLLKVDSWKDIYDLTDASIHGDINIMQHKGYPLPVLRFDLQNSTHKTITTVEAAWPKFKIAINLTEVKVEDWKIFTVGELVKSIQSGVVF

SEQ ID NO: 6217 - protein, 550 aa, Serratia marcescens; identical to SEQ ID NO: 6184

SEQ ID NO: 6218 - protein, 205 aa, Serratia marcescens; identical to SEQ ID NO: 6185

SEQ ID NO: 6219 - protein, 363 aa, Serratia marcescens; identical to SEQ ID NO: 6186

SEQ ID NO: 6220 - protein, 550 aa, Serratia marcescens; identical to SEQ ID NO: 6184

SEQ ID NO: 6221 - protein, 205 aa, Serratia marcescens; identical to SEQ ID NO: 6185

SEQ ID NO: 6222 - protein, 363 aa, Serratia marcescens; identical to SEQ ID NO: 6186

SEQ ID NO: 6223 - protein, 550 aa, Serratia marcescens; identical to SEQ ID NO: 6184

SEQ ID NO: 6224 - protein, 205 aa, Serratia marcescens; identical to SEQ ID NO: 6185

SEQ ID NO: 6225 - protein, 363 aa, Serratia marcescens; identical to SEQ ID NO: 6186

SEQ ID NO: 6226 - protein, 550 aa, Serratia marcescens; identical to SEQ ID NO: 6184

SEQ ID NO: 6227 - protein, 205 aa, Serratia marcescens; identical to SEQ ID NO: 6185

SEQ ID NO: 6228 - protein, 363 aa, Serratia marcescens; identical to SEQ ID NO: 6186

SEQ ID NO: 6229 - protein, 550 aa, Serratia marcescens
MLAQLFEHLFRSIDSMFVTNFFIWAVVFIFFSAWWCDYKNIHSKFREYAPTLMGALGILGTFIGIIIGLLNFNTESIDTSIPLLLGGLKTAFITSIIGMFFAILFNALDAFFFANKRDNLTESVPETITPEHIHHELKENNQYLEKMISSLSGNEEGSLVAQVKLLRNEINDASRAQLSHHTEFSNKLWEQLKQFADLMAKGATEQIIDALKQVIIDFNNNLTEQFGENFKALDASVKKLVDWQDNYKNQIENMSEQYQQSVDSLVETRGAVAGIWEECKEIPLAMATLHDVLKVNQHQINELSQHLDAFVLLRDKATDAVPVIHEKLDEVGELLKAGALSVSSSLDQTGAELLANANAMRIALDEGSEGFRQSVTQTQQAFASMAHDVSNSSETLTSTLGETITEMKQSGDDFLKSLEAHSKELHRNMEKNTTDVIELFSKTGDKFNQQLSSNAENMFGTMQSSFDKASAGLTSQVKESVERFGGAINEQLHAFEQATEREMNREMQSLGNALLSISQGFVKNYDHLIKEYQSVLGQLQPLINSRQHRG

SEQ ID NO: 6230 - protein, 205 aa, Serratia marcescens; identical to SEQ ID NO: 6185

SEQ ID NO: 6231 - protein, 363 aa, Serratia marcescens; identical to SEQ ID NO: 6186

SEQ ID NO: 6232 - protein, 550 aa, Serratia marcescens; identical to SEQ ID NO: 6184

SEQ ID NO: 6233 - protein, 205 aa, Serratia marcescens; identical to SEQ ID NO: 6185

SEQ ID NO: 6234 - protein, 363 aa, Serratia marcescens; identical to SEQ ID NO: 6186

SEQ ID NO: 6235 - protein, 550 aa, Yersinia enterocolitica
MLAQLFEHLFHSVDSMLVTNIFIWAVILIFFSAWWCDYKNIHSKFREYAPTLMGALGILGTFIGIIIGLLNFNTESIDTSIPVLLGGLKTAFITSIVGMFFAIAFNALDAFFFANKRNKSATNEPEIITPDHIHHELKEQNQFLEKLVSGMSGSEEGSLVVQIKLLRNEINDTSRTQLSHHNEFSNKLWEQLQQFADLMAKGATEQIIDALRQVIIDFNNNLTEQFGENFKALDASVKKLVDWQENYKTQVEQMGAQYQQSVESLVETRGAVAGIWEECKEIPLAMAELRDVLQVNQHQIGELSQHLDAFVLLRDKATDAVPAIHEKLNEVGELLKAGALSVSTSLGQTGEELLTNANAMRIALDEGSEGFRQSVTQTQQAFASMAHDVSNSSETLTSTLGETITEMKQSGDEFLKSLESHSKDLHRNMEQNTASVIDLFTKTGDKFNQQLSNNADNMFGTIQSTFDKASAGLNSQVKESVERFGSSINEQLHAFEQATEREMNREMQALGNSLLAISQGFVKNYDHLIKEYQSVLGQLQPLINSRQNRG

SEQ ID NO: 6236 - protein, 235 aa, Yersinia enterocolitica
MDKIIGKPTPKKTQDNEHWVSMSDLMAGLMMVFMFISIAYMHYVRIEKEKIKEVAVAYEQAQQQLYNALEVEFSKDLPSWDAEIDKQTLEVRFKSPDVLFGLGSSDLKPKFKEILNDFFPRYLKVLDEYKQHITEVRIEGHTSTDWTGAANQDIAYFNNMELSQGRTRAVLQYVYSLKESAAHQKWVKSKFSAVGYSSSHPILTPEGKEDPSRSRRVTFKVITNAELQIRRIIQE

SEQ ID NO: 6237 - protein, 363 aa, Yersinia enterocolitica
MKLTLDFSELIALGKKMLPSGAKFSLDEALVVFDPIDIELSAGKEVSIADLDPGSGLISYQGRQVLLYIRDHSGRYDAAIEDGEKGKRFHIAWCRTLDEMRQKNRFERYHATNRVDGLFEIDDGLGRSQDADLRVCMNCLERLNYKGSIDKIQKRIIFKSFSLNNFFSHYSTCFRHMPKGIHDKANSGYVDNWRDISRSVREQSSYKCNDCGVDLSSTRQLCDVHHKNGVKYDNSAENLHVLCKDCHRKQPLHEGIFVTQAEMAIIQRLRSQQGLLKADSWKDIYELTDPSVHGDINIMQHKGYQPPVPGLDLQNSAHEIIATVEAAWPTLKIAVNLTEIQVEGWEIFTVGELVKQIQSGVIF

SEQ ID NO: 6238 - protein, 546 aa, Yersinia intermedia
MLAQLFEHLFHSVDSMLVTNIFIWAVILIFFSAWWCDYKNIHSKFREYAPTLMGALGILGTFIGIIIGLLNFNTESIDTSIPVLLGGLKTAFITSIVGMFFAIAFNALDAFFFANKRNKSATNETEIITPDHIHHELKEQNQFLEKLVSGMNGSEEGSLVAQIKLLRNEINDTSRIQLSHHNEFSNKLWEQLQQFADLMAKGATEQIIDALRQVITDFNNNLTEQFGENFKALDASVKKLVDWQENYKTQVEQMGAQYQQSVESLVETRGAVAGIWEECKEIPLAMAELRDVLQVNQHQIGELSQHLDAFVLLRDKATDAVPAIHEKLNEVGELLKAGALSVSTSLGQTGEELLTNANAMRIALDEGSEGFRQSVTQTQQAFASMAHDVSNSSETLTSTLGETITEMKQSGDEFLKSLESHSKDLHRNMEKNTASVIDLFTKTGDKFNQQLSNNADNMFGTIQSTFDKASAGLNSQVKESVERFGSSINEQLHAFEQATEREMNREMQALGNSLLAISQGFVKNYDHLIKEYQSILGQLQPLINSR

SEQ ID NO: 6239 - protein, 235 aa, Yersinia intermedia
MDKIIGKPTPKKTQDNEHWVSMSDLMAGLMMVFMFISIAYMHYVRIEKEKIKEVAVAYEQAQQQLYNALEVEFSKDLPSWDAEIDKQTLEVRFKSPDVLFGLGSSDLKPKFKEILNDFFPRYLKVLDEYKQHITEVRIEGHTSTDWTGAANQDIAYFNNMELSQGRTRAVLQYVYSLKESAGHQKWVKSKFSAVGYSSSHPILAPEGKEDPNRSRRVTFKVITNAELQIRRIIQE

SEQ ID NO: 6240 - protein, 363 aa, Yersinia intermedia
MKLTLDFSELIALGKKMLPSGAKFSLDEALVVFDPIDIELSAGKEVSIADLDPGSGLISYRGRQVLLYIRDHSGRYDAAIEDGEKGKRFHIAWCRTLDEMRQKNRFERYHATNRVDGLFEIDDGLGRSQDADLRVCMNCLERLNYKGSIDKIQKRIIFKSFSLNNFFSHYSTCFRHMPKGIHDKANSGYVDNWKEISRSVREQSSYKCNDCGVDLSSTRQLCDVHHKNGVKYDNSAENLHVLCKDCHRKQPLHEGIFVTQAEMAIIQRLRSQQGLLKADSWKDIYELTDPSVHGDINIMQHKGYQPPVPGLDLQNSAHEIIATVEAAWPTLKIAVNLTEIQVEGWEIFTVGELVKQIQSGVIF

SEQ ID NO: 6241 - protein, 590 aa, Vibrio alginolyticus
MTNSIAYFIASFSADAISNAFIYLITALLVVSFILAAFGKASRFTAATTNILTSLGILGTFAGIVVGLMDFDPTNIDGSIESLLSGLKTAFLTSLVGMAASILYKAILGALPKKAIDEQQAIGPEEIFSVMSQQLKASTDQLNTSNELLAAIRGDEDSSLTSQIKNLRTDINDGWRSLNEQLKQVNENHNEFRATLWAKMDEFGELLSKSATEQVINALKEVIVEFNDKLTEQFGENFKRLDESVKKLVDWQENYKNQLEDMSNKYQLGVDAISSTEKSVASINERAESIPATMEKLHQVMELGHGQVTELEHRLEAFKDLRDKAVEAMPQIKEQMDTTMSVIGESVKAASTHYESMLVESQKIIDNFSSTAHQSVETMRTNLEDGAKKVSTELETRAVEIGGRLAEASNDITDNVTTASGALQNSATYLTDNAEQVKQQLEDSIVELNSQLRVLVADIKDDARETGNVLKEANQELLGSTKEIQTETMSAITKLHDRLETTLEDIFQVQAQAIRRTFDSLEDQVTQSVGKAGSAVEKQVEVLDLQMQQEINRTMNEMGEALATITQQFTRDYQKLTREMSNVVNSKIAV

SEQ ID NO: 6242 - protein, 235 aa, Vibrio alginolyticus
MEKLFGKAKTTGDSGEHWMSVSDLMAGLMMVFLFISVALMRDAMLERDKIKEVAETYQKTQQAIYISLLEEFAKDLDKWGAEIDRDTLSVNFTAPEVLFANGEANLTEQFQIILDDFFPRYLKVLEQYKPIIQEIKIEGHTSSRWNHDSSDYEAYFNNMRLSQSRTRAVLGYVMNLEEVSREHYGWVKNNVAAVGYSSSKAVVHDGVEDEKRSRRVSFRVITNAEEQILKILGEG

SEQ ID NO: 6243 - protein, 361 aa, Vibrio alginolyticus
MKLTLNLSSLMHAIEVMEPEKKGAFTLDLQESHIDKISAELEQGKDVELKDVELESGLLSYKGRHVTLYIKANGSSARFHVSDCKTLQSMRASGRFERYVVTNNTSGEFIVDSGYGETKARLKVCQNCLRKLNYKGCNTTTDISSIVRTFDMGEFFSTYSSFFPHMPSRQAETAETGYSEDWTKVSSHYRVEKDFTCEQCNVKLRAHRHFLHVHHISGVKSDNRPKNLKALCIDCHSKQPMHSRMAVSHSERQLINKLRNEQGLLEDIGSWKRLFEYADPGVHGVLHACKDFGTKLPEVGYYVGDGFGDIVAKIELAWPAHKFGIAISQNDIDEAIQEGWHVLTISEFLADYRTQAHNLRW

SEQ ID NO: 6244 - protein, 583 aa, Vibrio harveyi
MTDFLASIIASYSAASISDAFIYTILLLLVASSILAFLGKAPRFTASTTNILTSLGILGTFAGIVVGLMEFNPTDIDGSIESLLAGLKTAFLTSLVGMAASIIYKAILGTIPQKGEDAIKGVGPEEIFQVMSQQLRSSNELLASIKGEEDTSLVSQLKKLRTDINDGQKEQTAYQNLKITQTEKFQATLWEKMDEFGELLSKSATEQVINALKEVIVEFNDKLTEQFGENFKRLDESVKKLVDWQENYKDQLEDMATKYQLGVDAISSTEKSVASINERAEAIPATMEKLHQVMELGHGQVTELEHRLEAFKDLRDKAVEAMPQIREQMDNTMSVIGESVKAASTHYESMLQESQSIIDNFSSTATQSVEVMRVNLEEGAVKVSNELENRAVEIGGRLAEASNDIQEQVGTATGGLHNMTNYLTDTTEQVRQHLEDSITELNGQLRVLVADIKDDARETGNVLKEANQELLNSTKEIQSETTSAISKLHDRLETTLEEVFQIQAQAVRRTFDSLEDQITQAVAQTGSAVEKQVEILDLQMQQEINRTMNEMGEALATITQQFTRDYQALTREMSNVVNSKIAV

SEQ ID NO: 6245 - protein, 235 aa, Vibrio harveyi
MEKLFGKTKSTGDGGEHWMSVSDLMAGLMMVFLFISVALMRDAMVERDKIKEVAETYQKTQQAIYIALLEEFAKDLDTWGAEIDRDTLSVNFTAPEVLFGNGKANLTQQFQVILNDFFPRYLEVLEQYKPIIQEIKIEGHTSSRWNHDSSDYEAYFNNMRLSQSRTRAVLGYVMKLDDVREQHYGWVKNNVAAVGYSSSKAVVKDNVEDEKRSRRVSFRVITNAEEQILKILGAE

SEQ ID NO: 6246 - protein, 371 aa, Vibrio harveyi
MKLNISFKSLLKAVEIMEPEEKGKFRVESTLEPLQTSPVVLINKEVELKDVDVDGCLLSYQGRQVLLYIKDHGQSAQSAINIPYSGKKFHIADCATLKNMREQGRFERYVATNDTSGEFVISGFGVEGKAVLRVCQNCLNALNYKGWSSGTSRTEILHKFNMPEFFATYSSFFPHMPSRRAETAESGYSDDWSKISSHYRVEKNFECEQCKVNMRSNRSLLHVHHVNGVKSDNRPSNLRALCIDCHSKQPMHEHMALSHRERQTINDLRKQQGLLEDLGEWQELFDYSDPGVHGVLHACRQAYLKLPDINYFVEDSFGGLAARLELAWPKHKFGVAISMNDIEDANSNGWQVVGINDFLENYKSQAYNLRH

SEQ ID NO: 6247 - protein, 583 aa, Vibrio harveyi
MTNFLASIIASYSATSISDVFIYTIFFLLIASSILAFLGKAPRFTASTTNILTSLGILGTFAGIVVGLMEFDPSNIDGSIESLLAGLKTAFLTSLVGMAASIIYKAILGAIPQKGDSTAKSVGPEEIHSVMSAQLNASNELLSAIKGDEDSSLTSQIKNLRIDINDGNKSLARHMEKAVEGNEKFQFKLWQKMDEFGELLSKSATEQVINALKEVIVEFNDKLTEQFGENFKRLDESVKKLVDWQENYKDQLADMATKYQLGVDAISSTEKSVASINERTEAIPATMEKLHQVMELGHGQVTELEHRLEAFKDLRDKAVEAMPQIREQMDNTMSVIGESVKAASTHYESMLQESQNIIDNFSSTATQSVEHMRTNLEAGAENVSSQLIESSQTLGGQLLEASTTFQDQVGTATGGLSNVTSHLTDTTEQIRQHLEDSITELNGQLRVLVADIKDDARETGNVLKEANQELLNSTKEIQSETTSAIKKLHDRLETTLEEVFKVQAEAVRRTFDSLEDQITQSVGRTGSAVEKQVEVLDLQMQQEINRTMNEMGEALATITQQFTRDYQALTREMSNVVNSKIAV

SEQ ID NO: 6248 - protein, 235 aa, Vibrio harveyi
MEKLFGKNKSMGDGGEHWMSVSDLMAGLMMVFLFISVALMRDAMVERDKIKEVAETYQKTQQAIYIALLEEFAKDLDTWGAEIDRDTLSVNFTAPEVLFGNGKANLTQQFQVILNDFFPRYLEVLDQYKPIIQEIKIEGHTSSRWNHDSSDYEAYFNNMRLSQSRTRAVLGYVMKLDDVRAQHYGWVKNNVAAVGYSSSKAVVKDGVEDEKRSRRVSFRVITNAEEQILKILGAE

SEQ ID NO: 6249 - protein, 378 aa, Vibrio harveyi
MKLTLNLHSLMRAIEIMEPEKKGVFVWDHQITEKSKIDIELAQGKDVELKDVDIDSGLLSYKGRQVLLYIKDHGSAVQSVIKKPSTGNKYHVADCSKLKSMRAEGRFERYVVTNDTSGEFPISGGGYYGQSREEGYARLNICKLCLGQLNYKGYSSGAHRSNIFNEFDMSEFFATYSSFFPHMPSRRAETAESGYSDDWSKISSHYRVERNFECEECKVNMRSNRSLLHVHHVNGVKSDNRPSNLRALCIDCHSKQPLHEHMALSHRERQTINDLRKQQGLLDDLGEWQELFDYSDPGVHGVLHACRQAYLKLPDINYFVEDSFGGLAARLELAWPNHKFGVAISMNDIEDANSNGWQVVGINDFLENYKSQAYNLRR

SEQ ID NO: 6250 - protein, 583 aa, Vibrio parahaemolyticus
MTNFLASMIASYSAASISDAFIYTIFFLLIASSILAFLGKAPRFTASTTNILTSLGILGTFAGIVVGLMEFDPSNIDGSIESLLSGLKTAFLTSLVGMAASIIYKAILGTIPQKGESVAKSVGPEEIHSVMSAQLNASNELLSAIKGDEDSSLTSQIKNLRTDINDGNKSLVRHMEKAVEGNEKFQFKLWQKMDEFGELLSKSATEQVINALKEVIVEFNDKLTEQFGENFKRLDESVKKLVDWQENYKDQLADMATKYQLGVDAISSTEKSVANINECTEAIPATMEKLHQVMELGHGQVTELEHRLEAFKDLRDKAVEAMPQIREQMDNTMSVIGESVKAASTHYESMLQESQNIIDNFSSTATQSVEHMRTNLEAGAENVSSQLIESSQTLGGQLLEASTTFQDQVGTATGGLSNVTSHLTDTTEQIRQHLEDSITELNGQLRVLVADIKDDARETGNVLKEANQELLNSTKEIQSETTSAIKKLHDRLETTLEEVFKVQAEAVRRTFDSLEDQITQSVGRTGSAVEKQVEVLDLQMQQEISRTMNEMGEALATITQQFTRDYQALTREMSNVVNSKIAV

SEQ ID NO: 6251 - protein, 235 aa, Vibrio parahaemolyticus
MEKLFGKTKSMGDGGEHWMSVSDLMAGLMMVFLFISVALMRDAMVERDKIKEVAETYQKTQQAIYIALLEEFAKDLDTWGAEIDRDTLSVNFTAPEVLFGNGKANLTQQFQVILNDFFPRYLEVLDQYKPIIQEIKIEGHTSSRWNHDSSDYEAYFNNMRLSQSRTRAVLGYVMKLDDVRAQHYGWVKNNVAAVGYSSSKAVVKDGVEDEKRSRRVSFRIITNAEEQILKILGAE

SEQ ID NO: 6252 - protein, 378 aa, Vibrio parahaemolyticus
MKLTLNLHSLMRAIEIMEPEKKGVFVWDHQITEKSKIDIELAQGKDVELKDVDIDSGLLSYQGRQVLLYIKDHGSAVQSVIKKPSTGNKYHVADCSKLKSMRAEGRFERYVVINDTSGEFPISGSGYCGQSKEEGYARLNICKLCLGQLNYKGYSSGGHRSNIFNEFDMPEFFATYSSFFPHMPSRRAETAESGYSDDWSKISSHYRVERNFECEECEVNMRSNRALLHVHHVSGVKSDNRPSNLRALCIDCHSKQPMHEHMALSHRERQTINDLRKQQGLLDDLGEWQELFDYSDPGVHGVLHACRQAYLKLPQINYFVEDSCGGIAARLELAWPKHKFGVAISMNDIEDANSNGWQVVGINDFLENYKSQAHNLRR

SEQ ID NO: 6253 - protein, 583 aa, Vibrio parahaemolyticus
MTELFATFIASYTAGSISDAFIYVILLLLALSSVLAFLGKAPRFTASTTNILTSLGILGTFAGIVVGLMEFNPSDIDGSIESLLAGLKTAFLTSLVGMAASIVYKAILGAIPQKEESAVKSVGPEEIYSVMSAQLDASNELLSAIKGDEDSSLTSQIKNLRTDINDGQKSLGRHLERAAENSEQFQLKLWQKMDEFGELLSKSATEQVINALKEVIVEFNDKLTEQFGENFKRLDESVKKLVDWQENYKNQLEDMSNKYQLGVDAISSTEKSVASINERAESIPATMEKLHQVMELGHGQVTELEHRLEAFKDLRDKAVEAMPQIKEQMDTTMSVIGESVKAASTHYESMLVESQKIIDNFSSTAHQSVETMRTNLEDGAKKVSTELETRAVEIGGRLAEASNDITDNVTTASGALQNSATYLTDNAEQVKQQLEDSIVELNSQLRVLVADIKDDARETGNVLKEANQELLSSTKEIQTETTSAITKLHDRLETTLEDIFQVQAQAIRRTFDSLEDQVTQSVGKTGSAVEKQVEVLDLQMQQEINRTMNEMGEALATITQQFTRDYQKLTREMSNVVNSKITV

SEQ ID NO: 6254 - protein, 235 aa, Vibrio parahaemolyticus
MEKLFGKAKTTGDSGEHWMSVSDLMAGLMMVFLFISVALMRDAMLERDKIKEVAETYQKTQQAIYISLLEEFAKDLDKWGAEIDRDTLSVNFTAPEVLFANGAANLTEQFQIILDDFFPRYLKVLEQYKPIIQEIKIEGHTSSRWNHDSSDYEAYFNNMRLSQSRTRAVLGYVMNLEEVNREHYGWVKNNVAAVGYSSSKAVVHDGVEDEKRSRRVSFRVITNAEEQILKILGAG

SEQ ID NO: 6255 - protein, 361 aa, Vibrio parahaemolyticus
MKLTLNLSSLMHAIEVMEPEKKGTFALDLQESHIDKISAELEQGKDVELKDVELESGLLSYKGRHVTLYIKANGSSARFHVSDCKTLQSMRASGRFERYVVTNNTSGEFIVDSGHGETKARLKVCQNCLRKLNYKGCNTTTDISSIVRTFDMGEFFSTYSSFFPHMPSRQAETAETGYSEDWTKVSSHYRVEKDFTCEQCNVKLRAHRHLLHVHHINGVKSDNRPKNLKALCIDCHSKQPMHSRMAVSHSERQLINKLRNEQGLLEDIGSWKRLFEYADPGVHGVLHACKDFGTKLPEVGYYVDDGFGDIVAKIELAWPAHKFGIAISQNDIDDAIQEGWHVLTISEFLADYRTQAHNLRW

SEQ ID NO: 6256 - protein, 486 aa, Vibrio parahaemolyticus EN9701072
MAASIIYKAILGTIPQKGESVAKSVGPEEIHSVMSAQLNASNELLSAIKGDEDSSLTSQIKNLRTDINDGNKSLVRHMEKAVEGNEKFQFKLWQKMDEFGELLSKSATEQVINALKEVIVEFNDKLTEQFGENFKRLDESVKKLVDWQENYKDQLADMATKYQLGVDAISSTEKSVANINECTEAIPATMEKLHQVMELGHGQVTELEHRLEAFKDLRDKAVEAMPQIREQMDNTMSVIGESVKAASTHYESMLQESQNIIDNFSSTATQSVEHMRTNLEAGAENVSSQLIESSQTLGGQLLEASTTFQDQVGTATGGLSNVTSHLTDTTEQIRQHLEDSITELNGQLRVLVADIKDDARETGNVLKEANQELLNSTKEIQSETTSAIKKLHDRLETTLEEVFKVQAEAVRRTFDSLEDQITQSVGRTGSAVEKQVEVLDLQMQQEISRTMNEMGEALATITQQFTRDYQALTREMSNVVNSKIAV

SEQ ID NO: 6257 - protein, 235 aa, Vibrio parahaemolyticus EN9701072; identical to SEQ ID NO: 6251

SEQ ID NO: 6258 - protein, 378 aa, Vibrio parahaemolyticus EN9701072; identical to SEQ ID NO: 6252

SEQ ID NO: 6259 - protein, 486 aa, Vibrio parahaemolyticus 3644; identical to SEQ ID NO: 6256

SEQ ID NO: 6260 - protein, 225 aa, Vibrio parahaemolyticus 3644
MGDGGEHWMSVSDLMAGLMMVFLFISVALMRDAMVERDKIKEVAETYQKTQQAIYIALLEEFAKDLDTWGAEIDRDTLSVNFTAPEVLFGNGKANLTQQFQVILNDFFPRYLEVLDQYKPIIQEIKIEGHTSSRWNHDSSDYEAYFNNMRLSQSRTRAVLGYVMKLDDVRAQHYGWVKNNVAAVGYSSSKAVVKDGVEDEKRSRRVSFRIITNAEEQILKILGAE

SEQ ID NO: 6261 - protein, 378 aa, Vibrio parahaemolyticus 3644; identical to SEQ ID NO: 6252

SEQ ID NO: 6262 - protein, 583 aa, Vibrio parahaemolyticus; identical to SEQ ID NO: 6250

SEQ ID NO: 6263 - protein, 235 aa, Vibrio parahaemolyticus; identical to SEQ ID NO: 6251

SEQ ID NO: 6264 - protein, 378 aa, Vibrio parahaemolyticus; identical to SEQ ID NO: 6252

SEQ ID NO: 6265 - protein, 583 aa, Vibrio parahaemolyticus; identical to SEQ ID NO: 6250

SEQ ID NO: 6266 - protein, 235 aa, Vibrio parahaemolyticus; identical to SEQ ID NO: 6251

SEQ ID NO: 6267 - protein, 378 aa, Vibrio parahaemolyticus; identical to SEQ ID NO: 6252

SEQ ID NO: 6268 - protein, 583 aa, Vibrio parahaemolyticus
MTNFLASMIASYSAASISDAFIYTIFFLLIASSILAFLGKAPRFTASTTNILTSLGILGTFAGIVVGLMEFDPSNIDGSIESLLSGLKTAFLTSLVGMAASIIYKAILGTIPQKGESVAKSVGPEEIHSVMSAQLNASNELLSAIKGDEDSSLTSQIKNLRTDINDGNKSLVRHMEKAVEGNEKFQFKLWQKMDEFGELLSKSATEQVINALKEVIVEFNDKLTEQFGENFKRLDESVKKLVDWQENYKDQLADMATKYQLGVDAISSTEKSVASINECTEAIPATMEKLHQVMELGHGQVTELEHRLEAFKDLRDKAVEAMPQIREQMDNTMSVIGESVKAASTHYESMLQESQNIIDNFSSTATQSVEHMRTNLEAGAENVSSQLIESSQTLGGQLLEASTTFQDQVGTATGGLSNVTSHLTDTTEQIRQHLEDSITELNGQLRVLVADIKDDARETGNVLKEANQELLNSTKEIQSETTSAIKKLHDRLETTLEEVFKVQAEAVRRTFDSLEDQITQSVGRTGSAVEKQVEVLDLQMQQEINRTMNEMGEALATITQQFTRDYQALTREMSNVVNSKIAV

SEQ ID NO: 6269 - protein, 235 aa, Vibrio parahaemolyticus; identical to SEQ ID NO: 6251

SEQ ID NO: 6270 - protein, 378 aa, Vibrio parahaemolyticus; identical to SEQ ID NO: 6252

SEQ ID NO: 6271 - protein, 583 aa, Vibrio parahaemolyticus
MTELFATFIASYTAGSISDAFIYVILLLLVLSSVLAFLGKAPRFTASTTNILTSLGILGTFAGIVVGLMEFNPSDIDGSIESLLAGLKTAFLTSLVGMAASIVYKAILGAIPQKDESAVKSVGPEEIYSVMSAQLNASNELLSAIKGDEDSSLTSQIKNLRTDINDGQKSLGRHLERAAENSEQFQHKLWQKMDEFGDLLSKSATEQVINALKEVIVEFNDKLTEQFGENFKRLDESVKKLVDWQENYKNQLEDMSNKYQLGVDAISSTEKSVASINERAESIPATMEKLHQVMELGHGQVTELEHRLEAFKDLRDKAVEAMPQIKEQMDTTMSVIGESVKAASTHYESMLVESQKIIDNFSSTAHQSVETMRTNLEDGAKKVSTELETRAVEIGGRLAEASNDITDNVTTASGALQNSATYLTDNAEQVKQQLEDSIVELNSQLRVLVADIKDDARETGNVLKEANQELLSSTKEIQTETTSAITKLHDRLETTLEDIFQVQAQAIRRTFDSLEDQVTQSVGKTGSAVEKQVEVLDLQMQQEINRTMNEMGEALATITQQFTRDYQKLTREMSNVVNSKIAV

SEQ ID NO: 6272 - protein, 235 aa, Vibrio parahaemolyticus; identical to SEQ ID NO: 6242

SEQ ID NO: 6273 - protein, 361 aa, Vibrio parahaemolyticus
MKLTLNLSSLMHAIEVMEPEKKGAFTLDLQESHIDKISAELEQGKDVELKDVELESGLLSYKGRHVTLYIKANGSSARFHVSDCKTLQSMRASGRFERYVVTNNTSGEFIVDSGYGETKARLKVCQNCLRKLNYKGCNTTTDISSIVRTFDMGEFFSTYSSFFPHMPSRQAETAETGYSEDWTKVSSHYRVEKDFTCEQCNVKLRAHRHLLHVHHISGVKSDNRPKNLKALCIDCHSKQPMHSRMAVSHSERQLINKLRNEQGLLEDIGSWKRLFEYADPGVHGVLHACKDFGTKLPEVGYYVGDGFGDIVAKIELAWPAHKFGIAISQNDIDDAIQEGWHVLTISEFLADYRTQAHNLRW

SEQ ID NO: 6274 - protein, 515 aa, Vibrio parahaemolyticus
MLCVSLAVLFMGFMWGVFLVNKRNPSNFVVTVPGLLTSGGVFFTFFGIALGLYDFDPDNLNSSISTLLSGLTLAFWSSIVGMGFSMLFKMCYLPKYYSKQSQLTAEDMQNVLCSQLSESKAHHQSSQHLLSELVSEIQLLRAYSSQEHAQSQESFNKLTSEINQFASSVSSQASQQIAESLQSSIEGFNQGLMGQFGANFQRLDESVLKMLQWQQQYKLQVEQLTSAFEHAVESVVATEQSLSLISNHTQTIPDAMDQLSETTDTWNQQITELDLRLEAFSTIRDKAVQAMPELQKQLDELCQRVDKSILNTCESLEKGVLKASTELQDKALALSEKLVEATDGIGGDLSNASGQIESMTNHLAASSDKIKGTLHDSISQLEDRLNSLVNGTKEDVLDISKTLSNVNESLIEKHREQLDKSEQLLTKAHDSIDKRIEETMNQQMMGSLQVQNTIKSHLVESSAVFHQNIQLELESILTDLGKGLLDITAEYSKAAKRLNKELHRFELGEVLEEAS

SEQ ID NO: 6275 - protein, 237 aa, Vibrio parahaemolyticus
MHNGLFQSRTASSGEEHWLSVTDLMAGLMVIFLLISVALMNRTDIEKRAIERIAVKISEKQLEIHRALAEEFEEDFKRWEIDFNEQRPLIIDFNAERYKFTKGKSALPEELTFVLGEFFPRYLSVLERYRNDIKAIQIEGHTSSGWNNDDSEFDAYYKNMNLSQNRSKQLFDHVMSQGEPLQKHLYWLRTKLSAMGYGPSKLILTENGYEDKERSRRISFRVIADSDIIMKDILEAQ

SEQ ID NO: 6276 - protein, 279 aa, Vibrio parahaemolyticus
MKLNVDLSEFNKLVDENVSERLSQFSISLDSFSFDRLDEQRKVPHLVTDFDLDISLNGQLLSYDGHGVIVYIKEHSDLSKAVADPYNEAKRYHLTDCKTIQDEKKDKRFGRLVALRYTEGGIPICDDKDNTDDAKLVVCGRCLRKVKYLPYIKAGSDEEKKRVQMAFSLRGFLKKQYSFPEESLPFRHAEFSNFSYTSDWKSVSEVYKLSHNYSCEECGVGLKQRKELLHTHHIDGVKSNNHPSNLMALCVECHSKQPKHKHLKPNAGVLRYLKEKRTV

SEQ ID NO: 6277 - protein, 583 aa, Vibrio parahaemolyticus; identical to SEQ ID NO: 6250

SEQ ID NO: 6278 - protein, 235 aa, Vibrio parahaemolyticus; identical to SEQ ID NO: 6251

SEQ ID NO: 6279 - protein, 378 aa, Vibrio parahaemolyticus; identical to SEQ ID NO: 6252

SEQ ID NO: 6280 - protein, 583 aa, Vibrio parahaemolyticus; identical to SEQ ID NO: 6250

SEQ ID NO: 6281 - protein, 235 aa, Vibrio parahaemolyticus; identical to SEQ ID NO: 6251

SEQ ID NO: 6282 - protein, 378 aa, Vibrio parahaemolyticus; identical to SEQ ID NO: 6252

SEQ ID NO: 6283 - protein, 414 aa, Vibrio mimicus CAIM 602
MNRYLEQAAIDSSNFQSKLWQKMDEFGDLLSKSATEQVINALKEVIVEFNDKLTEQFGENFKRLDESVKKLVDWQENYKAQLADMAIKYQMGVDAISFTEKSVASIRERTEAIPATMEKLQQVMEFGHEQVIELEHRLEAFKDLRDKAIEAMPQIREQMDNTMSVITESVQAASSHYVAMLHESQNIIEQFTSTANQSVEHLRMNLETGAEKVSQQLIESSHTLSGKLAEASLDIQEQVGTATGGLSNVTSHLTDTTEQIRQHLEDSITELNGQLRVLVADIKDDARETGKVLKDANQELIISTKEVQSEMASATTKLHERLETTLDEIFKVQAQAVRRTFDSLEDQITQSVSKTGSAVEKQVEILDLQMQQEINRTMNEMGEALATITQQFTRDYQKLVREMSNVVNASIAAV

SEQ ID NO: 6284 - protein, 235 aa, Vibrio mimicus CAIM 602
MEKLFGVSKTAEQGGEHWMSVSDLMAGLMMVFLFISVALMRDAVVERDKIKDVAEAYQKTQHAIYVSLLDEFSKDLEKWGAEIDRDTLSVNFTAPEVLFANGKADLTQQFQVILNDFFPRYLEVLEQYKPTIQEIKIEGHTSSRWNHDSSDYEAYFNNMGLSQSRTRAVLSYVMAIDKVRINHYGWVKNNVAAVGYSSSKAVIKNGLEDEKRSRRVSFRVITNAEAQILKILGAE

SEQ ID NO: 6285 - protein, 372 aa, Vibrio mimicus CAIM 602
MKLILNLLSLKNAIAEMKPDEKGIFAWVREVTPINKIDYELAQGKDVELKDVDIDSGLLSYKGRQVLLYIKDHGSMTQSAINIPYSGNKFHVADCSALKKMRSKGRFERYVATNDTSGEFLISGDGIEGKAILRVCKSCLSALNYRGWSTGEERNKILNNFSMTEFFSTYSSFFPHMPSRIAETAESGYPSDWAKISSHYRVEKNFECEQCGVNMRSHRALLHVHHINGVKSDNRPSNLKALCIDCHSKQPMHEHMTLSHRERQTINDLRKQQGLLDRLMTWKELFDYADPGLHGVIHACRDAGLKLPVVNYLVKDSSGKLAAHLELAWPKHKFGIAISENDINDARSNGWSVVGMNEFLDGYKLQSYNLKF

SEQ ID NO: 6286 - protein, 583 aa, Vibrio campbellii HY01
MTDFLASIIASYSAASISDAFIYTILLLLVASSILAFLGKAPRFTASTTNILTSLGILGTFAGIVVGLMVFNPTDIDGSIESLLAGLKTAFLTSLVGMAASIIYKAILGTIPQKGEDAIKGVGPEEIFQVMSQQLRSSNELLASIKGEEDTSLVSQLKILRTDLNDAQKEQTAYQNLKVAQTEKFQVTLWDKMDEFGDLLSKSATEQVINALKEVIVEFNDKLTEQFGENFKRLDESVKKLVDWQENYKDQLEDMATKYQLGVDAISSTEKSVASINERAEAIPATMEKLHQVMELGHGQVTELEHRLEAFKDLRDKAVEAMPQIKEQMDSTMSVIGESVKAASTHYESMLQESQNIIDNFASTATQSVEVMRVNLEEGANKVSSELENRAVEIGSSLAAASNDITDNVTTASGALQNSASYITDNSEQIKQHLEDAMVELNGHLRVLVADIKDDARETGKVLKEANQELLSSTKEIQSETTSAIAKLHDRLETTLEEVFQVQAQAVRRTFDSLEDQITQSVGRTGSAVEKQVEVLDLQMQQEINRTMNEMGEALATITQQFTRDYQALTREMSNVVNSKIAV

SEQ ID NO: 6287 - protein, 235 aa, Vibrio campbellii HY01
MEKLFGKTKSTGDSGEHWMSVSDLMAGLMMVFLFISVALMRDAMVERDKIKEVAETYQKTQQAIYIALLEEFAKDLDTWGAEIDRDTLSVNFTAPEVLFGNGKANLTQQFQIILNDFFPRYLEVLEQYKPIIQEIKIEGHTSSRWNHDSSDYEAYFNNMRLSQSRTRAVLGYVMKLDDVRAQHYGWVKNNVAAVGYSSSKAVVKDNVEDEKRSRRVSFRVITNAEEQILKILGAE

SEQ ID NO: 6288 - protein, 378 aa, Vibrio campbellii HY01
MKLTLNLHSLMRAIEIMEPEKKGVFVWDPQITEISKIDIELAQGKDVELKDVDIDSGLLSYQGRQVLLYIKDHGSAVQSVIKNPSTGNKYHVADCSKLKSMRAEGRFERYVVINDTSGEFPISGSGYYGQSKEEGYARLNICKLCLGQLNYKGYSSGGHRSNIFNEFDMPEFFATYSSFFPHMPSRRAETAESGYSDDWSKISSHYRVEKNFECEECKVNMRSNRALLHVHHVNGVKSDNRPSNLRALCIDCHSKQPMHEHMALSHRERQTINDLRKQQGLLDDLGEWQELFDYSDPGVHGVLHACRQAYLKLPDINYFVEDSFGGLAARLELAWPKHKFGVAISMNDIEDANCNGWQVVGINDFLENYKSQAYNLRH

SEQ ID NO: 6289 - protein, 552 aa, Actinobacillus pleuropneumoniae serovar 1 str. 4074
MITFIENYLKSLPAESITNYFFYLMLGITTFNLFLFFALPNIRESFRSRILDYAPTLLTSLGILGTFTGIVSGLLNFDIENIDNSITELLSGMKTAFLTSVIGVTLSISLKVIFTLFKKKNKKSDENNSMDIKSIVNTLFKQTEYLKLQTEKSDVLADNLQAMVKMLGSESDGSLLGQVKLLRSDLSDQQKSLQKTFTPMAENLEKILNSFNDQKQIFSNFENKLWIKLQDFADMMSKSATEAVIDALKKVIQDFNNNLTEQFGENFKQLNLAVINLVEWQENYKNQLNEMISLYNSGIQSLTTTETAISNIENSTQSIPTTMEKLDMIIRSNQQQIDQLDGHLKSFAQLRDKAVEAIPEVQKQISAMLENVNKANSDLTQGLKESGEKLQQHIANTSDKLGQSITETSQKLGETANLISTQNKELTAYQKQLFEQITQFASRWNHEFNDNVKRIHEAFNHSVEEMIKSQVSENRKLMLSLEKESENALKSTAESVQKQLDLIDKSMQEEINRVMKEMGGALAAIANKFTDDYVRLTEQMAKVVQQNNRGRF

SEQ ID NO: 6290 - protein, 230 aa, Actinobacillus pleuropneumoniae serovar 1 str. 4074
MQIDFSKLKLQQQESEDSQWLPVSDLMSGLMILFLFIAVSFILNAKRVADNYQDNQEKIYQALQTEFSPKLKDWKAKIDKDTLTFIFTDPEVLFETGRSDLNAPFKKILDDFFPRYMKVVDNYKTSISEIRIEGHTSTEWDHKSSDDMAYFLNMQLSQDRTRSVLIYLYQLENIAQYRDWIKSNLSAVGLSSSKTIKNTQGIEDKEASKRVTFRIITNAEEQLRKLSEIK

SEQ ID NO: 6291 - protein, 269 aa, Actinobacillus pleuropneumoniae serovar 1 str. 4074
MKLSVDFRALFTAVKKMGVEKITPISLLPTNQAIKTDFEVQINSRSGFEVSNIEDVEVKFGVFTYNGWHVLLFIPDHSYGSTFDRTIEDSSQGNKYHLTDCSTLENMRQRGRFQRYHATNNTEGIFTIFDAYGREAEVALHACKNCLRQLGYYPYNTFNLVGFFEKYDSHFCNLPKAINQDKAGYHQDWENISRQYRESHQYCCEQCGVNLTSHKHLLDVHHKNGVKQDNRKDNLIALCKICHSEQDSHGHYYVSLMDRQIIESLRSPF

SEQ ID NO: 6292 - protein, 552 aa, Actinobacillus pleuropneumoniae serovar 9 str. CVJ13261; identical to SEQ ID NO: 6289

SEQ ID NO: 6293 - protein, 230 aa, Actinobacillus pleuropneumoniae serovar 9 str. CVJ13261; identical to SEQ ID NO: 6290

SEQ ID NO: 6294 - protein, 269 aa, Actinobacillus pleuropneumoniae serovar 9 str. CVJ13261; identical to SEQ ID NO: 6291

SEQ ID NO: 6295 - protein, 552 aa, Actinobacillus pleuropneumoniae serovar 11 str. 56153; identical to SEQ ID NO: 6289

SEQ ID NO: 6296 - protein, 230 aa, Actinobacillus pleuropneumoniae serovar 11 str. 56153; identical to SEQ ID NO: 6290

SEQ ID NO: 6297 - protein, 269 aa, Actinobacillus pleuropneumoniae serovar 11 str. 56153; identical to SEQ ID NO: 6291

SEQ ID NO: 6298 - protein, 589 aa, Haemophilus somnus 129PT
MLAFIENFLKSLSSSTITEYFFWILLGIAVLGLLTFLISRKHYHSQFTKFAEYTPVLLTSVGILGTFTGIVAGLLNFDIHQIDNSISSLLEGMKTAFFTSVIGVALSILLKIIYTLVGKVKNEKKRDVDIEEIAAAICRQAEENEKQSASLLLLTDWSKDQAITQNGALTALQSIARTLGSEAESSLLGQIKLLRADFNDAFKELKNQKIQAIGFLQKMTEQSEENQVQFTKFEEKLSQRLHDFAQILSKSATETVIEALRQVIVEFNQNLMEQFGENFKELNRAVKDLVQWQENYKTQLNEMIVLYHAGVQSLESTEKSVLSIEQKSQVIPQTMEKLGEVIEVNQHQIEHLNAHLSGFAELRDKAIDAIPQTQQQVKLMLNNVETANQSLTEALKKSATQMEADLTSTARTFANKSVELTENLANVIRDSANNFATQSLQGLQALNESSKELKETAHSIALHQKELNAEQQKTINQVIKFVENWQKTFEQQSQEIFQNFVRKVEDMSRQQVAENERLMRSLQEEGEKTVKGTAEYVNAQLKLIDDSMQREVERVMKEMGSALATISRQFTQDYTKLVEAMSNIVRSRI

SEQ ID NO: 6299 - protein, 229 aa, Haemophilus somnus 129PT
MMIDLEKISSKEDGEDTQWLPMSDLMSGLMMLFLFIAVSFILNTKRVAEKYDDNQQKIYQALQSEFQSNLTNWKAKIDKESLTFIFTDPEVLFQTGRADLQSKFKEILTAFFPRYMKVIDQYRDFISEVRIEGHTSSDWSRLVSADVAYFENMRLSQERTRSVLEYTYYLPEVENYRGWIKKNVSAVGLSSSKIVLNTDGSENREASKRVTFRIITNAEAQLRRLSELK

SEQ ID NO: 6300 - protein, 269 aa, Haemophilus somnus 129PT
MRLNVDLSELWQSVKQISKIKIDIDLEKLTALNPINTTVGLEIPIDEITFTPLPTYQGKQVILFIPDHSYNTLFEETLCDPTKGNKYHLTDCTTLESMRQRNRYKRYFATTNLSGEFTISNGAGQSAEVRLQVCQNCLKKLNYKQFNRNRWLVLNMFDLAEFFAHYRTSFRRDIETQNMVAEEAGSYSTDWRLISQRYREGQKWCCENCGLNMQSYPHLLDVHHRNGNKRDNSDQNLQALCRECHIQQDMHTHMQLSEEERRTFSYLRR

SEQ ID NO: 6301 - protein, 529 aa, Bacteroides fragilis str. 3719 T6
MDFSLDKSTIIWLIAIVAGTCSLYLYIKKLKDKNKLISNRRLVENIPSIISTIGVLGTFYGITSGLLSFNSDDLDTSIPALLDGLKTAFFTSIAGMVCSLIMSKIINSYFDKADDGISDANQAASQICKAVQEMSQKNIAILNALKEQSENQAKNQTAFYRSVGDILIALQTSHTNTESAINSMVILSRSQETTVNDLRSKVESMTLSLGAVEENSTIQTATLSNIQQQTKELSNTDRNISEMLDILSGMSNIQEEISEETKAFGGKLHSEVVEIEDKMDATNQLLTSKFDEFSELLKKSNTEALVEVMKTVTEEFQKQMNSLINKLIQENFDQLNKSVEKLNTWQQENKAMISSLTQQYKEMASNFESTSTTLSQVGDDTRTLVSEGGKLKQLIDSLNQVIVEDQKFIDVSNKLQETANISKENMEKFDESTKILNDWVRKQRNFVDGVQLLIEKLDELNKIRDYSEQFWKGTKEKMEEGVSIITQGSQTLNSQLTSLDRQFYNRLGATLAELDNCITKMVEHVNNRK

SEQ ID NO: 6302 - protein, 233 aa, Bacteroides fragilis str. 3719 T6
MAKSNVWMSVSDLMTGLMVIFLFIAIAYISRVKQNQTVLTDYIETKNELHNKLVNEFAGDTLQWQMAIGKDLSMKFKEPTVLFASGSADLTPRFCQILNNFLPRYFNILLNDSLRTNIREIRIEGHTDNVPMPSYDTDSYIANVILSQKRSLSVLKYFRKMEVFKKYTSEQQRLLEFWFTANGLSYGKSLDNNGDYTIVTGNDIDKNKSRRVEFRIVTSGDEILENFVNKNKN

SEQ ID NO: 6303 - protein, 267 aa, Bacteroides fragilis str. 3719 T6
MDSEDPIYQFDHFKSLLSTMGIEVGEASAWSPVGTIEVLSENIGKKIKFESNGIFYIDDNGSEHQGFMYKRDFYFHDYGERMPKFHIRYCHTLECFGKEAYRFANNEPIKVFARDKAIRHEVEVSGLHLCTYCSQILANELENEIHNSTDFVEFLKQAEGIDPNDNRDTEIDIFGYTKNWEQISQAYRSIHQFTCERCGLQITEPFDQHFMHTHHKNGNKTDNREANLECLCVRCHSEVDDRHKKRLCTGANRIILEDFNEKYPSFI

SEQ ID NO: 6304 - protein, 529 aa, Bacteroides fragilis str. S24L26
MDFSLDKSTIIWLIAIVAGTCSLYLYIKKLKDKNKLISNRRLVENIPSIISTIGVLGTFYGITSGLLSFNSDDLDTSIPALLDGLKTAFFTSIAGMVCSLIMSKIINSYFDKADDGISDANQAASQICKAVQEMSQKNIAILNALKEQSENQAKNQTAFYRSVGDILIALQTSHNNTESAINSMVILSRSQETTVNDLRSKVESMTLSLGAVEENSTIQTATLSNIQQQTKELSNTDRNISEMLDILSGMSNIQEEISEETKAFGGKLHSEVVEIEDKMDATNQLLTSKFDEFSELLKKSNTEALVEVMKTVTEEFQKQMNSLINKLIQENFDQLNKSVEKLNTWQQENKAMISSLTQQYKEMASNFESTSTTLSQVGDDTRTLVSEGGKLKQLIDSLNQVIVEDQKFIDVSNKLQETANISKENMEKFDESTKILNDWVRKQRNFVDGVQLLIEKLDELNKIRDYSEQFWKGTKEKMEEGVSIITQGSQTLNSQLTSLDRQFYNRLGATLAELDNCITKMVEHVNNRK

SEQ ID NO: 6305 - protein, 233 aa, Bacteroides fragilis str. S24L26; identical to SEQ ID NO: 6302

SEQ ID NO: 6306 - protein, 278 aa, Bacteroides fragilis str. S24L26
MDSEDPIYQFDHFKSLLSTMGIEVGEASAWSPVGTIEVLSENIGKKIKFESNGIFYIDDNGSEHQGFMYKRDFYFHDYGERMPKFHIRYCHTLECFGKEAYRFANNEPIKVFARDKAIRHEVEVSGLHLCTYCSQILANELENEIHNSTDFVEFLKQAEGIDPNDNRDTEIDIFGYTKNWEQISQAYRSIHQFTCERCGLQITEPFDQHFMHTHHKNGNKTDNREANLECLCVRCHSEVDDRHKKRLCTGANRIILEDFNEKYPSFNKDSLEDNDLAF

SEQ ID NO: 6307 - protein, 527 aa, Bacteroides fragilis str. S24L15
FSLDKSTIIWLIAIVAGTCSLYLYIKKLKDKNKLISNRRLVENIPSIISTIGVLGTFYGITSGLLSFNSDDLDTSIPALLDGLKTAFFTSIAGMVCSLIMSKIINSYFDKADDGISDANQAASQICKAVQEMSQKNIAILNALKEQSENQAKNQTAFYRSVGDILIALQTSHNNTESAINSMVILSRSQETTVNDLRSKVESMTLSLGAVEENSTIQTATLSNIQQQTKELSNTDRNISEMLDILSGMSNIQEEISEETKAFGGKLHSEVVEIEDKMDATNQLLTSKFDEFSELLKKSNTEALVEVMKTVTEEFQKQMNSLINKLIQENFDQLNKSVEKLNTWQQENKAMISSLTQQYKEMASNFESTSTTLSQVGDDTRTLVSEGGKLKQLIDSLNQVIVEDQKFIDVSNKLQETANISKENMEKFDESTKILNDWVRKQRNFVDGVQLLIEKLDELNKIRDYSEQFWKGTKEKMEEGVSIITQGSQTLNSQLTSLDRQFYNRLGATLAELDNCITKMVEHVNNRK

SEQ ID NO: 6308 - protein, 233 aa, Bacteroides fragilis str. S24L15; identical to SEQ ID NO: 6302

SEQ ID NO: 6309 - protein, 278 aa, Bacteroides fragilis str. S24L15; identical to SEQ ID NO: 6306

SEQ ID NO: 6310 - protein, 529 aa, Bacteroides fragilis str. S24L34; identical to SEQ ID NO: 6304

SEQ ID NO: 6311 - protein, 233 aa, Bacteroides fragilis str. S24L34; identical to SEQ ID NO: 6302

SEQ ID NO: 6312 - protein, 278 aa, Bacteroides fragilis str. S24L34; identical to SEQ ID NO: 6306

SEQ ID NO: 6313 - protein, 529 aa, Bacteroides fragilis; identical to SEQ ID NO: 6304

SEQ ID NO: 6314 - protein, 233 aa, Bacteroides fragilis; identical to SEQ ID NO: 6302

SEQ ID NO: 6315 - protein, 278 aa, Bacteroides fragilis; identical to SEQ ID NO: 6306

SEQ ID NO: 6316 - protein, 515 aa, Parabacteroides distasonis str. 3776 Po2 i
MNLSISTDTWVCLSIIVVAFIVCLILVLKFKNSEKMEANRRIIEYFPTLVSTLGVLGTFWGITKGLMAFDTSDLDQSIPGLLDGLKTAFFTSLAGMIGSMFLSAFISKKQDERDGGISDINQAAGEITKSVKAMSDANTETMRSIQQQLTEQEADRKAFYRTVGEVMSKISDTQKSITSAIDSLVVLQRSQENSLADIKEATTQQSVAINSVAKYSQEVSEYTHHLGEILDVISGMSGTEDEINEKVGKLKEIIHGEVIEIEDNMAKTNKLLESKFDEFTELLKKSNTEALVEVMKKVTEEFQKQMNSLINKLIQENFDQLNTSVEKLNQWQQENKEMIASLTHQYREMSDNFEATSTSLTRVKDDTASLVSEGGKLRQLVDALNQVIIEDEHFIEVTKELHETANLSKSNMESFNESTKTLNEWVRKQRNFVDGVQLLIAKLEELNKIRDYGDQFWKGTKDKMEEGVGILTRGSQTLNSQLTSLDRQFYGRLSATLAELDNCITKMVEQVGKRR

SEQ ID NO: 6317 - protein, 233 aa, Parabacteroides distasonis str. 3776 Po2 i
MAKPNVWISVSDLMTGLMVIFLFIAIAYISRVQKNQSVLTDYVETKNELHNKLVKEFAGDTLKWQMAIGKDLTMKFKEPTVLFATGSSELTPRFKEILDEFLPRYFSILLNDSLRSNIQEIRIEGHTDDVPMPIYDADPYIANAKLSQERALSVLKYFRSMSQFTKYSDKQKQLLEYWFTANGLSYGKALDADGDFIIRSNKPIDRAFSRRVEFRIVTSGDEILENFVKENTK

SEQ ID NO: 6318 - protein, 306 aa, Parabacteroides distasonis str. 3776 Po2 i
MSFDFDIDAEEEWFDDSAPIYDFPNLKKRLTDMGVQIGLAGAWRSVGTVDVLPEDIGERILFEDGGIFYIDDEGVKRRGFMYKAAFYFEWQGRISQPKFHVCKCTAIENFGRDAYRFTNAEPIKVYSRNAHKEVEVEGMELCGYCKRMLMDEEAERVNDSTDFVEILKEAGDVKEPTEYDVDIFGYVKNWEQISLAYRTKKQFTCERCGTQVEDGFDHYYMQTHHKNGVKTDNREGNLECLCIKCHSEVDDTHRRNFSSGAQKVMIDEYMRKYYGKESGSIISRLIKAVHNRQEPPIIVNDDDIPF

SEQ ID NO: 6319 - protein, 515 aa, Parabacteroides distasonis str. 3776 D15 i; identical to SEQ ID NO: 6316

SEQ ID NO: 6320 - protein, 233 aa, Parabacteroides distasonis str. 3776 D15 i; identical to SEQ ID NO: 6317

SEQ ID NO: 6321 - protein, 306 aa, Parabacteroides distasonis str. 3776 D15 i; identical to SEQ ID NO: 6318

SEQ ID NO: 6322 - protein, 515 aa, Parabacteroides distasonis str. 3776 D15 iv; identical to SEQ ID NO: 6316

SEQ ID NO: 6323 - protein, 233 aa, Parabacteroides distasonis str. 3776 D15 iv; identical to SEQ ID NO: 6317

SEQ ID NO: 6324 - protein, 306 aa, Parabacteroides distasonis str. 3776 D15 iv; identical to SEQ ID NO: 6318

SEQ ID NO: 6325 - protein, 643 aa, Fusobacterium nucleatum subsp. animalis
MGYIFKFLAFNIGQYIGISLTISDLIIYFVMAYIVIHIINNNKINDKEKRNFYINLLPILGVIGTFAGICIGLADFNSNEIEKSVPLLLQGLKTAFWTSLIGTSLAVFFNVWYSFKDKKDLDDEDEEVPLLKLQIKELQEISKKFNNFLENQLINNKNLKELELIKDELKILNKSQEQNNTFYENSLLKLEILEDINKKYDKNNEQLLICTNNITDLKDYIALNLEETKKLNATYSDTFNKLNSLEEINTDIFNKNSEISENSELLLEDLKDYKNLFSNFSEESKNQSKELITAFKEFATYMAEENSKAFIEALNKTIRDFNNNLIESFGSNFKQLNEAVIKLVDWQEQYKQIIEATTENQKVIFDSFNGIEKELQTFTSETKNVNSIVSELSTLTKESMEQNIKLNETLNMFSELNSQAKELIPNLIEINNNVDNNIKTFSNYSNELISNLDSFTNNLQTNFSQYIDDINKGVKGSTDNIIGIIEDSIKKIETNFDKSLENTDLKLKETSENIFVGIEKFNLDFSNNMKEQLDKFINNNENYSNEINKLLKNTIETIEDNERNNSRIIEENIKQIEKLNNTLSNVLKEHVDNIEKELAESLNTSLNSLGEVMAKISDRFAKDYGPLADKLKEIVELPNKRVR

SEQ ID NO: 6326 - protein, 234 aa, Fusobacterium nucleatum subsp. animalis
MAKKHNEDHFSPRVADLMSALTLIFLFISVVYMLQVNKEKEHIEIIAKDFKNTKHDIYSDLNKEFKEDLKKWNAYIDEDTLSITFKEPDVFFDIGSSNINKKFKDILDDFFPRYINILFTKYKNEIEEIRIEGHTSSEWNKNDDSLQAYFKNMTLSQERSKSVLEYCMLLNTMKPYREFLISKATANGLSYSHRIIENGKENFSKSRRVEFKIKTTAEAHINDILKAGGFDEAN

SEQ ID NO: 6327 - protein, 273 aa, Fusobacterium nucleatum subsp. animalis
MKLINFLDFKPFKDIMEKMKINKDEKIDIERIKIIEKVRIWKQLSSLSGLDIDINETVASENGFIKYNEFDKLVAYIRDQKYFGEKFSLRKFHIAYNCKTLSDSRKSRDASKYKIVQNKSPEFTINILSEDAKTVIEANVIKKLEVCTNCLKALNYKNFLNVSKSEQDKIKNEFSFEEFLGTEFDKNEELIKSYNLDDIENDRLRLYPKNWEEISYNYRKSKNWICEECRKDCSKNKEELETHHIDHNPSNCSFSNLKALCKTCHAKIHPHMQ

SEQ ID NO: 6328 - protein, 643 aa, Fusobacterium nucleatum
MGYIFKFLAFNIGQYIGISLTISDLIIYFVMAYIVIHIINNNKINDKEKRDFYINLLPILGVIGTFAGICIGLADFNSNEIEKSVPLLLQGLKTAFWTSLIGTSLAVFFNVWYSFKDKKDLDDEDEEVPLLKLQIKELQEISKKFNNFLENQLINNKNLKELELIKDELKILNKSQEQNNTFYENSLLKLEILEDINKKYDKNNEQLLICTNNITDLKDYIALNLEETKKLNATYSDTFNKLNSLEEINTDIFNKNSEISENSELLLEDLKDYKNLFSNFSEESKNQSKELITAFKEFATYMAEENSKAFIEALNKTIRDFNNNLIESFGSNFKQLNEAVIKLVDWQEQYKQIIEATTENQKVIFDSFNGIEKELQTFTSETKNVNSIVSELSTLTKESMEQNIKLNETLNVFSELNSQAKELIPNLIEINNNVDNNIKTFSNYSNELISNLDSFTNNLQTNFSQYIDDINKGVKGSTDNIIGIMEDSIKKIETNFDKSLENTDLKLKETSENIFVGIEKFNLDFSNNMKEQLDKFINNNENYSNEINKLLKNTIETIEDNERNNSRIIEENIKQIEKLNNTLSNVLKEHVDNIEKELAESLNTSLNSLGEVMAKISDRFAKDYGPLADKLKEIVELPNKRVK

SEQ ID NO: 6329 - protein, 234 aa, Fusobacterium nucleatum
MAKKHNEDHFSPRVADLMSALTLIFLFISVVYMLQVNKEKEHIEIIAKDFKNTKHDIYSDLNKEFKEDLKKWNAYIDEDTLSITFKEPDVFFDIGSSNINKKFKDILDDFFPRYINILFTKYKNEIEEIKIEGHTSSEWNKNDDSLQAYFKNMTLSQERSKSVLEYCMLLNTMKPYREFLISKATANGLSYSHRIIENGKENFSKSRRVEFKIKTTAEAHINDILKAGGFDEAN

SEQ ID NO: 6330 - protein, 273 aa, Fusobacterium nucleatum
MKLINFLDFKPFKDIMEKMKINKDEKIDIERIKIIEKVRIWKQLSSLSGLDIDINETVASENGFIKYNEFDKLVAYIRDQKYFGEKFSLRKFHIAYNCKTLSDYRKSRDASKYKIVQNKSPEFTINILSEDAKTVIEANVIKKLEVCTNCLKALNYKNFLNVSKSEQDKIKNEFSFEEFLGTEFDKNEELIKSYNLDDIENDRLRLYPKNWEEISYNYRKSKNWICEECRKDCSKNKEELETHHIDHNPSNCSFSNLKALCKTCHAKIHPHMQ

SEQ ID NO: 6331 - protein, 711 aa, Fusobacterium periodonticum 1_1_41FAA
MFGIVFFKVIKYNKLDNKEKRNFYINLLPILGVIGTFLGICLGLANFDSTEIESSVPQLLQGLKTAFWTSFIGSSWAVFLNMRYSSKDKEEADDEEEEISLLKLQINELQKLNNNFYILFEENKKEKETLHQINKEILEGIKANNIMKEQLSQMEELKDIKQELVLMNQKEDNKTELLNKVLDSLNSSETVLGDISSFKEILNSIFEKENDKDEYMNKILDNMDNSKHILENILSFKEILNLRFEKEASKDEQLKMILEKFEKIEETSNLQVEILKKIEDETFLLDDIHNDLENLNEKANSQISQLESLEKLNVLDELNNNIDSQLEEISVVNANILTKLDSLNVLEEIKNNINSQLEKISVINTNMFAKLDNLEKYDSNIFANSSKSIDFISSIYGEIEEYKNRFNSFIDNSTRENSELVMAFKEFSNYMLEENSKVFIEALNKTIRDFNINLVETFGSNFKQLNEAVSKLLDWQEHYKDTIELTTENQKIIFDSFRNIETELDNFNQKAKGVNTIVSELALSTKEALEQNYRLNDSLEVLAQLDSQVKELLPNFMKINSNLDDNLKTFNEETNKITKELKEFTDNLSSSLDKSKNQVSKLLEDTIKNFSSIIEKSEENNKEIVRSTSEKIKSLNEDLDKHIREKITKIDKILKEKIQETDDSLKDNLNDIIKMLGNISEKFAEDYEPLANKLREIVQLPNLIENDKKVK

SEQ ID NO: 6332 - protein, 232 aa, Fusobacterium periodonticum 1_1_41FAA
MKKKHYEDHFSPRVADLMSALTMIFLFISVTYMLQVNKQKEHIEVIAKDFRNTKQSIYKDLNKEFEEDLKRWNAYIDKDTLSITFKEPDVFFDVGSSEINSNFKLILKDFFPRYIEMLYKNYRDEIEEIRIEGHTSSEWNKDDDDLQAYFKNMSLSQARSKSVLEYCMLLDSMEEYRDFLIEKATANGLSYSHRIIENGKENYNKSRRVEFKIKTTAEAHIDQIIEAGGLNE

SEQ ID NO: 6333 - protein, 192 aa, Fusobacterium periodonticum 1_1_41FAA
MNKLNFIPLKEVMNKMGIDESIKPNIEMLEKRKIIWRKISDFSGLDVDINKVTCSKEGYIEYEGFSKLIAYIKEQNFSNNIDFNNPNNLKKFHIAYNCKVLNRARENKDNKYQIVLNKKPKFLIDIFVKKNLIEKDVEKELKVCQFCLDALHYKGYDYNKMAYKIREEFVNNFSFEEFLGEEFDKNEKDFKD

SEQ ID NO: 6334 - protein, 435 aa, Herbaspirillum seropedicae SmR1
MLLKSAIAFGIAIVSPFAFAANGFESILHDGITMTFIAINLSLTVYFTCFRFNRFAVQHGPEILTTVGIFGCFLGIALALLHFDSAKVSSSVPHLLEGVKTAFWASVSGVFGSLCIRFRHHQQKSPIPHSIGAPKAASLDDVVAATQALQRSLSGTEDGSLLSQLKLMRQEQNDQLTALRGSFDAFASKMAEDGSKALIEALKEVIRDFNAQINEQFGQNFQHLNMAVEKLVVWQVQYREELDKLQAVQQSSATDLQNAANGMSLMVSRADGFTETASRLEQLLRGLSQQYAAIEDSQRSLSAVLIEMKDVTPVFAKKMEELADAIKLGVSRVQSDVSDIVKNFGVQIQGSSAEMKQLLSETIKSSQKQVNDEMQKGLDTIRQGVVSLDKGLQEELTKSLESLGRQLASLSEKFVADYSPLTDKLRDVVRIASAQ

SEQ ID NO: 6335 - protein, 232 aa, Herbaspirillum seropedicae SmR1
MDIEQSNQSYWIPLADLMTGLMMVFMLLTAAFMLRVEQTTTLVVNEFEETKSDMLQALQKEFSRDLKQWNAELLGDMTIRFNDPTVLFATGSAELRPKFKQILRDFFPRYVTMLTSDKYRDAIKEIRIEGHTSRSWTNSTDTKTAYFLNMELSQARTRSALEFLLRLPAVERQQDWLVGHVTANGLSSSKPISPDDNSAAAQLANQRVEFRIVTNASDRMDQIARDLKAEQP

SEQ ID NO: 6336 - protein, 293 aa, Herbaspirillum seropedicae SmR1
MKLPNFLLASDLNALRHEMGASLAVGFKIENIYKPIDLRDQLRQDGIEVKFDEVQVLQDGTLAYKGYRVLLYIRDVSNFGQREEMPKFHLAFCGTLDKMKRNHRFARYVVANRDDGMFQVNIMEHGAKPKIVELNVCQMCLASISWKGFQLDLDRTLRIDRVKNFLLKDFFNQYPQDLILEKPVHTSETAPLNDYSVDWGDISERIKQTRGYRCSKCRIALGIRESKYMHVHHINGMKNDNSDANLSVLCIRCHADEPMHEHMKSLPAYVDFVSRYPNRPVLTRQSSVKRGKL

SEQ ID NO: 6337 - protein, 498 aa, Legionella birminghamensis
MPKFFVFLVLSFFSSLALASENQILAPGGFSLLQQFSIIELCWMSLTVCFFIFFFIKFDKFAVTYGPEILTTMGIVGCFACIAWALLHFNSENITASIPFLLNGIKTAFCSSFIGVSGALLIRGKHKFSKVDFHKINETAPASMDDLVKEIANLRRTLSGDEEGSLISQIKMLRQDSNDQQKKLQESFDNFAKHMVENNQKAFIEALKEAIRDFNQNLTEQFGENFKHLNQSVEKLIIWQEQYKHELETIKQYQSQFSNDMKQSADAFATVVEHAKQFTDIAQNLKILLNSMDKQKDVLFVQEKALSELLSTMKDHIPEFSSSTQKMITEISEGVKLVQLETTKIISNYGTEIKSINNEMKNALADVLKEAQNSFSVGIKNNMEMIQEAIINVESQTTDIIKNHSVQLQSTQAEMKNVLVDGITKSQQEVTAGLQENAKIIREGVLALDKELEKGLTDSLTSLGKQLASLSEKFVSDYLPLTERLREVVRLARNNEAA

SEQ ID NO: 6338 - protein, 230 aa, Legionella birminghamensis
MEGHNQSYWIPLSDLMTGLMMVFMLIAVTFMLRVEQTTTLVVKEFEETKSDLAQALQKEFAKDLRQWDAELLGDMTIRFDNPDVLFDTGSSVVKPAFKRILNDFIPRYISLVSSEKYRNSIKEIRIEGHTSKKWALDTDVKTAYIKNMRLSQERAQSMLEYILSLPSLLEHEKWMRKFLTSSGFSSSKPVFNQLHIADDNRSQRVEFVIVTNADSKLDEISEQIRSMKNG

SEQ ID NO: 6339 - protein, 143 aa, Legionella birminghamensis
MVKLVNFFEFSALNNLRHMMEAELIKEFKFDTGISLLDEDFIKRLGDDGVEIDSLDEIDFRSDATLGFRGQRVLIYIRDVSAYRHEISLPKFHVSTCKTLVDMWQRKRSERYVLYQRENGIFQINLMRDGNVESYSRKWCMTK

SEQ ID NO: 6340 - protein, 598 aa, Alteromonas macleodii str. 'Balearic Sea AD45'
MEFLNLNNEQALSFALTLTIIICSFLFAAFLFSLLAPRRFKSAEFVSYTPALLTSLGIFGTFAGIVVGLMAFDVNNIDGSIQGLLTGLKTAFFTSLVGILLSILFKVIQSAGFGKGNDVEEASHATPEAILGAINQQRNSLDALVGAIGGESDGSILSQMKLLRGDLNDSHKLALKSQQETAETLNKITEQLATQKESFDVFTDKLWIKMQDFADMLSKSATETVIEALKQVITDFNNNLTEQFGENFKQLNEAVKELVVWQDNYKVQIADMTEQYKLGVESISATEQSVAKISTESKVIPESMTNLKEVMEVNQHQLAELERHLDAFKDIRDRAVEAVPEIRKQVDETVKTIADSVEAASTHYNVLLSESDKYIQTHIASSNDLLSSFVSNTREGIETIADKLDESVKLVQQSITQTSDEFRDNIDRANGGLQNSSSRLEEGTEAIRLQLKDTVEDLNETVRSLINGLVEDAKSMSSTLSDANKALVTDTSSARDSVTQSIEAMQKRLEASLEDATASQTQHMQRVFSNLDAGLKEQVGKTGEAVQEQLNLIDQSMQRELNSVMNTMGKNLGQIANQFVKDYSYLTEQMSIVVKKAS

SEQ ID NO: 6341 - protein, 235 aa, Alteromonas macleodii str. 'Balearic Sea AD45'
MDSILGKPKGNEDGEHWLTVSDLMAGLMMVFLFIAIAFMRHVSIERDKIKDVAVAYQQNQVAIFDALNEEFRNDLSQWKASIDEETLSFQFNSPEVLFASGESALKPEFEQILADFIPRYLRVLEAYRESIDEVRIEGHTSSEWGIDTHPDDAYFFNMSLSQNRTRSVLNYAYLISSLSTEQRGWIKSSFAAVGLASSRLKLNEDGSENKEKSRRVSFRVITNADIQIRKIVEGL

SEQ ID NO: 6342 - protein, 364 aa, Alteromonas macleodii str. 'Balearic Sea AD45'
MGASQIEFDITNDVTPIEPLDIKLNQGFEVNFEDIEFDTGLASYEGRQVLLYIKDHSYGDKIHRVLQDGSQGNKYHVSFCSTLESMRNKGRFDRYVVTNKLDGIFPVSGTDTVSREYIEGDTRLAVCQVCLKGINYTKFTSLGSQSERKLFAKNFNLADFFETYSSFFKYMPTGVAGNSKNQYSENWDEVSRRIREKYDFQCQQCGLGLHTHKRLLHVHHINGVKSDNSSSNLTPLCCDCHRKQPNHQHINVRHEDSKLIAQLRNEQGLNTRESWKDIYDLADPGMHGVIDLLEKHHVSLPEVGEEIQNDNTEVVAELELAWPLKKIGVAVSKDDAKAAYRQGWKVYSMRLAIKEIEQLVGSLR

SEQ ID NO: 6343 - protein, 583 aa, Vibrio metschnikovii CIP 69.14
MSDFISSFIASYSAALISDAFIYTIVILFIVSLYFAFKGKFPRLTASSTNILTSLGILGTFTGIVVGLMEFDPTNIDGSIESLLAGLKTAFLTSLVGMAASIIYKAAIGAIPQKSEETVKSIGPDEIYSVMSAQLKASNELLSAIKGDEDSSLTSQIKNLRIDINDGNRSLVLHMEKAADSRDQFQIRLWQKMDEFGELLSKSATEQVINALKEVIVEFNDKLTEQFGENFKRLDESVKKLVDWQENYKNQLEDMSLKYQLGVEAIASTEKSVASINQRAETIPATMEKLHQVMTLGHEQVTELEHRLEAFKDLRDKAVEAMPLIKEQMDSTMTVIGDSVKAASIHYESMLEESQKVIDNFSSTANQSVELMRTNLESGAETVSKQLIESSQTLGGKLVEASSDIQEQVGTATGGLSNVTSHLTDTTEQIRQHLEDSITELNSQLRVLVADIKDDARETGKVLKEANQDLLNSTKEIQSETTSSIAKLHDRLETTLEEVFQVQAQAVRRTFDSLEDQITQSVGKTGSAVEKQVEVLDLQMQQEINRTMNEMGEALATITQQFTRDYQILTREMSNVVNTKVAV

SEQ ID NO: 6344 - protein, 235 aa, Vibrio metschnikovii CIP 69.14
MDKLFGKTKLTSDSGEHWMSVSDLMAGLMMVFLFISVALMRDAMLERDKIKDVAETYQQTQQAIYLSLLEAFAKDLDKWGAEIDRETLSVNFTAPEVLFGNGDANLTVQFQMILSDFFPRYLNVLDQYRPIIQEIKIEGHTSSRWNQDSSDYEAYFNNMNLSQARTRTVLGYVMKLDSVGSEHYDWVKNNVAAVGYSSSKAVVKNGIEDEKRSRRVAFRVITNAEHQILKILVAE

SEQ ID NO: 6345 - protein, 361 aa, Vibrio metschnikovii CIP 69.14
MKLTLNLHSLMQAIEVMKPEKKGRFTLELQESHIDKVSAELEKGKDVELKDIEVESGLLSYKGRHVTLYIKANGTSARFHVSDCSTLQGMRANGRFERYVVTNNITGEFLVDTSFGETKARLKVCQNCLRKLNYKGCNTTSKISTVVQSFDMAEFFSTYSSFFPHMPSRQAETAKSGYTADWPKISSHYRAEKNFDCEECKVNMRSNRALLHVHHINGVKSDNRVINLKSLCIDCHSKQPMHQHMVLSHRERQTISDLRKEQGLLENRLGWQELFELSDPGVHGVLHACREAHLKFPEINYFVEDDLGGLAARLELAWPKNKFGIAISNNDIADARSNGWQVVGISDFLDNYKFQATNLRY

SEQ ID NO: 6346 - protein, 592 aa, Vibrio nigripulchritudo SO65
MTELLSTFIASFSAESVSNVFINLIVVILVISSILAFLGKAPRFSSNTSNLLTSLGILGTFAGIVVGLMEFDPKNIDGSIESLLSGLKTAFLTSLVGMAASIIYKSIQGFIPAKKNDGENTEASPNDILAVMNKQLEMTNKQTEVSYEILKSLKGDEDSSITSQVKMLRTDLIDNHKDLTQYLKNTSELNEKFQDKLWQKMDEFGELLSKSATEQVINALKEVIVDFNDKLTEQFGENFKRLDESVKKLVDWQENYRHQLEDMAAKYQLGVEAISSTEQSVAHINERAEAIPVTMEKLHQVMELGHGQVTELEERLEAFKDLRNKAIEAMPQIREQMDTTMNVIGDSVKAASTHYELMLNESQTIIDNFSSTASQSVDLMRTNLESGAENISNQLIESSHTLGGKLAEASSDIQEQVGTATGGLSNVTSHLTDTTEQIRQHLEDSITDLNGQLRVLVADIKDDSKETGRVLKEANQDLLTSTKEIQQEITNAISKLHERLETTLEDVFQVQAQAVRRTFDSLEDQITDSIGKTGSAVEKQVEVLDLQMQQEINRTMSEMGEALATITQQFTRDYQKLVREMNNVVTTSKVAV

SEQ ID NO: 6347 - protein, 236 aa, Vibrio nigripulchritudo SO65
MDKVFGSSKKHSDSDEHWMSVSDLMAGLMMVFLFISVALMRDAMMERDKIKEVAETYQQTQHAIYVALYQEFEKDLIKWGAEIDRETLSVNFTAPDVLFANGRADLNENFQLILNNFIPRYLSVLDSYKPIIQEIKIEGHTSSRWNQDSTDYEAYFNNMRLSQSRTRAVLGYIMSLEPVVVEHYHWVKQNVAAVGYSSSKLTLDKLGNEDEQKSRRVSFRVITNAEEQIRKILEEV

SEQ ID NO: 6348 - protein, 361 aa, Vibrio nigripulchritudo SO65
MKLSISFKNLNAAIELMEPKKKGEFNLAFVESSIEKLDLELAKGKDVELKDVDVDSGLLSYKGRNVSLYIKDNGTSARFHVADCRTLQGMRANGRFERYVVTNDASGEFTIATAYGERKAPLKVCQNCLRMLNYKGCNTTTNIQSIVNEFDMGEFFATYSSFFPHMPSRQAETAETGYTEDWTKVSSHYRVDKNFTCEQCDVNLRSHRHLLHVHHVSGVKSDNRPKNLKALCIDCHSKQPMHSHMAVSHSERQLINKLRNEQGLLEDLGNWQRLFDFADPGLHGVLHACKDFGTTLPEVGFYISDSFGDLAAKIELAWPKHKFGIAISTNDIEDANNEGWYVLTTNEFLADYRSQAGNLRW

SEQ ID NO: 6349 - protein, 592 aa, Vibrio nigripulchritudo AM115; identical to SEQ ID NO: 6346

SEQ ID NO: 6350 - protein, 236 aa, Vibrio nigripulchritudo AM115; identical to SEQ ID NO: 6347

SEQ ID NO: 6351 - protein, 361 aa, Vibrio nigripulchritudo AM115; identical to SEQ ID NO: 6348

SEQ ID NO: 6352 - protein, 592 aa, Vibrio nigripulchritudo FTn2; identical to SEQ ID NO: 6346

SEQ ID NO: 6353 - protein, 236 aa, Vibrio nigripulchritudo FTn2; identical to SEQ ID NO: 6347

SEQ ID NO: 6354 - protein, 361 aa, Vibrio nigripulchritudo FTn2; identical to SEQ ID NO: 6348

SEQ ID NO: 6355 - protein, 592 aa, Vibrio nigripulchritudo Pon4; identical to SEQ ID NO: 6346

SEQ ID NO: 6356 - protein, 236 aa, Vibrio nigripulchritudo Pon4; identical to SEQ ID NO: 6347

SEQ ID NO: 6357 - protein, 361 aa, Vibrio nigripulchritudo Pon4; identical to SEQ ID NO: 6348

SEQ ID NO: 6358 - protein, 598 aa, Colwellia psychrerythraea
MEVVNLPNEQAAILASSLTAVVCMFIIIAFFLALFNLKRGRASDYVSYTPALLTSLGIFGTFAGIVIGLMAFDANNIDGSIEGLLNGLKTAFLTSLVGIILSIVFKVLQTSGVISAPRNIEEVSSATPEDILGAIQHQGKSIESLVTAIGGDSDGSILSQLKLLRGDINDNQKIAIKSQQEAAETLKVMNEQLSFQQENFINFSDKLWIKMQDFADMLSKSATETVIEALKQVITDFNNNLTEQFGENFKQLNESVKELVVWQENYKVQIGEMTEQYKLGVTSITATEASVTAISQESKAIPETMTDLKQIMEVNNHQLSELENHLAAFKDIRDKAVEAVPEIRKQIDDTVKTIAESVESASSHYNALLTESDKYIQSHISASNDLLDKFVSNSKEGVEIIGEKLAESAIKVEKVITGGAEEFETQVKLTNESLQATTHEVSDNTVKIREELDHTVKELSINVRDMVNGLIDDSKMMAKTLTDANNALIADTSSVRDSVTQSIENMQKRLESSLEDVFASQTQHMSKVFSNIDVSLKDQVGKTGEAVEKQLGMIDQSMQQELNRVMSEMGKALGQISNQFVKDYSKLVNQMNSVVQAA

SEQ ID NO: 6359 - protein, 238 aa, Colwellia psychrerythraea
MSSLDSIFGSSQHKEDGEHWLTVSDLMAGLMMVFLFIAIAFMRHVSIERDKIKDVAVAYQQNQVAIFDALNSEFENDLVSWQASIDKETLSFQFDSPEVLFASGESSLKVKFEQILSDFIPRYLHVLDKYQSSIDEVRIEGHTSSEWGVGTHPDDAYFFNMYLSQNRTGSVLNYSYFLSKLSSEQRAWIKSSFAAVGLASSHLKLNKDGTENKQKSRRVSFRVITNADIQIRKIVEGL

SEQ ID NO: 6360 - protein, 373 aa, Colwellia psychrerythraea
MRLTVDLSSLQQAVKAMGAERIDFELSSELTPIEPIDTQLGEGLEVNLEEIEFETGLASYQGRQVLLYIRDHGGRVSTALNDGSKGNKYHIADCGTLAEMRAKGRFDRYVVTNKLSGQFHISGDDWETNQHTEGEANLKVCKNCLAHLNYQGYKNKVRGPIFNAFDLTDFFDTYSSFFKFMPSGAANKNIGYSKDWDVLSRKTREKFNYQCQQCALDLNQHKRLLHVHHINGVKSDNSSSNLTPLCCDCHRKQPLHQHMFIKHEDSKRISQLRRSQGLNINKSWQDVYDHADPGMHGVIGLLEKYYVSLPEVGEDIKNNKQYTVAGLELAWPLKKVGIAIDKPEAIAATKQGWKIYSMRHALSQIEQLVSSLR

SEQ ID NO: 6361 - protein, 435 aa, Burkholderia pseudomallei MSHR346
MKTKTLLLLSGIAWAPYVFAGGPIGTVLADKQTLSFILLNTCLTIFFAFVRFDRFSVVHGPEILTTVGIFGCFLGIALALLQFDASNVSESVPHLLEGVKTAFWASVSGVFGSLVIRGRHYFWKTPIPQTPGAPKAATLDDVVAATHALQLSLSGNEQGSLLSQLKLMRQEQGDELRMLRTSFDTFAQRMAEDGSKALIEALKEVIRDFNAQINEQFGENFKHLNAAVEKLVVWQQQYKEELDKLQALQKSSADDLRGASSGLALFIDRASSFAQTATALEGTLRGLAQQHQLIDQSQRSIADVLSQMKDVTPQFSRKVDEMTESMKQGVARVQAEVGDVVKNFGVQVQSSSSEMKQLLTDTLRKSQSEVNDGLVRSMDAVRQSVVTLDKGLQEELTKSLETLGRQLASLSEKFVADYTPLTDRLREVVRIAGTA

SEQ ID NO: 6362 - protein, 230 aa, Burkholderia pseudomallei MSHR346
MDFEHSNQSHWIPMADLMTGLMMVFMLLTAAFMLRVEQTTTLVVKEYETTKRDMQLALQKEFAKDLKQWNAEILGDMTIRFNDPTVLFATGSSELRPRFKQVLGQFFPRYVALLTSAQYKDAVKEIRIEGHTSALWTGTTDEKIAYFRNMELSQARTRSALEYLLSLPAVQGNEKWLVQHVTANGLSSSRPLAQDSQSSASQIANQRVEFRIVTNASEKMDLIAEKLAKK

SEQ ID NO: 6363 - protein, 282 aa, Burkholderia pseudomallei MSHR346
MSFQLPNFLNWSSLNALRQEMGAPLAASFVPDHKFRDIELPVLERLQNNGVDVKFDEVEVLSDGTLAYKGYRVLLYIRDITSIGHQESMPRYHLAYCRTLDKMRRNARFDRYVVANGDSGKFQVNVIENDVKTQHVRLNVCQNCLDEIHWNGFDMKMPRDGRLTLVSKFALPDFFKKYPRDLMAVKPMHSSDTAPLNVYSQDWNEISERTKRQRGYRCATCNTVLRQFDSKFLHVHHRNGQKYDNRDSNLEVLCIGCHAEEPMHGHMRALREYQEYIERYHR

SEQ ID NO: 6364 - protein, 435 aa, Burkholderia pseudomallei; identical to SEQ ID NO: 6361

SEQ ID NO: 6365 - protein, 230 aa, Burkholderia pseudomallei; identical to SEQ ID NO: 6362

SEQ ID NO: 6366 - protein, 282 aa, Burkholderia pseudomallei; identical to SEQ ID NO: 6363

SEQ ID NO: 6367 - protein, 435 aa, Burkholderia pseudomallei; identical to SEQ ID NO: 6361

SEQ ID NO: 6368 - protein, 230 aa, Burkholderia pseudomallei; identical to SEQ ID NO: 6362

SEQ ID NO: 6369 - protein, 282 aa, Burkholderia pseudomallei
MSFQLPNFLNWSSLNALRQEMGAPLAASFVPDHKFRDIELPVLERLQNNGVDVKFDEVEVLSDGTLAYKGYRVLLYIRDITSIGHQESMPRYHLAYCRTLDKMRRNARFDRYVVANGDSGKFQVNVIENDVKTQHVRLNVCQNCLNEIHWNGFDMKMPRDGRLTLVSKFALPDFFKKYPRDLMAVKPMHSSDTAPLNVYSQDWNEISERTKRQRGYRCATCNTVLRQFDSKFLHVHHRNGQKYDNRDSNLEVLCIGCHAEEPMHGHMRALREYQEYIERYHR

SEQ ID NO: 6370 - protein, 435 aa, Burkholderia pseudomallei MSHR1153; identical to SEQ ID NO: 6361

SEQ ID NO: 6371 - protein, 230 aa, Burkholderia pseudomallei MSHR1153
MDFEHSNQSHWIPMADLMTGLMMVFMLLTAAFMLRVEQTTTLVVKEYETTKRDMQLALQKEFAKDLKQWNAEILGDMTIRFNDPTVLFATGSSELRPRFKQVLGQFFPRYVALLTSAQYKDAVKEIRIEGHTSALWTGMTDEKIAYFRNMELSQARTRSALEYLLSLPAVQGNEKWLVQHVTANGLSSSRPLAQDSQSSASQIANQRVEFRIVTNASEKMDLIAEKLAKK

SEQ ID NO: 6372 - protein, 282 aa, Burkholderia pseudomallei MSHR1153
MSFQLPNFLNWSSLNALRQEMGAPLAASFVPDHKFRDIELPVLERLQNNGVDVKFDEVEVLSDGTLAYKGYRVLLYIRDITSIGHQESMPRYHLAYCRTLDKMRRNARFDRYVVANGDSGKFQVNVIENDVKTQHVRLNVCQNCLDEIHWNGFDMKMPRDGRLTLVSKFALPDFFKKYPRDLMAVKPMHSSDTAPLNVYSQDWNEISERTKRQRGYRCATCNTVLRQFDSKFLHVHHRNGQKYDNRDSNLEVLCIGCHAKEPMHGHMRALREYQEYIERYHR

SEQ ID NO: 6373 - protein, 435 aa, Burkholderia pseudomallei MSHR543
MKTKTLLLLSGIAWAPYVFAGGPIGTVLADKQTLSFILLNTCLTIFFAFVRFDRFSVVHGPEILTTVGIFGCFLGIALALLQFDASNVSESVPHLLEGVKTAFWASVSGVFGSLVIRGRHYFWKPPIPQTPGAPKAATLDDVVAATHALQLSLSGNEQGSLLSQLKLMRQEQGDELRMLRTSFDTFAQRMAEDGSKALIEALKEVIRDFNAQINEQFGENFKHLNAAVEKLVVWQQQYKEELDKLQALQKSSADDLRGASSGLALFIDRASSFAQTATALEGTLRGLAQQHQLIDQSQRSIVDVLSQMKDVTPQFSRKVDEMTESMKQGVARVQAEVGDVVKNFGVQVQSSSSEMKQLLTDTLRKSQSEVNDGLVRSMDAVRQSVVTLDKGLQEELTKSLETLGRQLASLSEKFVADYTPLTDRLREVVRIAGTA

SEQ ID NO: 6374 - protein, 230 aa, Burkholderia pseudomallei MSHR543; identical to SEQ ID NO: 6362

SEQ ID NO: 6375 - protein, 281 aa, Burkholderia pseudomallei MSHR543
MSFQLPNFLNWSSLNALRQEMGAPLAASFVPDHKFRDIELPVLERLQNNGVDVKFDEVEVLSDGTLAYKGYRVLLYIRDITSIGHQESMPRYHLAYCRTLDKMRRNARFDRYVVANGDSGKFQVNVIENDVKTQHVRLNVCQNCLDEIHWNGFDMKMPRDGRLTLVSKFALPDFFKKYPRDLMAVKPMHSPDTAPLNVYSQDWNEISERTKRQRGYRCATCNTVLRQFDSKFLHVHHRNGQKYDNRDSNLEVLCIGCHAEEPMHGHMRALREYQEYIERYR

SEQ ID NO: 6376 - protein, 435 aa, Burkholderia pseudomallei MSHR4503; identical to SEQ ID NO: 6361

SEQ ID NO: 6377 - protein, 230 aa, Burkholderia pseudomallei MSHR4503; identical to SEQ ID NO: 6362

SEQ ID NO: 6378 - protein, 282 aa, Burkholderia pseudomallei MSHR4503; identical to SEQ ID NO: 6363

SEQ ID NO: 6379 - protein, 435 aa, Burkholderia pseudomallei MSHR3951; identical to SEQ ID NO: 6361

SEQ ID NO: 6380 - protein, 230 aa, Burkholderia pseudomallei MSHR3951; identical to SEQ ID NO: 6362

SEQ ID NO: 6381 - protein, 282 aa, Burkholderia pseudomallei MSHR3951; identical to SEQ ID NO: 6363

SEQ ID NO: 6382 - protein, 435 aa, Burkholderia pseudomallei MSHR3964; identical to SEQ ID NO: 6361

SEQ ID NO: 6383 - protein, 230 aa, Burkholderia pseudomallei MSHR3964; identical to SEQ ID NO: 6362

SEQ ID NO: 6384 - protein, 282 aa, Burkholderia pseudomallei MSHR3964; identical to SEQ ID NO: 6363

SEQ ID NO: 6385 - protein, 435 aa, Burkholderia pseudomallei MSHR3960; identical to SEQ ID NO: 6361

SEQ ID NO: 6386 - protein, 230 aa, Burkholderia pseudomallei MSHR3960; identical to SEQ ID NO: 6362

SEQ ID NO: 6387 - protein, 282 aa, Burkholderia pseudomallei MSHR3960; identical to SEQ ID NO: 6363

SEQ ID NO: 6388 - protein, 435 aa, Burkholderia pseudomallei TSV5; identical to SEQ ID NO: 6361

SEQ ID NO: 6389 - protein, 230 aa, Burkholderia pseudomallei TSV5; identical to SEQ ID NO: 6362

SEQ ID NO: 6390 - protein, 282 aa, Burkholderia pseudomallei TSV5; identical to SEQ ID NO: 6363

SEQ ID NO: 6391 - protein, 435 aa, Burkholderia pseudomallei TSV32; identical to SEQ ID NO: 6361

SEQ ID NO: 6392 - protein, 230 aa, Burkholderia pseudomallei TSV32; identical to SEQ ID NO: 6362

SEQ ID NO: 6393 - protein, 282 aa, Burkholderia pseudomallei TSV32; identical to SEQ ID NO: 6363

SEQ ID NO: 6394 - protein, 435 aa, Burkholderia pseudomallei MSHR840
MKTKILLLLSGIAWAPYVFAGGPIGTVLADKQTLAFILLNACLTIFFAFVRFDRFSVVHGPEILTTVGIFGCFLGIALALLQFDASNVSESVPHLLEGVKTAFWASVSGVFGSLVIRGRHYFWKTPIPQTPGAPKAATLDDVVAATHALQLSLSGNEQGSLLSQLKLMRQEQGDELRMLRTSFDTFAQRMAEDGSKALIDALKEVIRDFNAQINEQFGENFKHLNAAVEKLVVWQQQYKEELDKLQVLQKSSADDLRDASSGLALFIDRASSFAQTATALEGTLRGLAQQHLLIDQSQRSIADVLSQMKDVTPQFSRKVDEMTESMKQGVARVQAEVGDVVKNFGVQVQSSSSEMKQLLTDTLRKSQSEVNDGLVRSMDAIRQSVITLDKGLQEELTKSLETLGRQLASLSEKFVADYTPLTDRLREVVRIAGTA

SEQ ID NO: 6395 - protein, 230 aa, Burkholderia pseudomallei MSHR840
MDFEHSNQSHWIPMADLMTGLMMVFMLLTAAFMLRVEQTTTLVVKEYETTKRDMQLALQKEFAKDLKQWNAEILGDMTIRFNDPTVLFATGSSELRPRFKQVLGQFFPRYVALLTSGQYKNAVKEIRIEGHTSALWTGTTDEKIAYFRNMELSQARTRSALEYLLSLPAVQANEKWLVQHVTANGLSSSRPLTQDSQSAASQIANQRVEFRIVTNASEKMDLIAEKLAKK

SEQ ID NO: 6396 - protein, 282 aa, Burkholderia pseudomallei MSHR840
MSFQLPNFLNWSSLNALRQEMGAPLAASFVPNHKFRDIDLPVLERLQNNGVDVKFDEVEVLSDGTLAYKGYRVLLYIRDITSIGHQESMPRYHLAYCRTLDKMRRNARFDRYVVANGDSGRFQVNVIENDVKTQHVRLNVCQNCLDEIHWNGFDMKMPRDGRLTLVSKFALPDFFKKYPRDLMAVKPVHSSDTAPLNVYSQDWNEISERTKRQRGYRCAACNTMLRQTDSKFLHVHHRNGQKYDNRDSNLEVLCIGCHAEEPMHGHMRALREYQEYVERYRR

SEQ ID NO: 6397 - protein, 459 aa, Pectobacterium atrosepticum
MLSILPLETWIFIAVILAYFIYSNWNFTEKKSHESPGILITIGILATFLGIALGLSSFDMNDVENSLPTLINGIKTAFWASVAGVACALIIKWRYAIWGVRTKNNQPTPTDSTIDDIVQHLQISTESIGRLHYAIAGNEDASLLTQLKLMRGDQNDKLTNIHNAFTEFAKIQTENNSKALIEALKEVIHDFNEKIGEQFGENFKQLNEAVGKINEWQQQYSLQIREMIEQQTQTTENMQQATQSFSEIMTQSESFTQVAKDIHQTIGTASSLEKGIEENLKQLAELIESSKTGIPEIEKGIMAIIEDVRNGAKASATVIGDSIYTVTRTLESSAADFTSQMIGSSKAMSDAIKNQNQEMQKSVQKTGTELQEQITRLSQDLTKYMQKHNEDVTNNIVELNKKTEQQVQTLDAALAAALKKSLDSLGQQLGALSSKFVQDYDPLTEKLRDVVRLSENLRR

SEQ ID NO: 6398 - protein, 244 aa, Pectobacterium atrosepticum
MNNPLLTHKKADKEDFWISLSDLMTSLMMIFLLISVVYMIKVQEMVKIPSVYKNTLQGLGQALQLEFKDDLKRWHATIDEDLTVRFQEPNILFTTSSSELKPEFKSILDEFIPRYLGIMTDKKYIDNIEEIRIEGHTSTMWRTGVSENDAYFHNMELSQSRTRTTLSYIMNMPAVSDSKNTLSWFKNHVRAIGFSSAKPIDKEGKTITSPTQIEDSARSQRVEFRVRTNVERQVANIVEKGNKI

SEQ ID NO: 6399 - protein, 291 aa, Pectobacterium atrosepticum
MDSFLVSQLPDFLESSIFNNLRKEMKAEIIPPITEIKMDALVLDKILSTTGKDVDILEIEINSDHTINYKDNRVILHIRDVASYSGNMSLPKYHLANCKTLQRMWENNKSGRYVAATRSDGIFTIKSQNTEKTEWVTREENLDVCKFCLETLNWKNYSRKYQDRENIFSTFDLREFFTVYPNSATTYNAEHNDITAPINDYSKNFQIISKQYRESVNWQCEICNINLTRKDLNKFLHVHHRDGQKNNNNNKNLQALCIECHSNQDNHGHMKNNPQLTPFIQIKNSMVLSES

SEQ ID NO: 6400 - protein, 459 aa, Pectobacterium atrosepticum; identical to SEQ ID NO: 6397

SEQ ID NO: 6401 - protein, 244 aa, Pectobacterium atrosepticum; identical to SEQ ID NO: 6398

SEQ ID NO: 6402 - protein, 291 aa, Pectobacterium atrosepticum; identical to SEQ ID NO: 6399

SEQ ID NO: 6403 - protein, 459 aa, Pectobacterium atrosepticum ICMP 1526; identical to SEQ ID NO: 6397

SEQ ID NO: 6404 - protein, 244 aa, Pectobacterium atrosepticum ICMP 1526; identical to SEQ ID NO: 6398

SEQ ID NO: 6405 - protein, 291 aa, Pectobacterium atrosepticum ICMP 1526
MDSFLVSQLPDFLESSIFNNLRKEMKAEIIPPITEIKMDALILDKILSTTGKDVDILEIEINSDHTINYKDNRVILHIRDVASYSGNMSLPKYHLANCKTLQRMWENNKSGRYVAATRSDGIFTIKSQNTEKTEWVTREENLDVCKFCLETLNWKNYSRKYQDRENIFSTFDLREFFTVYPNSATTYNAEHNDITAPINDYSKNFQIISKQYRESVNWQCEICNINLTRKDLNKFLHVHHRDGQKNNNNNKNLQALCIECHSNQDNHGHMKNNPQLTPFIQIKNSMVLSES

SEQ ID NO: 6406 - protein, 583 aa, Vibrio navarrensis
MTDFLASIIASYSAASISDAFIYTIVLLLIISSVLAFLGKHPRFTASTTNILTSLGILGTFAGIVVGLMEFDPSNIDGSIESLLAGLKTAFLTSLVGMAASILYKAILGVIPHKDELTIQAVGPEEIYSVMSAQLNASNDLLSAIKGDEDSSLTSQIKNLRTDINDGNKSLGRHLEKAANSSEQFQFKLWNKMDEFGELLSKSATEQVINALKEVIVEFNDKLTEQFGENFKRLDESVKKLVDWQENYKNQLEDMATKYQLGVDAISSTEKSVASINERAESIPATMEKLHHVMELGHGQVTELEHRLEAFKDLRDKAIEAMPQIKEQMDSTMSVIGESVKAASSHYESMLAESQNIIDNFSYTATQGVELMRTNLESGAESVSKQLIESSHTIGGKLAEASSDIQEQVGTATGGLSNMTNHLTNTTEQIRQHLEDSITELNSQLRVLVADIKDDARETGNVLKEANQELLNSTKEIQSQTTSAITKLHDRLETTLEEVFQVQAQAVRRTFDSLEDQITQSVAQTGSAVEKQVEILDLQMQQEINRTMNEMGEALATITQQFTRDYQKLTREMSNVINTRVAV

SEQ ID NO: 6407 - protein, 235 aa, Vibrio navarrensis
MEKLFGSPPSRGEGGEHWMSVSDLMAGLMMVFLFISVALMRDAIVERDKIKDVAETYQQTQQAIYISLLEEFAKDLDKWGAEIDRDTLSVNFTAPEVLFANGKASLTDQFQRILNDFFPRYLEVLEQYKPIIQEIKIEGHTSSRWNHDSSDYEAYFNNMSLSQSRTRTVLGYVMRLSDVRAKHYGWVKNNVAAVGYSSSKAVVIEGVEDEKRSRRVSFRVITNAEEQILKILGAE

SEQ ID NO: 6408 - protein, 378 aa, Vibrio navarrensis
MKLTLNLHSLMYAVEIMEPEKRGVFQWEHQITEKSKIDVELAYGKDVELKDVDIDSGLLSYKGRQVLLYIKDHGNAVQSVINNPSMGNKYHVADCSKLKSMRSEGRFERYVVINDTSGEFPISGSHSYGQGREDGYARLNVCKLCLGQLNYKGYGSGGSRSNIFDKFNMAEFFSTYSSFFPYMPSRRGETAESGYTADWSKISSHYRVEKNFECEECQVDMRSNRSLLHVHHVNGVKSDNRSSNLRALCVDCHSKQPMHQHMALSHRERQTINCLRKEQGLLDDLVDWEKLFNLSDPGVHGVLHACRQAYLRLPEINYVIENGTDDLAAHLELAWPKHKFGIAISENDLDIANRHGWHAVGVNEFLENYKTQAYNLRY

SEQ ID NO: 6409 - protein, 606 aa, Nitrococcus mobilis Nb-231
MPFGYCVLPGLIEGTRDCGSAWAAFEHEIRILIGVPMLDLASIIETALQQVSAAEITNGVLFLLFAIFFLAVIAAIWGKMPRFGHYTPNLLTSLGILGTFVGIVVGLLAFKVNDIDASIGPLLEGLKTAFITSIAGMCLAIVFKVLDSIGMTSMFRRDKDAVPEHIGPSEIHAELRGQREATERLSWAIAGDEDSALISQIRLLRSDAQDQSKSSLEQLRAQSELQASLSRNSKLQQQSFNEFTDALWNKLDDFAEMLSKSATEQVINALKEVVADFNRNLTEQFGDNFKKLNAAVDELVQWQENYRNQLAEMNEQYAQGVQAITQTANSVTEISEQSRQIPETMSELKAVMETANHQIRELERHLEAFRDMRDRAVEAVPQIRQQMDQMVQDVSAAVKDAGQQIMMATQATHKAIVEGAKDFENRVSRTNEGLTNTSDQLANNSERIREQLAATVKDINASVRAMIAEVTDSSKAIGNNLVDANKRLETSIKEVQYQVTDSIDSMQKRLESALEQVFQAQTREIARTFGALDEELRKSVRTTSEAVNTQLEAIDKAMLNEIERVMQAMGRELAGITQRFTSDYKDLTSQMGQVVEQNRQFVRMAR

SEQ ID NO: 6410 - protein, 237 aa, Nitrococcus mobilis Nb-231
MEKVFGKYRAGGEGQEAHWLSVADLMAGLMMVFMFIAIALMRNAFQERDQIREIAVAYQENQVAIYNALMKEFKDDLAHWNASIDRDSLAFRFKSPDVLFEVGSAEIRPRFKDILEDFFPRYLGILKGFKDSIDEVRIEGHTSSTWNQRVTDTKAYFLNMELSQGRTRSVLQHVYRMPSIRGDQPWVQRQFAAVGFSSSRPILRPDGKEDRAHSRRVTFRVITNAEIQIRKILEESG

SEQ ID NO: 6411 - protein, 368 aa, Nitrococcus mobilis Nb-231
MKRLNVDLSGLQEAARLMGAEPVELSIEREMPPPPIIGCELEKGVELPDLAEVESDNGLLGYKGRQILLYIQDHGPNVAVALEDGYQGRRFHVADCKTLKNMRAKGRYERFVVTNRRDGEFYVFGKDWYTGQKNEGYARLWVCQNCLNSLNYKGAQRRNVRDIAQSFDIEEFFSIYSSFFAHLPSRYAGDGTQEDYTQDWHRVAARYKADQDFRCQSCKVDLSTQKRLLHVHHENGVKSDNRRANLRTLCAACHREQADHGHMFVAHKDMRTINRLRQRQGVMEDLGWSEVFKFCDPALHGVLDAYRARGVKMPEVSYDVQDATKAVVANLEIAWPREKMGVAISAADRDAARKAGWKAFSMIDALRT

SEQ ID NO: 6412 - protein, 391 aa, Pseudoalteromonas citrea DSM 8771
MATNLIFISIITTAVAVLFFIYEARKSTSKVATITPSLCVTIGIFFTFVGIAVSLQSLAPSSNSQEAFEALLVGLKSAFWSSVIGLGGSILCRWQSTKYGKDPYDEYAKQTNHIVVALRENSRSVIHAINNNSKTIATILSEQLFKDSESLSQQFQESTNVILKKFAANIEILISQSNTLLNDVNTSVQSNQVILNTMVTSSQEFNENNRIAMRNSANLLRNCVMHFNTILESTEKSLISFEVQNEKLQKGMEDVSSAIMSDFSKVQTLYHSLSHDINRVESAMKSVSQLVIDLKQVQELLEKDHKESMVAAITDFKVQFQNVSKEFDALNLAQMKAAHAFFENLDLTVEKGLTEVVDVYTSGLKTILKDNNTVLIKSKAKETDLQLDEVE

SEQ ID NO: 6413 - protein, 217 aa, Pseudoalteromonas citrea DSM 8771
MLFNAQGTEDSGLAISDLMTALTAVFLLGTLLAIEKRDLRSEYEAFNNTSFENNLLNEKRRVGKLLETVSNNKSKLHWDESRHALTVWLQFEKNDSKLTESAKATLNMLCPKLISIVGNHGSSIGKVIIRGHTDRSWSGKGNDFVGNMRVSYERAMNTTDYCLASLPKKEVVIASKFAAEGVSFLYADSSLTKGQENLQRRVEILFDYTQQARQEND

SEQ ID NO: 6414 - protein, 262 aa, Pseudoalteromonas citrea DSM 8771
MTKFNGFRSSWYEVLGNVRESVDRKILFNYRRDPGFFKDGRPVFAYKKEFQIARYDELTADNIMSKTPKVHLTYCQNIQRAPGKYQVTSRADGFFHVNLKAESGEIQEEEVLLPMAACQFCIRMLFPDYLPPLGKNKAKCDELASNFNFADFVIEGVVLSHIAFDESNILNRFLGERNWSEFSRDMRAKNNWCCQLCKISFKSYKHLLHVHHINHSQYWNSPANCMVLCIGCHAKQPHHQHLKQNKLYSLYEEYIKKVTLTY

SEQ ID NO: 6415 - protein, 599 aa, Pseudoalteromonas citrea DSM 8771
MDIINLQNDEALRYASSLTIIVCSFIVIAFFIAVRNSKAGKSNEFVSYTPALLTSLGIFGTFAGIVIGLMAFDATNIDGSIEGLLNGLKTAFLTSLVGILLSIIFKVLQTSGVISKPDSAESITGATPEDILSAINNQRQSIDTLVTAIGGDSDGSILSQLKLLRGDINDNQKLTIKSSQETAETLKTINEQLTNQKEAFTKFSDKLWIKMQDFADMLSKSATETVIEALKQVITDFNNNLTEQFGENFKQLNEAVKELVTWQENYKVQISEMTEQYKLGVASISATEESVSKISTESKAIPETMNNLKEIMDVNQHQLNELERHLEAFKDIRDRAVEAVPEIRKQIDETVKTIADSVESASSHYKELLTESDKYIQTHITSSNELLEKFVNNTKDGVETIGEKLADSASKVEKVISEGANEFTDKVHQTNAGLQTTADHVTSQTEVIKNHLKDTVEDLNDHVRQMIHALVDDSKALASTLTDANKALVTDTTSVRDNVTQSIESMQKRLESSLEDVFESQTQHMTKVFSNIDASLREQVSKTGDKVEGQLDMLDQAMQQELNKVMSVMGTKLGQIANQFVKDYSRLTEQMNAVVRKAS

SEQ ID NO: 6416 - protein, 235 aa, Pseudoalteromonas citrea DSM 8771
MNSIFGTSRNIEDGEHWLTVSDLMAGLMMVFLFIAIAFMRHVSIERDKIKDVAVAYQQNQVAIYDALNQEFEKDLSRWVASIDKETLSFQFDSPDVLFDTGESTLKAEFKEILETFIPRYLKVLDEYRDSIDEVRIEGHTSSEWGNDTHPNDAYFFNMTLSQNRTRSVLNYAYFLSNLSDEQRAWVKSSFAAVGLASSRLKLNQDGSENKEKSRRVSFRVITNADIQIRKIVEGL

SEQ ID NO: 6417 - protein, 382 aa, Pseudoalteromonas citrea DSM 8771
MAFKLTVDFSSLDQAVSQMGAELIEFDLESKVIPIEPIDRKLNEGFEVNFEDIEFDTGLASYQGRQVLLYIKDHSYNNKIYTVLEDGSKGNRFHVADCEMLERMRQKGRFDRYVVTNKLDGMFPVSGTDNRTNELVEGETDLSVCQYCLEATNFQKFASLKRGAPRRDFVQNFKLADFFDTYSSFFKFMPTGVASNQTSHYTKDWETVSKRIREKFNYQCQQCGLDLAQHKRLLHVHHINGVKSDNSDSNLTPLCCDCHRKQPDHQHMFIKHEETKLISHLRNAQGLNVKENWQDVYDLADPGIHGVIDLLEKYHVSLPEVGEEIQNEKKEVVAEMELAWPLKKVGIAIDKPEAIEATKLGWKVYSMRHALSQIDQLASSLR

SEQ ID NO: 6418 - protein, 588 aa, Pseudoalteromonas piscicida JCM 20779
MQPVVQTSFVESNSGMITMVIGVILIAICITSLFHAKNKKHIEFVNYTPTLLTTIGIFGTFLGVVIGLFNFDHTKIDLSISALLFGLKTAFITSLLGLFLSILFKTCQTTLFFEKEEISISEASPEAILSAIKEQTKATSDLKDSLVGNDESTLLGQLKIIRADSNDNFKQAFNLQKDQFDAQTLKQQEFADKLWIKLQDFADTLSKSATEEIIAALNNVIADFNQKITEQFGDNFKQLNEAVFKLVEWQENYRVQLEEMKAQYNHGVEAIVKTEGSVASINEHAKSIPQSMDTLTEVMEVNQHQLAELERHLEAFEQMRNKAIEAVPQIQQQVEKTVQDIGAAVNAASTHYTSLLTHSDEYINKHIASSEALLDKFVNSTERGIDAVGTKLISSSENMGKALDLASTEFTNNASRTNESLQSSSDYLADGSDKMKLHISDAVSDLNNNMRDLIEKVVVETRTMSTTFKDANSELAQDTKQARDTFLSTNSEVREQIKRVIEQAAQEQMQQTQRTFVAIEESAKQQLEKTHETVEHQLRMIDQSMQEELTRALQLMANSLGQISNKFAEDYQVLTQQMRRVVEQGATA

SEQ ID NO: 6419 - protein, 234 aa, Pseudoalteromonas piscicida JCM 20779
MEDIFGKRKRSEEGGEHWLSISDLMAGLMMVFLFIAIVFMRHTMKENEKIKNVAVAFQENQVAIYESLMSEFDKDLDTWGAEIDKETLAFNFKSPDVLFDNGDIDIKPAFAIILDDFFPRYLKVLKPFRSSIDEVRIEGHTSSEWNKDSTDEEAYFKNMKLSQGRTRSVLSYLYTLVPEETPWIKRNIAAVGFSSSRLVLTEQGTEDYEKSRRVSFRAITNAHIQIKRILEAQE

SEQ ID NO: 6420 - protein, 219 aa, Pseudoalteromonas piscicida JCM 20779
MKIEIDFSTLQTATLKMGAPNKHIKLDSPLGKINPIDNGLGIGLVLGEDLQLSEIDNTNNLLSYKGRQIMLYIPEQGSQIEEVIKDGKIDGAKRLHVAECKTLENMRNQGRFERYYVTNDISGSYPVMGHHHYRGDVIEGKAKLGVCKNCLRILNYKGYADHSHIKKSRIYQEFNLAEFFETYSSYFKHYPNQNKSIGSYTKDWEQVSSQYRQTQNYTL

SEQ ID NO: 6421 - protein, 494 aa, Legionella lansingensis
MNKIFALLLALVSCPVLASESNTPVPTLFSLLQQFSSIELCWMALTICFLITFLVRFDRFAVTYGPEILTTMGIVGCFACIAWALLHFNSNNITASIPSLLNGIKTAFCSSFIGVFGALLIRGRHKLSKNVSHQTKESAPASMDDLVKEITNLRKTLSGDEEGSLLSQVKMLRQDSNDQQKKLQESFDNFANKMLENNQKAFIEALKEAIQDFNQNLTEQFGENFKHLNQAVEKLVIWQEQYKQELETIKQYQSQFSNDMKQSSEAFATVVEHAKQFTDIAQNLKLLLESMDKQKDVLFVQEKALSELLVTMKDYIPEFSVSTQKMITEISDGVKFVQSETAKLISDYSAEVKSVNNEMRSSLTDVIKQTQDSLTSGIQNNLKAIQEAIITVEAQTSEIIRNHSAQLQSTQAEMKNVLVDGITKSQQELTSGLQENGRIIREGVLALDKELEKSLTDSLTSLGKQLASLSEKFVSDYMPLTERLREIVRLGEAA

SEQ ID NO: 6422 - protein, 230 aa, Legionella lansingensis
MEDHNQSYWIPLSDLMTGLMMVFMLIAVSFMLQVEQTTTLVVKEFEETKSDLTQALQKEFAKDLKQWNAELLGDMTIRFDNPDVLFDTGSSIVKPAFKEILNDFIPRYISLVSSDKYRKSIKEIRIEGHTSKKWASDTDEKTAYIKNMRLSQERAQSMLEYILGLSSLSEHEIWMRKYLTSSGFSSSKPILNQFHAIDDGRSQRVEFVIVTNADSKLDEISSEMKKIKNG

SEQ ID NO: 6423 - protein, 272 aa, Legionella lansingensis
MGAELVKEFKFDTGISLLGEDFIKRLDGDGVEIESLDEIDLFRHDKTLACKGQRVLIYIRDVNIYGEDRELPKYHISSCRTLVDMWRKKRSERYVIQNREDGVFQVRITKDGQTKVRHEKLNVCRNCLTNLNWQDYSEREKSHKNRIVADFLIAEFFKKFPKSLLSVTPSYDADTAPLNEYPSNWPEISKNAKKKAGYQCQNKSCQIYLAGAHVQYLHVHHIDGQKNNNKKYNLKVLCVKCHANEPSHGHMKSTRDYKQFLSLYAQIKKNKF

SEQ ID NO: 6424 - protein, 586 aa, Actinobacillus minor NM305
MVYFFESFLKNLSTDGITNAFFFILIIVALLGISAFLTSRFKKSKRFTSFAEYTPVLLTSLGILGTFTGIVSGLLNFDIEHIDTSISSLLGGMKTAFLSSVFGVFLSILLKIIYTIFSKNKENNALDAQAIVDNFYEQTEQLKKQNQYTESLISHIENLVKSLGSDSDSSVLGQLKLLRGDLSDRQTQFRHLIEPMATNLLSIQSLVQDNQQVFERFENKLWIKLQDFADMMSRSATEAVIEALKQVIQDFNHNLTEQFGENFKELNKAVTLLVEWQENYKKQLNEMISLYHAGVQSLSTTEMSVANIENSTKSIPTTMEHLSKVISTNQNQIDNLENHLNTFAQVRDKAVEALPEIQKQISLMLENTEKANVELVDGLKQSGEKLASDIVSISNDFKEKTLETSNKLAKSFIENGEMFTSKLTQATEPLVVSITKNHSALVESAAVLEKTATAMNDEQKAFLAQQNQISTQITDFIMRWQQQFEQNTQQIQQQFTRSLESFMQEHMQESRKLMAKLEKESETALSRTGESIDKQIKALDSALETELSRVIGNMGQALTSISRRFTDDYSELVEAMKRITTKGRNF

SEQ ID NO: 6425 - protein, 229 aa, Actinobacillus minor NM305
MNIDLSKFIDKKSNGDDSQWLPMADLMSGLMMLFLFIAVSFVLNTKKVAENYRDTQNEIYQALKDEFEPNLETWKARIDKDTLTFIFTDPEVLFKTGDSTLQERFKTTLNEFFPRYMRVINDYKDSINEVRVEGHTSSEWNLNSDEDTAYFENMRLSQERTREVLYYIYHLNTVKEYRQWIKANISSVGLSSSKVILNNGIEDKQASKRVTFRIITNAEEQLQKLSEMK

SEQ ID NO: 6426 - protein, 280 aa, Actinobacillus minor NM305
MEIKADFSALFSSIRKMGITELVPFSIDFNSKPVEIVVEGLSSSKGIEVPIADVKPDPDSGVFTYQGEHVVLFIPDHSFKYDEAILDPKNNGNKYHLTDCRTLEQMRKSGRFERYHATNNRKGIFHISGSLTTQEAEVELSVCKNCLAALNYRNYTLNRIRVFNEFNLEDFFNHYETFFRKIPNDKKPSKPGYVDDWEEISKHYRESVNFTCEECHVNLELYRYLLDVHHKNGVKQDNKEENLKAMCKLCHSQEAFHSHMIVKQEDELLIKKLRREQGIF

SEQ ID NO: 6427 - protein, 550 aa, Enterobacter asburiae
MLAQLFEHLFQSIDSTLVTNIFIWAVIFVFCAAWWCDHKNIHNKFREYAPTLMGALGILGTFIGIIIGLLNFNTESIDTSIPVLLGGLKTAFITSIVGMFFAILFNGLDAFFFANKRRLLEVNIPTSVTPEHIHQELQEQNKHLVKLISGMSGSEEGSIVAQIKLLRNEISDASRAQISNHSNFSNKLWEQLQQFADLMAKGATEQIIDALRQVIIDFNNNLTEQFGENFKALDISVKKLVDWQENYKNQVEQMGEQYQQSVESLVETRKAVAGIWEECKGIPLAMAELRDVLQVNQHQIGELSRHLETFAAIRDKATDVLPEIQTKMSEVGELLKLGAANVSSSLEQTSQQILINADSMRVALDEGTEGFRQSVTQTQQAFAAMAHDVSNSSETLTSTLGDTITEMKQSGDEFLKSLETHSRELHRNMEQNTANVIDMFSKTGEKFNQQLSSNADNMYGSMQSSFDKASAGLTSQVKESIEKFGSSINEQLHAFEQATEREMNREMQSLGNALLSISKGFVGNYERLLKEYQAVMGQLQTLISANQKRG

SEQ ID NO: 6428 - protein, 235 aa, Enterobacter asburiae
MDKILGKQAPKKDQDNEHWVSMSDLMAGLMMVFMFISIAYMHYVRIEKEKIKEVAVAYENAQLQLYNALETEFTKDLPAWDAEIDKQTLEVRFKSPDVLFGLGSTELKPKFKQILDNFFPRYLKVLDNYQDHITEVRIEGHTSSDWTGASNSDMAYFNNMELSQGRTRAVLQYVYGLKDSAAHQKWVKSKFAAVGYSSAHPILDKSGKEDLNRSRRVTFKVVTNAELQIRKIIQE

SEQ ID NO: 6429 - protein, 363 aa, Enterobacter asburiae
MKLSIDISELIQLGRKMLPEGVGFFLDETPVVFDPIDIELSAGKEVRIEDLDPGSGLISYQGRQVLLYIRDHTGRYDSAIEDGEKGKRFHIAWCRTLDDMRQKNRFERYHATNRVDGLFEIDDGLDRSQDVALKVCMNCLERLNYKGSIDKQQKRLIFKSFSLNEFFSDYSTCFRHMPKGIYDKSNSGYVENWKDISKATREQANYKCSDCGVNLMPMKNLCDVHHINGIKYDNSAENLLVLCKDCHRKQPFHEGIFVTQADMAIIQRLRSQQGLLKVESWKDIYDLTDPSIHGDINIMQHKGYPPPIPGLDLQNSEHEIIATVEAAWPVAKIAVNLTPIKVDGWKVFSVGELVKEIQSGVIF

SEQ ID NO: 6430 - protein, 550 aa, Enterobacter asburiae; identical to SEQ ID NO: 6427

SEQ ID NO: 6431 - protein, 235 aa, Enterobacter asburiae; identical to SEQ ID NO: 6428

SEQ ID NO: 6432 - protein, 363 aa, Enterobacter asburiae; identical to SEQ ID NO: 6429

SEQ ID NO: 6433 - protein, 550 aa, Enterobacter asburiae; identical to SEQ ID NO: 6427

SEQ ID NO: 6434 - protein, 235 aa, Enterobacter asburiae
MDKILGKQAPKKDQDNEHWVSMSDLMAGLMMVFMFISIAYMHYVRIEKEKIKEVAVAYENAQLQLYNALETEFTKDLPAWDAEIDKQTLEVRFKSPDVLFGLGSTELKPKFKQILDNFFPRYLKVLDNYQDHITEVRIEGHTSSDWTGASNSDMAYFNNMELSQGRTRAVLQYVYGLKDSVAHQKWVKSKFAAVGYSSAHPILDKSGKEDLNRSRRVTFKVVTNAELQIRKIIQE

SEQ ID NO: 6435 - protein, 363 aa, Enterobacter asburiae; identical to SEQ ID NO: 6429

SEQ ID NO: 6436 - protein, 433 aa, Pantoea stewartii
MNIKNFLFLVVLVPWAANAGTMSAIFSDTITNIFIFINIVLTIFFAFIRFDRFSVVHGPEVLTTIGILGCFVGIASSLLHFDASNVSESVPHLLEGVKTAFLASLSGVFGSLVIRARHYFQKKPIQQSSGAPKAATLDDVVSATQELQRSLSGNAEGSLLSQLKLIRQEQSDELLALRKSFESFSEKMAKDSSETLIEALKGVIKDFNEKIGEQFGENFKHLNAGVEKLVVWQQQYKEELDKLQILQKSSADDLNNASAGLALFIDRASNFADTAEALEITLKGLAYQHEQIENSQASLTEVLLQMKGVIPQFSQKIDEMADSMSKGVAKVQNEINEIMKGFGVQVQSTSSEMKQLLTETLRKSQNEFNESLKDSMDSVRQSVITLDKGLQEELTKSLESLGRQLASLSEKFVSDYTPLTERLREVVQIAAVK

SEQ ID NO: 6437 - protein, 226 aa, Pantoea stewartii; identical to SEQ ID NO: 4787

SEQ ID NO: 6438 - protein, 286 aa, Pantoea stewartii; identical to SEQ ID NO: 4788

SEQ ID NO: 6439 - protein, 433 aa, Pantoea stewartii; identical to SEQ ID NO: 6436

SEQ ID NO: 6440 - protein, 226 aa, Pantoea stewartii; identical to SEQ ID NO: 4787

SEQ ID NO: 6441 - protein, 286 aa, Pantoea stewartii; identical to SEQ ID NO: 4788

SEQ ID NO: 6442 - protein, 520 aa, Dickeya paradisiaca Ech703
MINIHPYDTYIAIGLIICFWFYFNKNFTEKNAQEGPGLLITIGIGATFFGITIGLLSFDMNDVEKSLPELINGIKTAFVASFAGVFAALIIKIRHIFIKVNKTDDTSEEGATIDDIVRQLKKSDTSLDKLHYSLVGNEEASLLTQLKLIRTDQNDQLGNLHKAFIEFAQKQAENNSKALIDALREVIRDFNEKISDQFGENFKQLNDAVGKINDWQEQYRQQMQEMIEQQKQTTINMQQASEGFTQIVQQSQSFGQVAEDIHNTIGMISILEQTLRENLTLLASVIDATKNGLPEIEQKVIAMVSDISNGAQASTSLITQHIQDVSHTLQSSANDFSLQLNSSAENMASAVVKQNSEINQTIHEISIDLKQQVSDIAKDLVHHQDDITQTLKLSTSQFTQQLNSSAENMAHAVTKQSNEMHQAVQKTSSELNQLITGLEQELTKYIQRHNESITGHLSEMTKNTAQQVTVLDKELSEALKKSLDTLGQQLGSLSTKFAQDYTPLTEKLKEVVRLAETLKA

SEQ ID NO: 6443 - protein, 248 aa, Dickeya paradisiaca Ech703
MANRLLASAKSSKSKEDYWISLSDLMTSLMMIFLLISLIYMIKVQDMVKIPTVYKNTLQGLGQALQHEFKDDLKRWHATIDEDLTVRFQEPNILFNNNSADLKPEFKAILDEFIPRYLNIITNPKYIDNIEEIRIEGHTSTVWRAGVSEKEAYIHNMELSQSRTRSTLEYIMNMSVVSEPESMFSWFKGHVRAIGFSSARPVDSEGKVIISADKIEDRARSQRVEFRVRTNVERQVANIVEKGKNTHE

SEQ ID NO: 6444 - protein, 287 aa, Dickeya paradisiaca Ech703
MNKFRVAELPDFLKVKKLNELRHSMQAEIIPPISDIKIKTLDIDELLATTGIDTSIEDIKVNQDNTFDYNNKKVILHIRDVNTYGKEITLPKYHLANCRTLQGMWRRNRSGRYVVATRSDGLFIIKHLDASGTEWETKETRLNVCKSCLETLNWKGYSSKSYQERMTIFNQFSLKEFFEKYPNSKTTYRAEHTDISAPTNTYSNDFNTISKQYRESIHWHCEQCGINLKEKNLNKYLHVHHRDGQKNNNQRSNLQALCIECHSKQDNHGHMNSHHDLAIFLTLKEAL

SEQ ID NO: 6445 - protein, 585 aa, Photobacterium profundum 3TCK
MTEYLSLIISTLNANIISDSFIYLILLVFIVSIALSLKGVADDFTANTPNLLTSLGILGTFAGIVVGLMDFDPKNIDGSIELLLNGLKTAFLTSLMGMATSIVYKGLSGVISRKGNEDDIGEIGPEEIHTVMAKQLEASEEIIKSIKGDEESSLSSQIKLLRQDFNDGNKVMLEHAKSVDRRHDDFQIKLWQKMDEFGDLLSKSATEQVINALKEVIVDFNEKLTEQFGENFKRLDESVKKLVDWQENYRHQLEDMADKYQLGVDAISSTEKSVASINERAEAIPATMEKLHTVMELGHGQVTELEVRLEAFKDLRDKAVEAMPQIREHMDETISTIGQSVQAASKHYEDMLVESQRVIDNFSQTADTSINTMKTEIEGGASKVSEELMRGAQDISGKLAESAQDITTNVGSASGTLNQMANNISDTTDNVRQNLEDMMVELNGEIRALVSGIKEDSAETGKILTTANNELARDTKAAQDASVAAINQMQQRLETSLEEVFQIQAQAVKRTFDSLEEQITTSVGQTGSAVEKQVEYLDSQMQQEINRTMNEMGQALATITQQFTRDYQKLVREMNNVVSSSRMAS

SEQ ID NO: 6446 - protein, 237 aa, Photobacterium profundum 3TCK
MMKKVFGSRSKQQSDTGEHWMSVSDLMAGLMMVFLFISVALMRDAMIERDKIKEVAVTYEENQQAIYLALLDEFESDLNKWGAEIDRESLSFNFTAPEVLFANGRASLTPQFQVILDDFFPRYLQALNTYKPSIQEVRIEGHTSSRWNNGSTDSEAYFNNMRLSQSRTRTVLSYVMALEPVKINHYDWVKGHVAAVGYSSSKTIVNTDGIEDEKKSRRVSFRVITNAETQIRKILGG

SEQ ID NO: 6447 - protein, 363 aa, Photobacterium profundum 3TCK
MKLSVNFSGLLAAVQLMEPEEKGGFSLEYEPTNIDKLDLELSVGKDVELKDVEIDSGLLSYKGRQVLLYIKANGNSARFHVSDCSTLKSMRSSGRFERYVVTNDTSGEFIVSNGSGRGETKARLKVCQNCLRQLNYKGCNTGSSIYPIVQNFDLNKFFSTYSSFFPHMPQRQAASAQTGYTDDWQRVSSHYKVEKEFKCEECLVDMSKHRLHLHTHHINGVKSDNKPSNLKVLCVDCHSKQAKHDHMFVAHDIRQLINDLRQEQGLLNQLSGWNALLAVADPGLHGAIHACQQFGTKLPDVGYYVGDEFGELVAKLELAWPKHKFGIAVSNHDREEANNEGWNVVSADEFLANYKSQASNLRW

SEQ ID NO: 6448 - protein, 435 aa, Paraburkholderia caribensis
MKIRTLLLLSGIAWAARASAAGPVSTVLADTPTMAFILVNLGLTIFFAFIRFDRFSVVHGPEVLTTIGILGCFSGIAMALLHFDASNVSESVPHLLEGVKTAFLASVSGVFGSLVIRGRHYFRKTPIPQTEGAPKAATLDDVVAATQALQLSLSGNEQGSLLSQLKLMRQEQGDELRMLRMSFDTFAQKMTEDGSKALIEALKEVIRDFNAQINEQFGENFKHLNAAVEKLVIWQQQYKEELDKLQSLQKASADDMRSAAAGLALFIDRASAFAQTATALEETLKGLAHQHQQIDQSQRSMVDVLSQMKDVTPQFSRKVDEMTESMKQGVAKVQADVSDVVKNFGVQVQSSSSEMKQLLTDTLRKTQSEVNESLVRSMDSVRQSVVTLDKGLQEELTKSLQTLGRQLASLSEKFVSDYTPLTDRLREVVRIAGTA

SEQ ID NO: 6449 - protein, 230 aa, Paraburkholderia caribensis
MDFEHSNQSYWIPMADLMTGLMMVFMLLTAAFMLRVEQTTTLVVKEYEATKRDMQLALQKEFAKDLKQWNAEILGDMTIRFNDPTVLFATGSSELRPRFKQVLAQFFPRYVALLTSGQYKDAVKEIRIEGHTSALWTGTTDEKTAYFKNMELSQARTRSALEYLLSLPSVQGNEKWLVQHVTANGLSSSRPVSQETSSERSPVANQRVEFRIVTNASEKMDLIADKLARK

SEQ ID NO: 6450 - protein, 282 aa, Paraburkholderia caribensis
MSFELPDFLEWSSLNALRREMRAPLAANFVPDHRFKDIDLPVRERLESAGVDVNFDEVEVLDDGTLAYKGFRVLLYIRDIGSIGHQESMPRYHLAYCRTLDKMRRNSRFDRYVVANGDSGSFQVNVIENNVRTQHVRLNVCQNCLDEVHWDGFDMAMSREDRMRLVSGFALPDFFRKYPRDLMAVKPAHSADTAPLNVYAQDWPEVSERTKQQRGYRCGTCSIVLRQTDSRFLHVHHRNGQKHDNRDSNLDVLCIGCHAEEPMHAHMKRLSDYKTYIERYRR

SEQ ID NO: 6451 - protein, 445 aa, Burkholderia cenocepacia
MQDTETISHNMKTKVLLLLSGIAWAPYAFAGGPIGTVLADKQTFTFILLNTCLTIFFAFVRFDRFSVVHGPEILTTVGIFGCFLGIALALLQFDASNVSESVPHLLEGVKTAFWASVSGVFGSLVIRGRHYFWKTPIPQTPGAPKAATLDDVVAATHALQLSLSGNEQGSLLSQLKLMRQEQGDELRMLRTSFDTFAQRMAEDGSKALIEALKEVIRDFNAQINEQFGENFKHLNAAVEKLVVWQQQYKEELDKLQALQKSSADDLRGASSGLALFIDRASSFAQTATALEGTLRGLAQQHQLIDQSQRSIADVLSQMKDVTPQFSRKVDEMTESMKQGVARVQAEVGDVVKNFGVQVQSSSSEMKQLLTDTLRKSQSEVNDGLVRSMDAVRQSVVTLDKGLQEELTKSLETLGRQLASLSEKFVADYTPLTDRLREVVRIAGTA

SEQ ID NO: 6452 - protein, 230 aa, Burkholderia cenocepacia
MDFEHSNQSHWIPMADLMTGLMMVFMLLTAAFMLRVEQTTTLVVKEYETTKRDMQLALQKEFAKDLKQWNAEILGDMTIRFNDPTVLFATGSSELRPRFKQVLGQFFPRYVALLTSAQYKDAVKEIRIEGHTSALWTGTTDEKIAYFRNMELSQARTRSALEYLLSLPAVQGNEKWLVQHVTANGLSSSRPLAQDSQSAASQIANQRVEFRIVTNASEKMDLIAEKLAKK

SEQ ID NO: 6453 - protein, 282 aa, Burkholderia cenocepacia
MSFQLPNFLNWSLLNALRQEMGAPLAANFVPDHKFRDIELPVLDRLQSNGVDVKFDEVEVLSDGTLAYKGYRVLLYIRDIMSIGHQESMPRYHLAYCRTLDKMRRNARFDRYVVANGDTGKFQVNVIENDVKTQHVRLNVCQNCLDEIHWNGFDMKMPRDGRLTLVSKFALPDFFKKYPRDLMAVKPMHSSDTAPLNVYSQDWNEISDRTKRQRGYRCAACNTMLRQTDSKFLHVHHRNGQKYDNRDSNLEVLCIGCHAEEPMHGHMKALREYQEYVERYRR

SEQ ID NO: 6454 - protein, 494 aa, Legionella drozanskii LLAP-1
MRYFFAFIFSLFTASSGFAADASNHALSILSSPELIVFLGLISTSTVYFFFKSDRFSIIHGPEILTTLGILGCFLGIALALLEFNSNNITSSVPALLEGIKTAFWSSVAGISGALIVRVRHKFSKNFTQQTGKGAKQDPMDSLIKEIVNLRKTLSGDEDGSLLSQVKMLRQDSNDQQKKLQDSFDNFAKHMIENNQKALIEALKEVIKDFNQNLTDQFGENFKQLNQAVEKLVIWQQQYKEELDVIKRYQSQFANDMKQSSEAFATVVEHAKEFTDIAQNLKLLLESMDKQKDVLFIQEKALSELLSTMKDLIPEFSENTSKMLSEIANGVKHVQLETVKVISDYSSEIKNVNNEMKNTLTDVIKGTHNSLADGLKDSVKIIQESVQEVQSQTAEVIKNHGSQLQSTQAEMKNVLIDGINKAQQEVTAGLQENAKIIREGVLALDKELEKSLTDSLTSLGKQLASLSEKFVQDYLPLTERLREVVRLAKKSEAT

SEQ ID NO: 6455 - protein, 230 aa, Legionella drozanskii LLAP-1
MDSSNQSYWIPLSDLMTGLMMIFMLIAVTFMLRVEQTTTLVVKEYEETKSDLAQALQKEFAMNLKQWNAEILGDMTIRFDDPNVLFDTGSAVVKPAFKEILNDFIPRYIELVTSKKYSHSIKEIRIEGHTSKKWAADTDEKTAFIKNMRLSQERAQSMLEYILNLSTLSPHEKWMREYLTSSGFSSSKPIFDEQHLVDDERSQRVEFVIVTNAESKMDAISKEILSLKNG

SEQ ID NO: 6456 - protein, 270 aa, Legionella drozanskii LLAP-1
MVAELVQEFKFDTGISLLEDDFIKMLDGDGIEIESLEEIDFRGDKTLGYKGQRVLIYIRDVHSFREEIRMPKFHISTCDTLVTMWKKRRSERYVLYRKENGIFPVNIFKAGKADIRHEKLNVCRNCLTNLNWNNYTQKRHARDSLVSEFSIAKFFEIFPKSLLSVKPTYDADNAPLNDYTANWNEISKDAKRKAGYRCENTICRIDLTGRHSQYLHVHHIDGQRNNNKKHNLKVLCVKCHAHEPDHGHMKSGQDYKKFVAMYEDLKEQNY

SEQ ID NO: 6457 - protein, 435 aa, Burkholderia ubonensis
MILRILLCLLGVALSPSVFASDSAADILTDGPTMFFIGVNVLLTWYFGFRKFDRFAVSHGPEVLTTVGILGCFFSIALALLHFDASNVSDSVPHLLEGVRTAFWASVSGVAGSLILRYRHYTRKTPIPQTEGIPKSATLDDVVAATQGLQRSLSGTEEGSLLSQLKLMRQEQGDELRSLRSSFDTFAQRMSEDGSKALIDALKEVIRDFNTKIGEQFGENFRHLNAAVEKLVVWQQQYKEELDKLQALQKTSAEDLRNASAGLGVFIDRAGGFADTAAALESTLRGLAQQHHQIDQSQRSMAEVLLQMKDVTPQFSRKIDEMTESMKLGVAKVQADMSDVVKSLGTQMQASSSEMKQLLTDTLRKSQTEVNDSLTHSMEAVRQSVVALDKGLQEELNKSLESLGRQLASLSEKFVADYTPLTDRLREVVRIAGAT

SEQ ID NO: 6458 - protein, 232 aa, Burkholderia ubonensis
MDSEQSNQSYWIPMADLMTGLMLVFMLLTAAFMLRVEKTTTLVVKEYETTKNDMQLALQKEFQKDLKQWNAEILGDMTIRFNDPTVLFTTGSSELRPRFKEVLGRFFPRYVALLTSPQFKDAVKEIRIEGHTSAAWTGTTDERTAYFKNMELSQARTRSTLEYLLSLQAVRPREKWLIQHVTANGLSSSHPISPDAHSTAVQLANQRVEFRIVTNASDKMDLIAQKLQKNGH

SEQ ID NO: 6459 - protein, 284 aa, Burkholderia ubonensis
MAIKLPDFLTWSTLNGLRQKMRAPLVERFGAKLEVTEIELPIIERLRGEGIDVTADQIQVLNDGTLEYKGYRVLVYIRDIPAIGNRESMPKYHFAYCRTLETMYRNKRAERYVVANSDSGLFQVNMMDSGVRAEQVRLSVCQNCLAHIRWKGFDMQMARPNRLAIVGQFTLTEFFAKFPRDLMAVTPRYSSDTAPINTYTEDWGEVSARTRSRRGFTCEKCGIVLAGAESKYLHVHHRNGQKHDNSDGNLEVLCIDCHADEPLHAHMKGLPEYREFFHRHRGQS

SEQ ID NO: 6460 - protein, 435 aa, Burkholderia ubonensis; identical to SEQ ID NO: 6457

SEQ ID NO: 6461 - protein, 232 aa, Burkholderia ubonensis; identical to SEQ ID NO: 6458

SEQ ID NO: 6462 - protein, 284 aa, Burkholderia ubonensis; identical to SEQ ID NO: 6459

SEQ ID NO: 6463 - protein, 435 aa, Burkholderia ubonensis; identical to SEQ ID NO: 6457

SEQ ID NO: 6464 - protein, 232 aa, Burkholderia ubonensis; identical to SEQ ID NO: 6458

SEQ ID NO: 6465 - protein, 284 aa, Burkholderia ubonensis; identical to SEQ ID NO: 6459

SEQ ID NO: 6466 - protein, 435 aa, Burkholderia ubonensis; identical to SEQ ID NO: 6457

SEQ ID NO: 6467 - protein, 232 aa, Burkholderia ubonensis; identical to SEQ ID NO: 6458

SEQ ID NO: 6468 - protein, 284 aa, Burkholderia ubonensis; identical to SEQ ID NO: 6459

SEQ ID NO: 6469 - protein, 435 aa, Burkholderia ubonensis; identical to SEQ ID NO: 6457

SEQ ID NO: 6470 - protein, 232 aa, Burkholderia ubonensis; identical to SEQ ID NO: 6458

SEQ ID NO: 6471 - protein, 284 aa, Burkholderia ubonensis; identical to SEQ ID NO: 6459

SEQ ID NO: 6472 - protein, 435 aa, Burkholderia ubonensis; identical to SEQ ID NO: 6457

SEQ ID NO: 6473 - protein, 232 aa, Burkholderia ubonensis; identical to SEQ ID NO: 6458

SEQ ID NO: 6474 - protein, 284 aa, Burkholderia ubonensis; identical to SEQ ID NO: 6459

SEQ ID NO: 6475 - protein, 435 aa, Burkholderia ubonensis; identical to SEQ ID NO: 6457

SEQ ID NO: 6476 - protein, 232 aa, Burkholderia ubonensis; identical to SEQ ID NO: 6458

SEQ ID NO: 6477 - protein, 284 aa, Burkholderia ubonensis; identical to SEQ ID NO: 6459

SEQ ID NO: 6478 - protein, 435 aa, Burkholderia ubonensis; identical to SEQ ID NO: 6457

SEQ ID NO: 6479 - protein, 232 aa, Burkholderia ubonensis; identical to SEQ ID NO: 6458

SEQ ID NO: 6480 - protein, 284 aa, Burkholderia ubonensis; identical to SEQ ID NO: 6459

SEQ ID NO: 6481 - protein, 435 aa, Burkholderia ubonensis; identical to SEQ ID NO: 6457

SEQ ID NO: 6482 - protein, 232 aa, Burkholderia ubonensis; identical to SEQ ID NO: 6458

SEQ ID NO: 6483 - protein, 284 aa, Burkholderia ubonensis; identical to SEQ ID NO: 6459

SEQ ID NO: 6484 - protein, 435 aa, Burkholderia ubonensis; identical to SEQ ID NO: 6457

SEQ ID NO: 6485 - protein, 232 aa, Burkholderia ubonensis; identical to SEQ ID NO: 6458

SEQ ID NO: 6486 - protein, 284 aa, Burkholderia ubonensis; identical to SEQ ID NO: 6459

SEQ ID NO: 6487 - protein, 435 aa, Burkholderia ubonensis; identical to SEQ ID NO: 6457

SEQ ID NO: 6488 - protein, 232 aa, Burkholderia ubonensis; identical to SEQ ID NO: 6458

SEQ ID NO: 6489 - protein, 284 aa, Burkholderia ubonensis; identical to SEQ ID NO: 6459

SEQ ID NO: 6490 - protein, 435 aa, Burkholderia ubonensis; identical to SEQ ID NO: 6457

SEQ ID NO: 6491 - protein, 232 aa, Burkholderia ubonensis; identical to SEQ ID NO: 6458

SEQ ID NO: 6492 - protein, 284 aa, Burkholderia ubonensis; identical to SEQ ID NO: 6459

SEQ ID NO: 6493 - protein, 435 aa, Burkholderia ubonensis; identical to SEQ ID NO: 6457

SEQ ID NO: 6494 - protein, 232 aa, Burkholderia ubonensis; identical to SEQ ID NO: 6458

SEQ ID NO: 6495 - protein, 284 aa, Burkholderia ubonensis; identical to SEQ ID NO: 6459

SEQ ID NO: 6496 - protein, 488 aa, Porphyromonas gulae
MNEILHEETLTTILVVGIFLAFIFLLIETRRSKSKGNLANKYRTISAFPGFISTLGVLGTFIGITKGLMFFDTNDLDNSIPKLLSGLKLAFITSLMGMIGSLILSRIINHLYDKQERESGQEDNALSALNKLVNVMKDSIDRQEKRAVKQEENTSAILHKIEEIHLGLLCSSEQQSDRMTRLTDIISDYTDSKNTFDQITVILDSIHQEVTGGSLSMRQLASLIQEETTIISKGLEQIENSIANSNELMGEKFGEFSELLKKSNTEALVEVMKRVTTEFQKQMNALIGKLIQENFSKLNDSVESLNTWQQENKSMISSLTEQYNEMADRFSTTSTTLSQVCSDTETMVGSGGKLHQIVVALNQVIVEDKHFIETSENLLSASKLTQENMENYSEATRKLNNWVTKQRNFVDAVQLLIEKLDEINKIKDYNESFWKDTKHSLEDGISILSTGSKTLEKELKSIDEYFYNRLNQTLVNLDACIQAMVRGK

SEQ ID NO: 6497 - protein, 233 aa, Porphyromonas gulae
MDMNNNVWISVSDLMTGLMVIFLFVSIAYIKRVQDNQTVLTDYVETKTELHEKFVSEFKGDTAKWQMSIGRDLSMKFKNPSVLFAQGSYELTTDFQQILNDFLPRYLDILLRDSLRNNIKEIRIEGHTDDVPIPSYDQDPYIANVILSQQRALSVLRYLRTSASFQHYSDYEKQLLEFWFTSNGLSFGRALDAHGQYTLESGQEIDKAKSRRVEFRIVTKGDEVLENFVNENK

SEQ ID NO: 6498 - protein, 259 aa, Porphyromonas gulae
MEREILPIHDFAGLKQLLKKIGYKVITESYSAIKTQDITLDGKNNEIEFTNDGIYLHCSDGIRRKVFLYKPDYHLIEHGKPRFHIRECQTIQDLGRKRYRVANTNRVEVENKDNFGKTEIVEDLPLCKNCLEMVSESYKTSSDYVQYLKDEGECEEDTEVTLDGYTYNWEAISIGIRRERKYSCERCKIILDKPPGLYFLHVHHRNGRKTDNRSENLECLCVACHADVDERHRENFSKKEGQRILKEFKRFLSERENFL

SEQ ID NO: 6499 - protein, 606 aa, Nitrosococcus halophilus Nc 4
MYNLGGMIEEQLRQWSAPLVTDGVLFVLNTIFIIAFIILIANRFRVGLGGVGFVHYTPNLLTSLGILGTFAGIVIGLLNFNVSNIDGSIDPLLEGLKTAFITSLWGMLLAISFKMLDSIIPRMRKKKEGSVEQVGPGEIYAELQAQRESMERLGRAISGDEDSTLISQIRLLRSDGQEQSKSALEQLRKQSDRQEVIAEAIASQHEQFNQFSTDLWKKLDEFAEMLSKSATEQVVNALKEVIADFNRNLTEQFGENFKALNAAVEKLVQWQENYREQIGQMIDQYDQGVRAITQTETAVTRISEESKQIPVAMGELKTVLDTTQHQLTELERHLEAFRDMRDRAVEAVPQIREQMDTMVNEVSSAVKGAGEQIVTASQVVNQAIVEGAKEFEDRVHRTNEGLTSASDQLANNSERIREQLEDTVKEINDQVRNMAAGVTENTKTVGDTLVNANKALETSIKEVQHQVTDSMETMQKRLEESVQSTNQHVRDTMAGAAENVKEITTTLGNAHKDLQSSLKESQRQVTDSMETMQKRLEGALEEIFQKQLEAIDRTMQQEVERVMNEMGKALAAISNQFTDDYSRLTDQMVQVVSQARAFSNQQRLSN

SEQ ID NO: 6500 - protein, 237 aa, Nitrosococcus halophilus Nc 4
METIFGKPRVSGEGEGAHWLSVSDLMAGLMIVFMFIAIALMRNAFLERDRIKEIAVAYQENQVAIYEALMKEFEKDLERWDARIDSDTLAFEFQSPEVLFATGSTEIRQRFKEILADFFPRYLVILKHYKDSIDEIRIEGHTSSVWNNQVSETEAYFLNMLLSQGRTRSVLHYVYELPKVESDRGWVKRHFAAVGFSSSRLVLDDQGNEDRARSRRVSFRVITNAEMQIRKIIEEPS

SEQ ID NO: 6501 - protein, 377 aa, Nitrosococcus halophilus Nc 4
MRLNVDLSALHAAVRRMGAEPVAFSLEHQAEPLDPIDIKLEEGIELLNLKEVESNNGLLSYKGRQILLYIQDQGNSIKKVLEDGSQGRKFHVADCKTLKNMRAKGRFERYVVTHRLNGQFYIVGRDWHTRQNMEGYVRLQVCQNCLEALNYKGAQHRRKIEIAQSFDIQEFYSTYSSFFSHLPRRWAGRKEEEDYTADWPQVTARYKDSKKFTCESCGVNLRSCKELLHSHHRNGVKSDNRESNLMALCAACHRQQPHHGHLCVSHEGMQTINRLRREQGLLHNVGWNKIFELCDPGLRGVLDACCHWKTNVPEVGFDVQDTKDAVVANLELAWPQKRVGLAISDEDRDTARKAGWRIWRMHETLEDIGRFAAEIED

SEQ ID NO: 6502 - protein, 378 aa, Sulfuricurvum kujiense DSM 16994
MIHNMAYFGVGLITLMFLIFVMNRRNKSIQELAPGILITTGIFFTFVGIAIGLVHFNADNVDDSLPTLLNGIKTAFWASATGVFFALIIKILDIFDLTRTNESSAVEGMSIDDIVTYQAKQTDVLVEILRSIKNMHSSIAAQDDSSLVSQIALLRDDSNKKSDALRQEFRDFAATMAENNSKIFIEALKDVIKNFNDKISEQFGDNFKQLNQAVEKTVIWQENYRNQMAQSIETMTLIASMLESQAHDYSIIVSNSAEFESHVSAMGRSLEEITFQREQLQSMIHSLVNFLESASDSLPLIGQKVDDMTERLVKGMNEATEEVQKQVTILDHELEIALKRSLEGLGQQLASLSNKFVQDYTPLTEKLREVVALAAKQR

SEQ ID NO: 6503 - protein, 238 aa, Sulfuricurvum kujiense DSM 16994
MSSLPQKKHHHKEDYWISLSDMMTSLMMLFLLISVIYMIKVQDSVKVPQIYKETTQGLNHALKKEFDKDLMKWGAVIDKDLTVRFQQPDILFATGSSALTPRFKEILDDFFIRYLKIMMSKPFINNIEEIRIEGHTSSMWEGESDRGKAYFKNMTLSQERTRATLEYIMTSDKINLTGEQKEWLMRHFSAIGFSSGHPLTNKGTYLVDGESEDSQLSQRVEFRVRTNIERKVADIVEK

SEQ ID NO: 6504 - protein, 172 aa, Sulfuricurvum kujiense DSM 16994
MKLINFLDFKPLENLRTEMKAPLVKPIFIHPFHSHSKPVKSDRIEIESLDTLTIHPDGTLIFDNTRIILYIADNTLQYLNEAPIISEFHISSCPTIQELVTRGRRLRYFVTAADDEQFVVDDTNEVKRLTVCKDCLLFLNWSQFADVDQKRKKEIVATFTVSSFFEKYPRHL

SEQ ID NO: 6505 - protein, 435 aa, Cedecea davisae DSM 4568
MKKRLLLPLLFIPCVSYAAATVTFNSITSDPITNGFVLINLALTVFFTFMRFDRFAIVHGPEILTTVGILGCFAGIATSLLHFDSANVAESVPHLLEGVKTAFLASLSGVGGSLVIRARHYFQKKPIPQASGTPKAASLDDVVAATYALQQSLAGNEDSSLLTQLKLMRQEQADELRALRSAFDTFSQKMAEDGSKALIDALKEVLSDFNAQINEQFGENFKHLNASVEKLVIWQKQYKEELDTLQSLQKSSADDLKEASLGLASFIGQASSFARTADALENTLEGLARQHEDIDLSQRSMCEVLSQMKDVTPQFSHKIDEMTVSMALGVAKLQGEVGDIVKDFSTQAQTFSGEIKQFLTETLTKSQSEVNAGLTQSVDKIHQSVVALDTGLQEELTKSLETLGRQLASLSEKFVADYTPLTERLREVVRIASAT

SEQ ID NO: 6506 - protein, 226 aa, Cedecea davisae DSM 4568
MNLEQSNQSYWIPLADLMTGLMMVFMLLTAAFMLRVEQTTTLVVKEYEITKRDLQLALQKEFAKDLKQWNAEILGDMTIRFNDPSVLFATGSSELRPRFKVVLGEFFPRYIALLTSEKYRGAVKEIRIEGHTSAFWSGAENEKQAYFRNMELSQARTRSTLEYLMSLPKVLGDEKWLVQHVTANGLSSSHPLLNESSQAANQRVEFRIVTNASEKMDLIAGKLSKK

SEQ ID NO: 6507 - protein, 281 aa, Cedecea davisae DSM 4568
MSFKLPDFLTWPSLDILRHKMGAPLTDNFVLVPVYSEISIMEQLNTGGVEIDLDEISVHEDGTLLYRGYRGLLHIRDISSISGEARMPKFHLAYCQTLEKMQKNSRFDRYVVAQTTSGEFKVNMIDREVVSQTVRLNVCQHCLDKIRWKGFSMSGISRLERQNRVEGFSLPEFFEVYPRDLIGKKPLYTSTSAPLNDYSQNWAELSKALRHKRGYQCESCRESFNQADSRYLHVHHRNGLKHDNRDSNLEVLCIACHAKQPQHGHIKAHPDYKVFMTRYPH

SEQ ID NO: 6508 - protein, 587 aa, Pseudoalteromonas spiralis
MLSNVLPFFISSSTGILTLIFIGVLLLIFGIGYKQAKKNNTPFVNYVPTLLTTAGIFGTFLGIVIGLFYFDHTKIDESITELLLGLKTAFITSLIGLMLSIAFKILQTTTFINEEVISNEDASPENILAAIKAQANATSELQVAIVGDGDNTILGQLKLLRSDANANSTKAHNLSVEQYNKKLEKQDEFADKLWIKLQDFADTLSKSATEEIIAALNNVIADFNQKLTEQFGENFKKLNEAVFKLVEWQENYRIQLEEMKAQYSHGVEAIVKTEGSVASINEHAKSIPQSMDTLTEVMEVNQHQLAELERHLEAFEQMRDKAVEAVPQIQQHVENTVKDIGAAVEAASTHYTSLLTHSDEYINKHIASSEALLDKFVNTTEQGIDAVGNKLINSSENMGKALDLASTEFTNNASRTNESLQSSSDYLADGSDKMKQHISDTVSDLNNNMRDLIEKVVVEARTMSTTFKDANSELSQDTKQARDIFLSTNSEVREQIKRVIEQAAQEQMQQTQRTFIAIEESAKQQLTKTHETVEHQLKMIDQSMQEELTRALQLMANSLGQISGKFAEDYQVLTQQMRKVVEQGATV

SEQ ID NO: 6509 - protein, 234 aa, Pseudoalteromonas spiralis
MEHIFGKRKQSDEGGEHWLSISDLMAGLMMVFLFIAIVFMRHTMKENEKIKSIAVAYQEKQVAIYESLIKEFDEDLEKWGAEIDRETLAFNFKSPDVLFDNGDIDIKPAFANILDDFFPRYLKVLKPFRSSIDEVRIEGHTSSEWNKDSSDEEAYFKNMRLSQGRTRSVLSYLYSLVPKETPWIKRNIAAVGFSSSRLIMTEQGIEDTEKSRRVSFRAITNAHIQIKRILESQE

SEQ ID NO: 6510 - protein, 379 aa, Pseudoalteromonas spiralis
MKIEINFKALQSAAIKMGASNKHTKLDSSLGQLNAIDSGLGEGLVLGEDLQLSEIDNTNSLLSYKGRQIMLYIPEQRSNIEEVIKNGKITEARRLHVAECSTIEDMRNKGFFDRYQVTNDISGSYPVVGRQSYRGEWIESKAELGVCKNCLRILNYKGYADLKGDAKQKVFLELKLSELFDTYSSCFKYYPTRLKTIGSYTKDWDKISSSYREQQNYTCEQCGVELSRYKRLLHTHHINAVKTDNSLNNLKSLCADCHTKQPNHDHMHVLHDDRLLINQLRREQHKFDCSDYREVLNYADSALEGLLLKCKKYSLPTPELGISVRNGDDFVSIDLAWPRKKFAVVIEKEQIQLLRTQGWTVYLASECLNNFTNMQRMIR

SEQ ID NO: 6511 - protein, 588 aa, Pseudoalteromonas translucida KMM 520
MDILESLLRSFDTNVVSGAVLILMFFVFGSGLFYTKKARQVEFVQFVPTLLTTMGIFGTFLGIVLGLLEFNQNDIEASIPLLLAGLKTAFITSLAGIFLSLVFKTLSTFSFLKPKQPEDSISHATPEAILGAMQAQVAETKVLKEAIVGNEESTLFGQLKILRGDINDNAKTSINIAQEQAVKQQESFEAFSEKLWLKLQDFADTLSKSATEQVIEALKQVISDFNNNLTEQFGDNFKQLNEAVIKLVEWQENYKIQLKEMSDQYAHGVASISATESSVAHISEQSQIIPQSMGELKGVMEVNQHQLAELERHLEAFKDMRDKAVEAVPQIQKQVEATVNDISAAVTTASDHYKTLLTQSDDYIKTHVQTSNDLLDKFAHETEKGINSVGERLIESSDKIATEVDNAGTDFINRTSRTNESLQVSSDALSKNSKEIQYHLEGTVSDLNNHMRDMIEKLVDDAKDITSTMKQANQNLVTDTEQVRDTVVKSAEKLQQRLNEVIDDAATQQINQAKRTFDAMEDEVKKQVGMTGEAVDSQLKLIDTAMQQEINRVMNEMGKALAQVSGKFVDDYIKLTKAMNEVVSQRVM

SEQ ID NO: 6512 - protein, 232 aa, Pseudoalteromonas translucida KMM 520
MEKIFGSQNTSQDSGDHWLTVSDLMAGLMVVFLFIAIVFMMITQKENDKIKDVAVAYQQNQVAIYEALESEFEKDLDKWGATIDKETLAFNFQSPDVLFANNETRLSDAYKEILNDFFPRYINVLAPFRDSLDEIRIEGHTSSVGLRGSTEAQAYFYNMRLSQGRTRSVLEYGYALMPNESDWIKANIAAVGFSSSRLIKENGVEDAARSRRVSFRAITNADIQIKRILEAQ

SEQ ID NO: 6513 - protein, 378 aa, Pseudoalteromonas translucida KMM 520
MKLTVDFSALHRAVAPLGQVVTDFSITSDASELESIGSHLNQGMILGKDVQLDEIDGSNGVLNYDGHQVMLYIPDQGDDIEAVLSNGKLGRRIHVAECSTLELMRETGRFKRYDVINRVDGFFPVFGSSYRGGPNTEGEADLGVCKNCLKILNYKGYSTQSSQVKNQVFNSFSFEQFFEVYSSYFKSLPVNSKKSTSGYTSDWPSISAKLRSDLNYSCEQCGIDLKSEKRLLHTHHINGNKADNERDNLRVLCADCHKKQPHHDHIYVSNSDILKINQLRREQHKFDVFNYDNLRECADTALDGLLQKCESTRLPGAELGIVIQDKETFVSIDLCWPRRKVAVLINMSNSNILRKHGWTVFTAFDALNNFENFQRQIR

SEQ ID NO: 6514 - protein, 583 aa, Vibrio xuii
MTDFLASIIASYSAASISDAFIYTIIILLLVSSALAYKRKAPRFTASTTNILTSLGILGTFAGIVVGLMEFNPTDIDGSIESLLAGLKTAFLTSLVGMAASIIYKAILGTISQKGEDAIKGVGPEEIFQVMSQQLRSSNELLASIKGEEDTSLVSQLKILRTDINDGQKEQIAYQNLKIAQTEKFQATLWEKMDEFGELLSKSATEQVINALKEVIVEFNDKLTEQFGENFKRLDESVKKLVDWQENYKDQLADMATKYQLGVDAISLTEKSVASINERAEAIPATMEKLHQVMELGHGYVTELEHRLEAFKDLRDKAVEAMPQIREQMDNTMSVIGESVKAASTHYESMLQESQNIIDNFSSTATQSVELMRTNLESGAENVSLQLIESSQTLSGKLAEASSDIQEQVGTATGGLSNVTSHLTDTTEQIRQHLEDSITELNSQLRVLVADIKDDARETGNVLKEANQELLNSTKEIQSETTSAISKLHDRLETTLEEVYKVQAEAVRRTFDSLEDQITQSVGRTGSAVEKQVEVLDLQMQQEINRTMNEMGEALATITQQFTRDYQALTREMSNVVNSKIAV

SEQ ID NO: 6515 - protein, 235 aa, Vibrio xuii
MEKLFGKTKSTGDGGEHWMSVSDLMAGLMMVFLFISVALMRDAMVERDKIKEVAETYQKTQQAIYIALLEEFAKDLDTWGAEIDRDTLSVNFTAPDVLFANGKADLTHQFQIILNDFFPRYLEVLDQYKPIIQEIKIEGHTSSRWNHDSTDYEAYFNNMRLSQSRTRAVLSYVMKLDEVRIEHYGWVKNNVAAVGYSSSKAVVEHGVEDEKRSRRVSFRVITNAEEQILKILGAE

SEQ ID NO: 6516 - protein, 371 aa, Vibrio xuii
MKLNISFKSLLKAVEIMEPEEKGKFRVEPTLEPLQTSPVVLINKEVELKDVDVDGDLLSYQGRQVLLYIKDHGQSAQSAINIPYSGKKFHIADCATLKNMREQGRFERYVATNDTSGEFVISGFGVEGKAVLRVCQNCLNALNYKGWSSGTSRTEILHKFNMPEFFATYSSFFPHMPSRRAETAESGYSDDWSKISSHYRVEKNFECEECKVNMRSNRALLHVHHVNGVKSDNRPSNLRALCIGCHSKQPMHEHMALSHRERQTINDLRKQQGLLDDLGEWQELFDYSDPGVHGVLHACRQAYLKLPDINYFVEDSFGGLAARLELAWPKHKFGVAISMNDIEDANSNGWQVVGINDFLENYKSQAYNLRH

SEQ ID NO: 6517 - protein, 387 aa, Leptospirillum ferriphilum
MQPAALFLSHVPWYTAIMIFLMILVFLYFNLTGFTEKFVRQGPTLFTTAGILVTFLGISIGLYQFDPTHIQKSLPAFLAGMRTAFWVSLVGVGASLLIKIRYSLWGIPPDMQKQEPPEPAEELLRHTQILQHLIGGKSPEGASLAEHFQALRKENGEMLGAIRTDLSHFLENMASNNTRALVEALERVVKGFDAQLNSMTSESFRKLAGAIDKMVEWQEAYRDAMPRITEELIRAVDIIRESGRQHAAFVEQSEKFGKILSHQGEILKSLNAERDRMEESLTALGELLASNRTALPEISEQILSMTRGLTDAVAKTTGEMSEQLGAMVRKTHEQVASLDAGLERELTRSLQGLGQQLTALSQKFVQDYSPLTDRLREVVELASRTGR

SEQ ID NO: 6518 - protein, 238 aa, Leptospirillum ferriphilum
MFKRGKGHGPEDQEDHWIPLSDLMTGLMMIFLLVAVSYMTDMELANYRIKRIAVRYNEVHDALYRDLEKEFKNDLPRWGAEIHRDLSIRFREPDVLFATGSDALKPRFQAILNDFFPRYVAILSSPKYRKSISEIRIEGHTSSFWNRSVSASSDDAYFRNMALSQARTRTTLAYVLGLPSVSGKKGWLKGLLTANGLSSSRLIYDKNGEEDPALSQRVEFRVRTDAASRIARILEVSR

SEQ ID NO: 6519 - protein, 195 aa, Leptospirillum ferriphilum
MKLPDFLVSPALNRLRERMDHAPLGNFVSVPGQTLLSAADLQSLSGEGLEVASDEVEVLPDSTLAYRGRRVLLYIRESHLAARGELLLRTSGNDTLPEGEESLPRFHVAHCRTLEAMRYSGRSHRYVVATREDGLFDLVLYGRPVRRRLWVCKNCLETLDWKGFSSRPGAKDRSQAVQDFRIDEFFRGFGNTVAS

SEQ ID NO: 6520 - protein, 572 aa, Oleispira antarctica RB-8
MLAQPIESFISGMGASAMTDGFIVIIAITFIAAIVAKRSDRAHGFTQYVPTLLTSLGILGTFCGIVAGLLGFDANNIDGSIGSLLEGMKTAFTTSLVGMSSSIIYKVLASSGMLTPKGDDIIDEDQIGILELYTVMKDQKDGINDLQVVMKEQASGMTLLQQAIGGDNDSSLTSQMKLMRSDNNDQNKLALQSDNDNHKELLATIAEQKIAFESFQDKLWIKLQDFADMLSKSATETVIEALKQVIGDFNKNLTEQFGENFKQLNEACKELVTWQDQYKGQLDDMGKKYSLGVESIGVTATAVGSITEHTAQIPAHMENLKDITEVNQHQIKELERHLEAFKDIRDKAVEAVPEIRAQIDATLEGVKTASDELAKGIKESSDSMGNAIIQGTQEFVDNSAKVNGSLQSTSDVMVAHNEKAITHYSDLEEGMNANYRDLSVRMQDEAKKITEEYGKAGTQLVQELSQSKDAFNTGLETMRDQLNSTLESMASRQSDEANKIFNGLTTQIENSLSSTGDAVDKQVGMIDKALEHEIEKVMTEMGSALASISRQFTNDYTQLVNAMQNIVETSNA

SEQ ID NO: 6521 - protein, 234 aa, Oleispira antarctica RB-8
MPNFLNPRATEQDESHWLSVSDLMAGLMVVFLFIAIALMRNVMIERDQIKEVAVAYQENQVAIFDALNNVFSKDLDRWNASIDKDTLTFNFNSPHILFKTGNKDLNPEYKHLLQDFFPRYMTVLSPFKDSINEIRIEGHTSSVWNEYTNDTSAYFLNMKLSQGRTRSVLEYIFRLDSIKTQRPWIKKHIAAVGFSSAKNIVNEQGVEDLNRSRRVSFRIITNADIKIQQILKAN

SEQ ID NO: 6522 - protein, 369 aa, Oleispira antarctica RB-8
MEINVNFTALWAAAKKMGDGKATFSYKANTYNAFESEKTILRRDITLEDVDSHGGLLEVDGNQVLLYIEDHSFRVQDVITGNKEGNKYHIADCSKLGEMRKKHRFDRYVVTNDVSGIFPVSGKESDSQLLVEGEAELHVCKLCLGFLNYRSYKSDRTNVFKQFTLDEFFSHYSTLFNSFPKTIADKRGGYADDWETVSLNYRSKKNFCCEACHVDLSSYQHLLHTHHVNGVKRDNVASNLRALCIDCHRKEPLHEHMRVRSNEVHTINKLRRSQSILSSQDWDDALAFADTSYHGLLDLYRNKNMAVPEIGYDVTDEDDAVVATAELAWPKSKRAIIHQSADIPSLEKAGWVVKMLGDALSEAHELKQR

SEQ ID NO: 6523 - protein, 590 aa, Vibrio tasmaniensis LGP32
MTDQIASFIASFSANAISDAFILIIAALMIVSIVLSAIGKAPRLTGSTANLLTSLGILGTFAGIVVGLMDFDPKNIDGSIESLLSGLKTAFLTSLVGMAGSIVYKAILGVLPKRVESMEKAVGPDEIYAVMSQQLESSNKQLESSSELLSAIRGDSDSSLTSQIKNLRTDVTDGNRQLNSHLENFLQSNEKFRSELWVKMDEFGELLSKSATEQVINALKEVIVEFNDKLTEQFGENFKRLDESVKKLVDWQENYKLQLEDMANKYQLGVDAISSTEKSVASINERAESIPQTMEKLHHVMEIGHGQVTELEHRLEAFKDLRDKAVEAMPQIREQMDSTMAVIGNSVKAASTHYESMLVESQKIIDNFSTTANQSVETMRTNLEEGAVKVSSELETRAVEIGGRLAEASNDITDNVTSASGALQNSASYLTDNSDRIKEQLEDAITELNSQLRVLVADIKDDAKETGNVLKSANQELLSSTRDIQTETTQAITKLHDRLETTLEDVFQIQAQAVKRTFDSLEDQIVDSVGKTGNAVEKQVEVLDIQMQQEINRTMNEMGEALATITQQFTRDYQKLVREMSNVVNAGATV

SEQ ID NO: 6524 - protein, 236 aa, Vibrio tasmaniensis LGP32
MEKLFGSQKPNEGSGEHWMSVSDLMAGLMMVFLFISVALMRDAMVERDKIKDVAETYKQTQQAIYVALLEEFAKDLDHWGAEIDRDTLSVNFTAPDVLFANGKANLTDQFQSILDDFFPRYLAVLEKYQPIIQEIKIEGHTSSRWNHDSTDYEAYFNNMRLSQSRTRAVLGYVMALEQVKNDYYEWVKGNVAAVGYSSSKLALDVAGVEDEKRSRRVSFRIITNAEQQILKILGTE

SEQ ID NO: 6525 - protein, 362 aa, Vibrio tasmaniensis LGP32
MKLTLNLGSLMTAINIMQPEKKGSFNLAYEETNIAKVDKELEQGKDVELKDVEIESGLLSYQGRNVSLYIKANGSSARFHVSDCKTLQSMRANGRFERYVVTNNTSGEFVVDSGYGETKARLKVCQNCLRKLNYRGCNSSNDIRSIVVEFNMAEFFATYSSFFPHMPSRSAETAETGYTDDWSRVSSRYRVDKNFKCEDCKVNLRTNRSLLHVHHINGVKSDNNEENLRSLCIDCHSKQPKHQHMVLSHRERQLINDLRKDQGLLDDLGGWQELFELSDPGVHGVLHACREVHLLLPEVNYYVMDSLGDIASRIELAWPKSRFGVAISPNDINDALKQGWQVITINEFLSDYRSHAHTLRHL

SEQ ID NO: 6526 - protein, 490 aa, Bathymodiolus azoricus thioautotrophic gill symbiont
MFIENENIAVISITFLLMFWLFWKDLSSYKSDNHQDFKSILVSTGVLGTFIGIFIGLLGFDSYSVADSVPKLLDGLKTAFVTSIVGMGLAILLSIIQKNKSGGGAENEITALNNIGKQLERLSSIDDKLTSLDDVKKNTEILPLINTKLDSIDTNIKSLSSDISSVKDELKINQKALFEFLKEKLSEIDNSLKEAVQTLSKGATEEIIKALQDVIQDFNTNLTEQFGDNFKQLNEAVLKMIEWQNTYKDSVQEFEKQLKTTAENTNESHQNTTALVKEFAETNLKSLQDFVNKNNQVLLESIDKINITTNQNTDALITKVGEFSSEINNSLKESVEQNQQANEKIKESLIQLFEQIKNAVSITENNAKIISEMTGNYAKIAGVSDKLEIVISTNQNQIQNLENHLKTFAEISGEAKGITKELKTFSDEIQKSLTRQSEALTKLTQEIENQLPASLDTLNKSLTSLTTQFAIDYESFLEQVSKLMKINNIN

SEQ ID NO: 6527 - protein, 196 aa, Bathymodiolus azoricus thioautotrophic gill symbiont
MSEVQKEQKAIKEIAESYQNIQQQLFKDLSEEFKQDLKVWDAEILSDNTIRFKSPEILFDTNSSDLKALFIAVLDDFFPRYLDILTNNKYKKQIKEIRVEGHTSSIWNNTTREQSYINNMSLSQNRAKSVLAYSYNITNSANNKIFLENVFRANGMSFSNLIKNNGEEDIQASQRVEFRVITKAEEKIYEIINKLQ

SEQ ID NO: 6528 - protein, 261 aa, Bathymodiolus azoricus thioautotrophic gill symbiont
MRITDFSELWRAVNKVKIDIIAKTEITLFENEGLDTDLSDVYTSPEGELFTVLKDGSIRKTIVHICDISNYKTEWLLPKFHIFECTTLTTMRGANKGHRYKKASRDDGQFWMIHASGGRYEYLNICKNNCLTQHNSLYDHQTVASFNVKSYLDKPIQHTQPYITNELDMATIPSSYADNWSSISKERKQYYKWICQECFYDLNDYKKYLHTHHINSDVTNNKHENLKVLCIKCHAEEFQHEHIKEKPEYKQFLQIKENHAS

SEQ ID NO: 6529 - protein, 567 aa, Vibrio crassostreae
MLEQLEMILLSLSAGVVSTLVAVLIIGVFFVAIWLGKKGRNRDFVNYAPTLLTTLGIFGTFFGIVLGLLEFDQNNIETSIPPLLAGLKTAFITSLMGIFASLLLKTLSTIPLFKPKKAKEQKLGATPEDILSAIQSQSTETTALKDALVGNEESTLLGQFKMIRSDINDNAKLSRKTLDERAETEEERFKEFSTNLWLKMQEFADVLSKSATEQVIEALKQVITDFNSNLTEQFGDNFKQLNEAVLLLVRWQEDYKNQLEQMQSQYELGVKSIASTESSVATISEHSKVIPEAMIQLKEIMEVCNHQISELESHLGAFRDMRDKAVEAVPEIQSQIENVVSSISKSVETANTHYADMLTEAEKGINNVSEKLIESSETIGKSIDLAATEFTDNAARTNESLKTSSDYLQDQTGIIKQHLEDAVSDLNNTMRGMIDMLVTDAKQMSETMTTANQNLVTDTNKVSDAIVNSADKLQQRLSDVIDEASTQQINQARRTFEAMEESIRNQVGLTGEAVDSQLKLIDESMQQEINRVITEMGRALTQVTGKFVEDYVKLTQAMNEIVNERVA

SEQ ID NO: 6530 - protein, 233 aa, Vibrio crassostreae
MDKIFGKSNAAEEENGEHWLSISDLMAGLMMVFLFIAIVFMLKTQKESQKIKDVAVAYQENQVAIYDALVNEFKGDLDIWGAEIDKETLSFNFKSPDVLFANNQTKIKPAYKKILNQFFPRYIEVLKPFRDSIDEVRIEGHTSSAGLRGSTKEQAYFYNMRLSQGRTRSVLQYGYSLMPEESDWITSRVAAVGFSSSRLVKVDGVEDPEKSRRVSFRAITNADIQIKQILGEN

SEQ ID NO: 6531 - protein, 383 aa, Vibrio crassostreae
MKLNIDFGALYKAIAPLGAVRSDFTLTRRSDNLESVTRGLVQGKVLGKDIQLDEIDGSNGVLSYDGHQVMLYIPDQGPSISEVISNGKCKSARRVHVAECKTIIDMREKGRFHNRYVVTSRIDGKFPVFGRSFHSGQDSKGESDLSPCIMCMKELNVEGYTEKTYEEQKSFIANFSFVRLFESYSSHFETIPTSTTDYYSGGYSPDWASISSSFRSELNYTCQHCSVCLKDHKKLLHTHHVNGNKADNKRANLRALCADCHRKQPHHGHLCVSNETTLTINRLREEQGVVTPFDSYQDLMLYADPALVGLISKCQKNRLPCGKVGVSKNIKGNEVSIDLCWDNQKVAVVINHKSSRELKGAGWSVYTVQDALDRFDLFQGEVR

SEQ ID NO: 6532 - protein, 567 aa, Vibrio crassostreae
MLEQLEMILLSLSAGVVSTLVAVLIIGVFFVAIWLGKRGRNRDFVNYAPTLLTTLGIFGTFFGIVLGLLEFDQNNIETSIPPLLAGLKTAFITSLMGIFASLLLKTLSTIPLFKPKKAKEQKLGATPEDILSAIQSQSTETKALKDALVGNEESTLLGQFKMIRSDINDNAKLSRKTLDERAETEEERFKEFSTNLWLKMQEFADVLSKSATEQVIEALKQVITDFNSNLTEQFGDNFKQLNEAVLLLVRWQEDYKNQLEQMQSQYELGVKSIASTESSVATISEHSKVIPEAMIQLKEIMEVCNHQISELESHLGAFRDMRDKAVEAVPEIQNQIENVVSSISKSVETANTHYADMLTEAEKGINNVSEKLIESSETIGKSIDLAATEFTDNAARTNESLKTSSDYLQDQTGIIKQHLEDAVSDLNNTMRGMIEMLVTDAKQMSETMTTANQNLVTDTNKVSDAIVNSADKLQQRLSDVIDEASTQQINQARRTFEAMEESIRNQVGLTGEAVDSQLKLIDESMQQEINRVITEMGRALTQVTGKFVEDYVKLTQAMNEIVNERVA

SEQ ID NO: 6533 - protein, 233 aa, Vibrio crassostreae; identical to SEQ ID NO: 6530

SEQ ID NO: 6534 - protein, 383 aa, Vibrio crassostreae
MKLNIDFGALYKAIAPLGAVRSDFTLTRRSDNLESVTRGLVQGKVLGKDIQLDEIDGSNGVLSYDGHQVMLYIPDQGPSISEVISNGKCKSARRVHVAECKTIIDMREKGRFHNRYVVTSRIDGKFPVFGRSFHSGQDSKGESDLSPCIMCMKELNVEGYTEKTYEEQKSFIANFSFVRLFESYSSHFETIPTSTADYYSGGYSPDWASISSSFRSELNYTCQHCSVCLKDHKKLLHTHHVNGNKADNKRANLRALCADCHRKQPHHGHLCVSNETTLTINRLREEQGVVTPFDSYQDLMLYADPALVGLISKCQKNRLPCGKVGVSKNIKGNEVSIDLCWDNQKVAVVINHKSSRELKGAGWSVYTVQDALDRFDLFQGEVR

SEQ ID NO: 6535 - protein, 529 aa, Bacteroides salyersiae CL02T12C01
MNLSISIDTWVCLCSIFIVFIFCSIIVFRYRNSEKLVANRRMVEFFPSLVSTLGVLGTFWGITKGLMAFDTTDLDRSIPDLLDGLKTAFFTSLAGMVGSMILSAFISRKQDEKDGGVSDINQAAGEITKAVKAMSDANTETIHSIQKQLTEQEADRKAFYRTVGEVMSKMSETQKTMTSAIDSLVVLQRSQENTLADIKEANSSMLVSFGNLEEATNEQTVSINSVLKYTQEVSEYTHHLGEIFDVISGISGTENEINEKVGKLKEIIHGEVIEIEDNMAKTNELLERKFNEFTELLKKSNTEALVDVMKKVTEEFQKQMNALINKLIQENFDQLNKSVEKLNLWQQENKEMIISLTRQYKDMSDNFEATSSSLTRVKDDTSILVSEGGKLHQLVDALNQVIIEDKRFIEVTKELHETANLSKSNMESFNESTQKLNEWVRKQRNFVDGVQLLIAKLEELNKIRDYGEQFWQGTKDKMEEGVGIITKGSQTLNSQLTSLDRQFYGRLSATLAELDNCITKMVEQIGKRR

SEQ ID NO: 6536 - protein, 233 aa, Bacteroides salyersiae CL02T12C01
MAKTNVWLSVSDLMTGLMVIFLFVAIAYISRVQKNQSVLTDYVETKNELHNKLVKEFEGDTLKWQMTIGKDLTMKFKEPTVLFATGSSELTPRFKEILEEFLPRYFNILLNDSLRSNIQEIRIEGHTDDVPMPSRHPDPYIANAMLSQDRALAVVKYFRSMSQFEMYSDKQKQLLEYWFTANGLSYGKALDADGDFIIRSGKPIDRTSSRRVEFRIVTSGDEILENFVKENTK

SEQ ID NO: 6537 - protein, 296 aa, Bacteroides salyersiae CL02T12C01
MSFDFDIDAEEDWFFNTDPICGFPNFKKSLTDMGIQIGTAGAWRSVGTVDVLPEDIGERILFEDGGIFYIDDEGVKRRGFMYKARFYFEWQGRVSQPKFHVCKCTAIENFGREAYRFANAEPIKVYSRNAHKEVEVEGMELCGYCKRLLMDEEAIRVNDSTDFVEILKEAGDVEEPTEYDVDIFGYVKNWEEISLKYRTKKNFTCERCGTHVENGFDHFYMQTHHKNGVKTDNREGNLECLCIRCHSEVDDTHRRNFSSAAQKVLIEDYMRKYHGKESDSLISRLMKDVIGKSRQQ

SEQ ID NO: 6538 - protein, 439 aa, Desulfovibrio alkalitolerans DSM 16529
MPNDWTSLFTPVNNVFFILILVCLGGGLLHGGKSRGRLVSSLPSIAISIGILGTFYGISIGLMKFDESDISNSIPQLIGGMKTAFATSLLGMFASISLKAYYSRQDDKNIGGSENPIDCLRNIEKAIVSCFKSEEEYSLVSQVKLIRQELIDSRRETKAAFQDFADHFSKMASESLVKELQQVVDKFNAMLNDLVSESFKDLSESTTRLNQWQHDYKGVIEKNQSQLADTITHVDKLISLLEDSVARIKEFDVTLKSIDSSLSTISTSSTELDEHTKMISSNNMLLESSMRSIRDIGVEASKVVPEISSKMNLLIDEIKILQNNTTSFVDRTTKNLEDSIRLIIATLSDNQETLHKATNDFVSSTTNELKNNFETLSIHTKDNIQAIEKSLEEELTKSLNSLAGALTALSNQFVSDYTPLTERLREVIKLAENSNANRN

SEQ ID NO: 6539 - protein, 235 aa, Desulfovibrio alkalitolerans DSM 16529
MLTGTSDKTEEYWPSISDLMSGLMLVFLLIAIAYMHNVEEGQKRIKKVAVAYQETQVSLYNKLMEEFDKDLPKWKARIDKETLSVQFMEPEVLFHTGSFEVTDSFKAILDDFFPRYLRIIFAKEYEESIDEIRIEGHTSSEWGNGETPQHIAYFNNMNLSQDRTRSVLQYCFSIIDDAGLEAKMRKHITANGLSSSRLVLDSEGREQKQLSRRVEFRTRTNAEQKIVEILEQFEK

SEQ ID NO: 6540 - protein, 293 aa, Desulfovibrio alkalitolerans DSM 16529
MNLPDYLRCVEIKELLLKMGIHSIPDLKPVVFEREVSSTKTVEIQNPQLAFAEKLKLEAVALDQVDVAIGKDGIIEVNGIKACAYIKKQKQGVNRYNKTSTYRYHLCKCQTIEGMIASGRKDRYVSTTRSDGTFPVIDQSVYPACEIEVTLELCKNCKILLESKGMMPKPYSLKVFFDRFQPEIPSKIRKTEQVIVKEPYAPNHREIADRYKEQANFICQICGVDGSSKRFCIHLHHKDGDGNNNNNSNLSVLCTDCHSKQPHHPHMLKNPTFVMQIQEIKILRREQGIPQLG

SEQ ID NO: 6541 - protein, 532 aa, Thauera sp. 28
MTELFIWIMVAIFVVAVLQGKKGKHGQFLEHAPAVLVSLGILGTFIGIVIGLLDFDAHDIKNSIEGLLDGLKTAFITSLVGMSLSLVLKALDAWWFAPARSKAAVVPDTVTPEHIYSAMTRQVQLLETLNQSLSGNEEGSVSGQLKLLRTDMNDFRQGLARDQQEFRQALFTQLTQFAEMLSRSATEVVIEALRQVIQDFNRNLVEQFGDNFKALNESVVKMIDWQEQYKQHVETLEARIETAVRELERTATANEAISKSLATSEQSIGSIENHCQSIPSAIGQLTPVLQTNQHQIQELQRHLEAFVALRDQAVRAVPEMQQHMDAITKQLSEKMHEVATKMHEGAQEFGRSVDHTNTALTEASHVISSHTEQISTNMKDASEEFATSVRDTMEVMLRNAKTLEQQMGQAVEQTTLALSNEFKRVAEHIQSSFTASVDATLTSLKNSVEASLSHTETQLQGSANRTLGAVEAQVREATDRANASLHAQLGAMDKAIERELEKVFREMGSALATISRRIADDHAELTQRMRVQ

SEQ ID NO: 6542 - protein, 243 aa, Thauera sp. 28
MSALNSLFRSRRTNKEDAEHWIGISDMMSGLMMVFLFMAVAYMYYVQVERENIKEIAVAYKDTQVAIYNDLMKEFQEDLPRWNAEIERNTLEITFNNPEVLFRAGSPELNGQFKNILSDFFPRYVAVLSRYRSAIEEIRIEGHTSSDWGGLHGEKAYFPNMALSQDRTRSVLEYVMALLPEASERDWVRSNFAAVGYSSSRRVMDADKQVENAARSRRVNFRVITNSELQIRNIIERLDGNQV

SEQ ID NO: 6543 - protein, 362 aa, Thauera sp. 28
MEIKFDFSGLWAQAKRIGAERVETIDWTAATQLDPVDIELLQGREVKLEDLDVINGLLSVDGRQVLLYIPDQFKPVEVVQRTPEEGKRFHVADCKTLADMRAKGRFDRYVVTNNLSGVFPISGRNSRGQPAELDSRLLVCKNCLEKLNYQNYCHETRRTSIWKAFEIGKFFETYSTSFRYLPRTLSNRSLANEYTQDWGEISANVRRRCGFVCNECRVNLSEHRHLLHVHHVNGLKSDNAASNLRALCADCHRKQPLHDWMFISLADMQILTRLRREQSIVADDWEQAIALADLSVHGALLHAKHKGFELPEVGYEFTSAKGVVVAEVQLAWPSQRLAVHVSEGVDFPGWKVMTPIEFIEQC

SEQ ID NO: 6544 - protein, 519 aa, Vibrio sp. MED222
MFIEFLLSLDPNTVLKISCGILVVTFGMGFRLIYQEKPSNLVRQFPSYLTTGGVFFTFLGIAIGLLSFDPNDLNNSISSLLDGLSLAFWSSIFGMLGSIVLKGIIHLKLDKNRSVVTANQMHQVLKEGNKNNDSSQNAILSELKKMTRATEQGNKESQQNFDLLSQELRDFSSSLSQQTSQQIAESLNEAIKDFNKGLVGQFGSNFQRLDDSVVKLLEWQSNYKQQVAQLTDAFESAVESVSATEVALENIASHTQVIPSAMSNLENTTDVWQNQLNELDERISVFAEMRQHALSAIPDIEGKMDELCKTVNSSLDKVCTSMESGARSASSTLQNNAKQLSSDFSNVSNEIKGEINDAHRQVATISHEFSSAAESIKNTLKDSVDDLNSQLSSLVKGTKSDVKNIGDTLVHVDKELMKKHREQLSKSSDFASEHHELLIEQIKQLVEMQTKSALKVGEHINQSLLDNSKEFEQGIQDKLSRVLTDLGSGLVQITQQFSENYRQYEQEFTRKSIEHEEMV

SEQ ID NO: 6545 - protein, 236 aa, Vibrio sp. MED222
MHQDLFSPDAESSESSHWLSVSDLMAGLMVIFLLISVALMNRIDVEKRVIKAMDITISEAQVRIHQALEKEFTQDFDKWQVELAADKSLSIDFYAKPYHFVSSESELSPALLSTLKVFFPRYINVLEQYQDDIQAIQIEGHTSSYWEGLNSFEAYKQNMMLSQNRASAVFEKVVNFDGILEQHGSWVMKKLAALGYGPAQLRFHATGKEDSSRSRRVSFKVITKSEIKAKEILEKL

SEQ ID NO: 6546 - protein, 282 aa, Vibrio sp. MED222
MLDLDLREFSALVEGITSSPPKKLVSISFEPVDYSRVLENYQHARVIGEFDKEVSVYNDLFHYDGHGVIVYIKEHVDLELVTKDPYTHGKKYHLTNCSTVQIEKKQNRFGRFVALQYTNELMPISDSKGKQAEAMLCVCKSCMRELKFRPYLLAKGESEKERICREFDLVEFLKKRDCYFPDEYLPIRLAEYSSFSYAGNWREMSISYRASQQYCCEQCRVSLVTRKTLLHTHHIDGVKSNNSVRNLMALCKECHSKQPNHGNIKLSEEELSDLKELRCAST

SEQ ID NO: 6547 - protein, 588 aa, Pseudoalteromonas sp. BSi20495
MDILESLLRSFDPNVVSGAVLILMLFVFGSGLFYTKKARQVEFVQFVPTLLTTMGIFGTFLGIVLGLLEFNQNDIEASIPLLLAGLKTAFITSLAGIFLSLVFKTLSTFSFLKPKQLEDSISHATPEAILGAMQAQVVETKVLKEAIVGNEESTLFGQLKILRGDINDNAKTSINIAQEQAVKQQENFEAFSEKLWLKLQDFADTLSKSATEQVIEALKQVISDFNNNLTEQFGDNFKQLNEAVIKLVEWQENYKVQLKEMSDQYAHGVASISATESSVAHISEQSQIIPQSMGELKGVMEVNQHQLAELERHLEAFKDMRDKAVEAVPQIQKQVEATVNDISAAVTTASDHYKTLLTQSDDYIKTHVQTSNDLLDKFAHETEKGINSVGERLIESSDKIATEVDNAGTDFINRTSRTNESLQVSSDTLSTNSKEIQNYLQDTVSDLNNHMRDMIEKLVDDAKDITSTMKQANQNLVTDTEQVRDTVVKSAEKLQQRLNEVIDDAAAQQINQAKRTFDAMENEVKKQVGMTGEAVDSQLKLIDTAMQQEINRVMNEMGKALAQVSGKFVDDYIKLTKAMNEVVSQRVM

SEQ ID NO: 6548 - protein, 232 aa, Pseudoalteromonas sp. BSi20495
MEKIFGSQNTSQDSGDHWLTVSDLMAGLMVVFLFIAIVFMMITQKENDKIKDVAVAYQQNQVAIYEALESEFEKDLDEWGATIDKETLAFNFQSPDVLFANNETRLSDAYKEILNDFFPRYINVLAPFRDSLDEIRIEGHTSSVGLRGSTEAQAYFYNMRLSQGRTRSVLEYGYALMPNESDWIKANIAAVGFSSSRLIKENGVEDAARSRRVSFRAITNADIQIKRILEAQ

SEQ ID NO: 6549 - protein, 378 aa, Pseudoalteromonas sp. BSi20495
MKLTVDFSALHRAVAPLGQVVTDFSITSDASELESIGSHLNQGMILGKDVQLDEIDGSNGVLNYDGHQVMLYIPDQGDDIEAVLSNGKLGRRIHVAECSTLELMRETGRFKRYDVINRVDGFFPVFGSSYRGGPNTEGEADLGVCKNCLKILNYKGYSTQSPQVKNQVFNSFSFEQFFEVYSSYFKSLPVNSKKHTSGYTSDWPSISAKLRSDLNYTCEQCGVDLKSEKRLLHTHHINGNKADNERDNLRVLCADCHKKQPHHDHIYVSNSDILKINQLRREQHKFDVFNYDNLRECADTALDGLLQKCESTRLPGAELGIVIQDKETFVSIDLCWPRRKVAVLINMSNSNILRRHGWTVFTAFDALNNFENFQRQIR

SEQ ID NO: 6550 - protein, 599 aa, Methylophaga thiooxydans DMS010
MIVEYIESLLLGTTASSVSEIVCISIFIFLAIGLISLRLGTGRNFVAYTPALLTTLGIFGTFVGIVIGLLEFDASNIDDSIEGLLAGLKTAFLTSLLGIITSILFKIIQTSGLISARVSEEQQISASPEEILTSINKQREAITSLVTAVGGDSDSSILSQIKLLRGDINDNQKIEINTQQEILATLGVISTHVSQQSEDFKHFSDKLWIKMQDFADMLSKSATETVIEALKQVITDFNNNLTEQFGDNFKQLNDAVKELVVWQDNYRVQISDMIEQYKQGVISINATEASVLAISNESKVIPQTMLDLKQVMEVNQHQLTELEQHLEAFKDIRDKAVEAVPEIRKQIDETVSAISKSVTTASEHYSTLLSESDKYIQSHIASSNELLDKFVTKTSDGVDVISKKLSESAIQVEKVITEGANEFTDKVHQTNTSLQTTADHLDSQTEVIKNYLKDAVDDLNNHVRDMVNGLVEDSKTLSTTLIEANKSLVQETGSVRDSVVDSINGMQSRFESSLDELSEAQRRQMNNVFSNLDSALKEQVGQSGQAVEKQLSILDQAVQQELNTVMNGMGTALGRISNQFVQDYGRLTAQMDLIVRKAS

SEQ ID NO: 6551 - protein, 212 aa, Methylophaga thiooxydans DMS010
MAGLMMVFLFIAIVYMRDISLERDKIKDVAVAYQQNQVAIYDALNSEFSHELVSWKASVDKETLSFQFNSPEVLFDSGDSNLKSEFEEILITFIPRYLSVLEKFKDSIDEVRIEGHTSSEWGNDTPPDAAYFLNMALSQNRTRSVLNFAYQDTGLSKNEQNWVKKTFSAVGLASAKAKLNIDGSENKELSRRVSFRVITNADIQIRKIIEGI

SEQ ID NO: 6552 - protein, 137 aa, Methylophaga thiooxydans DMS010
MKLSVDFSLLQDAVRTMGAGEVEFDISDEIVPIQPIDAQLGEGFEVNFEDIVFDDGLASYQGRQVLLYIKDHGNKILDALDDGSKGKRFHVADCRTLDEMRRKGRSERYVVTNDLSGNFSISGQDWKTRRGMKRSGT

SEQ ID NO: 6553 - protein, 435 aa, Burkholderia latens
MKTKTLLLLPGIAWAPYVFAGGPIGTVLADKQTLAFILLNTCLTIFFAFVRFDRFSVVHGPEILTTVGIFGCFLGIALALLQFDASNVSESVPHLLEGVKTAFWASVSGVFGSLVIRGRHYFWKTPIPQTPGAPKAATLDDVVAATHALQLSLSGNEQGSLLSQLKLMRQEQGDELRMLRTSFDTFAQRMAEDGSKALIEALKEVIRDFNAQINEQFGENFKHLNAAVEKLVVWQQQYKEELDKLQALQKSSADDLRGASSGLALFIDRASSFAQTATALEGTLRGLAQQHQLIDQSQRSIADVLSQMKDVTPQFSRKVDEMTESMKQGVARVQAEVGDVVKNFGVQVQSSSSEMKQLLTDTLRKSQSEVNDGLVRSMDAVRQSVVTLDKGLQEELTKSLETLGRQLASLSEKFVADYTPLTDRLREVVRIAGTA

SEQ ID NO: 6554 - protein, 230 aa, Burkholderia latens; identical to SEQ ID NO: 6362

SEQ ID NO: 6555 - protein, 281 aa, Burkholderia latens
MSFQLPNFLNWSSLNALRQEMGAPLAASFVPDHKFRDIELPVLERLQNNGVDVKFDEVEVLSDGTLAYKGYRVLLYIRDITSIGHQESMPRYHLAYCRTLDKMRRNARFDRYVVANGDSGKFQVNVVENDVKTQHVRLNVCQNCLDEIHWNGFDMKMPRDGRLTLVSKFALPDFFKKYPRDLMAVKPMHSSDTAPLNVYSQDWNEISERTKRQRGYRCATCNTVLRQFDSKFLHVHHRNGQKYDNRDSNLEVLCIGCHAEEPMHGHMKALREYQEYIERYR

SEQ ID NO: 6556 - protein, 583 aa, Vibrio azureus NBRC 104587
MTDFIASIIASYSAASISDAFIYTILLLLVASSILAFLGKAPRFTASTTNILTSLGILGTFAGIVVGLMEFEPTNIDGSIESLLAGLKTAFLTSLVGMAASIIYKAILGVIPQKGEDAVKGIGPEEIYSVMSAQLNASNELLSAIKGDEDSSLTSQIKNLRVDINDGNKSLVRHMEKAVEGSEQFQFKLWQKMDEFGDLLSKSATEQVINALKEVIVEFNDKLTEQFGENFKRLDESVKKLVDWQENYKDQLADMATKYQLGVDAISSTEKSVASINERTEAIPATMEKLHQVMELGHGQVTELEHRLEAFKDLRDKAVEAIPQIREQMDNTMSVIGESVKAASTHYESMLQESQNIIDNFSSTATQSVEHMRTNLEAGAENVSSQLIESSQTLGGQLLEASTTFQDQVGTATGGLSNVTSHLTDTTEQIRQHLEDSITELNGQLRVLVADIKDDARETGNVLKEANQELLNSTKEIQSEATSAIKKLHDRLETTLEEVFQIQAQAVRRTFDSLEDQITQAVAQTGSAVEKQVEILDLQMQQEINRTMNEMGEALATITQQFTRDYQALTREMSNVVNSKIAV

SEQ ID NO: 6557 - protein, 235 aa, Vibrio azureus NBRC 104587
MEKLFGKTKSTGDSGEHWMSVSDLMAGLMMVFLFISVALMRDAMVERDKIKEVAETYQKTQQAIYIALLEEFAKDLDTWGAEIDRDTLSVNFTSPEVLFGNGKANLTQQFQVILNDFFPRYLEVLEQYKPIIQEIKIEGHTSSRWNHDSSDYEAYFNNMRLSQSRTRAVLGYVMKLDDVREQHYGWVKNNVAAVGYSSSKAVVKDGAEDEKHSRRVSFRVITNAEEQILKILGAE

SEQ ID NO: 6558 - protein, 378 aa, Vibrio azureus NBRC 104587
MKLTLNLRSLMGAIEMMEPEKKGVFVWDHQITEKSKIDIELAQGKDVELKDVDIDSGLLSYQGRQVLLYIKDHGSAVQSVIKNPSTGNKYHVADCSKLKSMRAEGRFERYVVINDTSGEFPISGSGYYGQSKEEGYARLNICKLCLGQLNYKGYSSGGHRSKIFNEFDMPEFFATYSSFFPHMPSRLAETAESGYSDDWSKISSHYRVEKNFECEECKVNMRSNRALVHVHHVNGVKSDNRPSNLRALCIDCHSKQPMHEHMALSHRERQTINDLRKQQGLLDDLGEWQELFDYSDPGVHGVLHACRQAYLKLPDINYFVEDSFGGLAARLELAWPKHKFGVAISANDIEDGFKNGWQVVSVSDFLNDYKSQAHNLRY

SEQ ID NO: 6559 - protein, 550 aa, Pantoea sp. aB
MLAQLFEHLFHSVDSMLVTNIFIWAVIFVFFSAWWCDHKNIHSKFREYAPTLMGALGILGTFIGIIIGLLNFNTESIDTSIPVLLGGLKTAFITSIIGMFFAILFNGLDAFFFANKRSKHQGTQPDSVTPEHIHRELKEQNQHLEKLISGMSGSEEGSLVAQMKLLRNEINDSSRAQITNHAEFSNKLWEQLQQFADLMAKGATEQIIDALRQVIIDFNNNLTEQFGENFKALDASVKKLVDWQDNYKNQIEQMSAQYQQSVESLVETRGAVAGIWEECKEIPLAMAELRDVVQVNQHQISELSRHLDAFVLLRDKATDAVPAIHEKLEEVGELLKAGALSVSSSLGQTGAELLTNANAMRIALDEGSEGFRQSVTQTQQAFASMAHDVSNSSETLTSTLGDTITEMKQSGDEFLKSLESHSKELHRNMEQNTTSVIDLFSKTGDKFNQQLSNNADNMFGTMQSTFDKASAGLNSQVKESVERFGSSINEQLHAFEQATEREMNREMQSLGNALLAISQGFVKNYDQLIKEYQSVLGQLQPLINSRQNRG

SEQ ID NO: 6560 - protein, 235 aa, Pantoea sp. aB
MDKIIGKQTQKNTQDNEHWVSMSDLMAGLMMVFMFISIAYMHYVRIEKEKIKEVAVAYEQAQQQLYNALEIEFSKDLPSWDAEIDKQTLEVRFKSPDVLFGLGSSELKPKFKEILNDFFPRYLRVLDQYKQHITEVRIEGHTSTDWTGAANQDVAYFNNMELSQGRTRAVLQYVYSLKESETHQKWVKSKFAAVGYSSSHPILDAAEKEDPNRSRRVTFKVITNAELQIRRIIQE

SEQ ID NO: 6561 - protein, 363 aa, Pantoea sp. aB
MKLTIDFSELIALGKKMLPSGAKFSLAEAPVVFDPIDIELSAGKEVSIADLDPGSGLISYQGRQVLLYIRDHTGRYDAATEDGEKGKRFHIAWCRTLDEMRQKNRFERYHATNRVDGLFEIDDGLGRSQDADLRVCMNCLERLNYKGSIDKLQKRVVFKSFSLNNFFSHYSTCFRHMPKGIHDKANSGYVDNWKDISRSVREQAAYKCNDCGVNLISSRQLCDVHHKNGVKYDNSTENLHVLCKDCHRKQPLHEGIFVTQAEMAIIQRLRSQQGLLKADSWKDIYELTDPSVHGDINIMQHKGYQPPVPGLDLQNSAHEIIATVEAAWPTLKIAVNLTEIQVEGWEIFTVGELVKQIQSGVIF

SEQ ID NO: 6562 - protein, 583 aa, Photobacterium leiognathi
MTDILADIIASFSAAAISDAFIYSIFFLLVLSGVLAYVGRAPRFTASTTNLLTSLGILGTFAGIVVGLMEFNPTDIDGSIESLLAGLKTAFLTSLVGMASSIIYKAILGTIPQRDKEVVKNVGPEEIFSVMSAQLNASHELLSAIKGDEDSSLTSQIKNLRTDINDGQKSLSRYMERTADNRDQFQKMLWQKMDEFGDLLSKSATEQVINALKEVIIEFNDKLTEQFGENFKRLDESVKKLVDWQENYKNQLEDMATKYQLGVDAISLTEKSVASINERTESIPATMEKLHQVMELGHGQVTELEHRLEAFKDLRDKAVEAMPQIREQMDNTMSIIGESVKAASTHYESMLQESQNIIDNFSLTAAQSVEVMRVNLEEGAVKVSHELENRAVEIGSSLAAASNDITENVTTASGALQNSASYIANNSEQIKQHLEDAMVELNGHLRVLVADIKDDARETGNVLKEANQELLNSTKEIQSETTSAIAKLHDRLETTLEEVFKVQAEAVRRTFDSLEDQITQSVGRTGSAVEKQVEVLDLQMQQEINRTMNEMGEALATITQQFTRDYQALTREMSNVVNSKTAV

SEQ ID NO: 6563 - protein, 235 aa, Photobacterium leiognathi
MEKLFGKNKSTGDSGEHWMSVSDLMAGLMMVFLFISVALMREAMVERDKIKEVAETYQKTQQAIYIALLEEFAKDLDTWGAEIDRDTLSVNFTAPEVLFGNGKANLSEQFQVILNDFFPRYLEVLEQYKPIIQEIKIEGHTSSRWNQDSSDYEAYFNNMRLSQSRTRAVLGYVMKLDDVRAQHYGWVKNNVAAVGYSSSKAVVKDGVEDEKSSRRVSFRVITNAEEQILKILGAE

SEQ ID NO: 6564 - protein, 361 aa, Photobacterium leiognathi
MKLTLNLHSLMRAIEIMEPERSGKFTLELHETHIDKITAELEKGKDVELKDVEIESGLLSYKGRHVTLYIKANGTSARFHVSDCSTLQGMRASGRFERYVVTNNTSGEFLVDTSYGEKKARLKVCQNCLRKLNYKGCNTTTNITSIVQSFNMAEFFATYSSFFPHMPSRRAETAESGYSDDWSKISSHYRVEKNFECEECKVNMRSNRALLHVHHVNGVKSDNRPSNLRALCIDCHSKQPMHEHMALSHRERQTINDLRKQQGLLDDLGEWQELFDYSDPGVHGVLHACRQAYLKLPEINFFVEDSFGGLAARLELAWPKHKFGVAISMNDIEDANSNGWQVVGINDFLENYKSQAYNLRH

SEQ ID NO: 6565 - protein, 508 aa, Parabacteroides gordonii MS-1
MNDFIISLAHYITLPICIGTISLALIVCIALIFFWKKKNELQKRKRTVDLFPTFLSTLGVLGTFWGITIGLSEFNTQDLDKSIPVLLEGLKTAFYTSLLGMISSMITNFIINKIYDKYEAGQPSNQDEATARICDAVESMNRQNVEAMQALLQSMNQQTQNQTAFYNTLLNQINVFNTVKIDEMTLLIRSQETHLSAIASNGQQTINKLDTLNANIEHIDDRIGEQLDISSASASILQETQDATKKLSEVLRAEVDEIEIKMGETNHLLTQKFDEFAELLKKSNTEALVEVMKQATLEFQNQMNAIVSKLIKENFEQLNQSVEKLNIWQQENKQMISDLTHQYTKMVTEFERTSTVLTNVAEYAAQLSGTSGMLAKLITELQKVMIEDTKFSTITTKLSETVDLTKDNMIKFDDSTSKLNEWVRKQRNFVDGVQLLIKKLEELSSIRDYNKEFWQDTKKQLEEGVGFIKKGSDSLNAQLTDLDKQFYSRLSATLAELDSCIQAMIKRK

SEQ ID NO: 6566 - protein, 233 aa, Parabacteroides gordonii MS-1
MAKHNVWMSVSDLMTGLMVIFLFVAIAYISRVNKNADVLAQYIEARQNLHDKLVDKFKTDTARWEMTIGKDLSLRFTNPTVLFQTGSWDLTPAFCNILEEFLPKYFDILLTDSLKNNISEIRIEGHTDPTPFPTLSSDPYIANVILSQRRSLSVLQYFRSMPTFQKYTSDQQRMLEYWFTANGLSYGRTLDSQNHLTYESGNSINYEKSRRVEFRIITTSEKMIEEFVKKIAK

SEQ ID NO: 6567 - protein, 262 aa, Parabacteroides gordonii MS-1
MEKENPIYTFPKLKNTLEELGYQIEKVEVYRPIKPVDVSIKDIKDGTIEITDGGIFFKTPDGQKHGGFMYKREYHLAQYGKPRFHIRNCRTIQEFKARGSFTAEYRWSNDDKVQVCDMDDNYIDKTVNFLPLCKYCAEILRSEQSDVYKDNEDFVNELKKATPQETVTDVDVLGYTKEWQDVSKRYREKHKYTCERCGIHITNIFDYGYIHCHHRNGNKTDNREENLECLCVKCHSKVDKIHEIRFSKGANYIWLQDFLKKY

SEQ ID NO: 6568 - protein, 289 aa, Nitritalea halalkaliphila LW7
MLKAIGKDEETSLLTQLQKLRAEQNEHAKAHDEHIKWIIVSMANNREIVEKKFNEFSQLLAKNNTEALVDVMKKATEEFNNQMSALINKLVQENFAELNNSVKMLNIWQAENKEMIQELTHQFKVVSNNFSISSIALKEITHNTSTLTDKNSQLAQIVESLKKVMVDDSKFSEITNSLATTVETLKTNTEAFDETTQKLNQWVKKQRDFSDSVAKLLVRLEDVEKIKDINEIFWKNLKSQLHDAISIIEKSIKDLDNEVQTIHGHFYTKLNDTFQNLDNLIQRIMAKHK

SEQ ID NO: 6569 - protein, 249 aa, Nitritalea halalkaliphila LW7
MKTMSLSKRSTKTEESNWVSFSDIMTGLMVIFMFIAISYILEVQKRQEERNELFEEFQATKESLYFALDSAFRDDFKKWKVELDKDLSIKFTNPEVLFASGQTDIRPYFREILDEFLPRYFDIILQKKYVDRISEVRIEGHTDQVPAFNFDADPYIGNIKLSQLRSAQVLKHFRNMPYFKTLPDESVSLLQYWLTANGLSYGRTLDDNKRLTSESGMPANNEFSRRVEFRIVTTSDKLVEKVIQELREK

SEQ ID NO: 6570 - protein, 262 aa, Nitritalea halalkaliphila LW7
MRKDLKDIDLYKFEKLSKALDEWGFPKIDFESGFEVVKGVDFERAYKANNIRFEEDGIYLDYNGYSIKGYMFIQEPYLEKYHMRLPKFHVVKCKVISDFLDKGQFKERYHFSNSEKNDLTDILSKKVYPDQELTLCGYCKKIITQDIQTTKDFYDLLGDFERPKDLEVDIFGYPKGWDQLSYAYRQKHDFTCQECGFKPKSALDRRFIHTHHIDGSKTNNAEHNLKCLCIKCHSNQDEKHMQNFGSGSRALDLKEFERKYHI

SEQ ID NO: 6571 - protein, 414 aa, Vibrio sp. RC341
MNRYLEQAAIDSSNFQSKLWQKMDEFGDLLSKSATEQVINALKEVIVEFNDKLTEQFGENFKRLDESVKKLVDWQENYKAQLADMAIKYQMGVDAISFTEKSVASISERTEAIPATMEKLQQVMEFGHEQVIELEHRLEAFKDLRDKAIEAMPQIREQMDNTMSVISESVQAASSHYVAMLHESQNIIEQFTSTANQSVEHLRMNLETGAEKVSQQLIESSHTLSGKLAEASLDIQEQVGTATGGLSNVTSHLTDTTEQIRQHLEDSITELNGQLRVLVADIKDDARETGKVLKDANQELIISTKEVQSEMTSATTKLHERLETTLDEIFKVQAQAVRRTFDSLEDQITQSVSKTGSAVEKQVEILDLQMQQEINRTMNEMGEALATITQQFTRDYQKLVREMSNVVNASRAAV

SEQ ID NO: 6572 - protein, 217 aa, Vibrio sp. RC341
MSVSDLMAGLMMVFLFISVALMRDAVVERDKIKDVAEAYQKTQHAIYVSLLDEFSKDLEKWGAEIDRDTLSVNFTAPEVLFANGKADLTQQFQIILNDFFPRYLEVLEQYKPTIQEIKIEGHTSSRWNHDSSDYEAYFNNMGLSQSRTRAVLSYVMAIDKVRINHYGWVKNNVAAVGYSSSKAVIKNGLEDEKRSRRVSFRVITNAEAQILKILGAE

SEQ ID NO: 6573 - protein, 372 aa, Vibrio sp. RC341
MKLTLNLLSLKNAIAEMKPDEKGIFAWVREVTPISKIDYELAQGKDVELKDVDIDSGLLSYKGRQVLLYIKDHGSMTQSAINIPYSGKKFHLADCSTLKNMRSKGLFEKYVATNDTSGEFLISGDGIEGKAILRVCQNCLSTLNYKGWSTGEERSKILNNFSMAEFFSTYSSFFPHMPSRIAETAESDYASNWAKISSHYRVEKNFECEQCGVNMRSHRALLHVHHINGVKSDNRPSNLKALCIDCHSKQPMHEHMTLSHRERQTINDMRKQQGLLDRLTTWKELFDYADPGLHGVIYACRDAGLKLPEVNYLIKDSSGKLAAHLELAWPKHKFGIAISENDINDARSNGWSVVGMNEFLDNYKSQSYNLKF

SEQ ID NO: 6574 - protein, 584 aa, Vibrio sp. RC586
MTNALASFIASYSAAAISDAFIILIVLLLVLSTALAYKGKAPRFTSSTTNILTSLGILGTFAGIVVGLMEFNPSNIDESIESLLAGLKTAFLTSLVGMAASILYKAFLGLISQKEKEVIKSVGPEEIYSVMSAQLNSSQELLTAIKGDEDSSLTSQIKNLRIDINDGQKSMNRYLEQAAIDSSNFQSKLWQKMDEFGDLLSKSATEQVINALKEVIVEFNDKLTEQFGENFKRLDESVKKLVDWQENYKAQLADMAIKYQMGVDAISFTEKSVASIRERTEAIPATMEKLQQVMEFGHEQVIELEHRLEAFKDLRDKAIEAMPQIREQMDNTMSVISESVQAASSHYVAMLHESQNIIEQFTSTANQSVEHLRMNLETGAEKVSQQLIESSHTLSGKLAEASLDIQEQVGTATGGLSNVTSHLTDTTEQIRQHLEDSITELNGQLRVLVADIKDDARETGKVLKDANQELIISTKEVQSEMTSATTKLHERLETTLDEIFKVQAQAVRRTFDSLEDQITQSVSKTGSAVEKQVEILDLQMQQEINRTMNEMGEALATITQQFTRDYQKLVREMSNVVNASRAAV

SEQ ID NO: 6575 - protein, 217 aa, Vibrio sp. RC586; identical to SEQ ID NO: 6572

SEQ ID NO: 6576 - protein, 372 aa, Vibrio sp. RC586
MKLTLNLLSLKNAIAEMKPDEKGIFAWVREVTPISKIDYELAQGKDVELKDVDIDSGLLSCKGRQVILYIKDHGSMTQSAINIPYSGKKFHLADCSTLKDKRSKGRFERFVATNDTSGEFLISGDGIEGKAILRICQNCLSTLNYKGWSTGEERSKILNNFSMAEFFSTYSSFFPHMPSRIAETAESDYASNWAKISSHYRVEKNFECEQCGVNMRSHRALLHVHHINGVKSDNRPSNLKALCIDCHSKQPMHEHMTLSHRERQTINDMRKQQGLLDRLTTWKELFDYADPGLHGVIYACRDAGLKLPEVNYLIKDSSGKLAAHLELAWPKHKFGIAISENDINDARSNGWSVVGMNEFLDNYKSQSYNLKF

SEQ ID NO: 6577 - protein, 425 aa, Bilophila sp. 4_1_30
MTDIEIFLAAGASPSNIIFSLMIGGIAITGIILSVFRKLERVRDFLPSLSVSCGIFGTFWGIFIGLSGFDTAHISESIPTLLEGMKTAFFTSLIGMSVSLFLKFIYNLRDDIGEKGSTDPAKCLQNIEIYSSEIRESINKLEETIGRCFRSDEEYSLVSQVKLIRQELIDSRKETKKAFEEFAEKFSKMASESLIDELKRVVDKFNTMLNDLVSQSFQDLKDSTERLNTWQSEYKEIITQNHENLSSVLIQLSSLNTVYNQSIDRIMELSEQIATINTKLHSISISGQELSLHSSQLTEQNQLLDASIHAIKDAGEKAATVVPEISKNMNAITDQIQRLQEETNDFIRKATMELQAHASELSQASQKQIESIEKSLEEELRKSLESFAGAMIALSNKFASDYTPLTDRLREVVRIAERMNNASLN

SEQ ID NO: 6578 - protein, 236 aa, Bilophila sp. 4_1_30
MLRLTKIEDGEHWSSISDLMAGLMMIFLLIAIAYMHNIAQGQQKIKKIAVTYHEAQVALYEKLNEEFKEDLPKWQAIIDKETLSIQFFEPDILFQTGKADVTPKFKDILDNFFPRYLNIIFSDEFKDTIAEVRIEGHTSSEWSTGTSSPDEAYFNNMQLSQERTRSVLVYCYSITQKNNYKNLMQQHVTANGLSSSKLVYNDDGTEDKARSRRVEFRTRTNAENRIVQILDELKND

SEQ ID NO: 6579 - protein, 293 aa, Bilophila sp. 4_1_30
MIKLPDFSACVEVKHLLQKMGVIKIPELPDVEFVKTRVKIVETIVPNTEQLQFAEKIKLKAVSLAHETFTVVKDETLEVNGVKCCIYIKNQSQGVNPYNKTSTYKFHLCNCKTIQDMVLKGRKDRYVATSRADGIFPVNAQNYYKEILVSLELCKNCRDILIHNGMYKEPFSLKNFYEEYQPDIPKTFRRTEQVPITEKYAPDHTERANKYKQSIHYKCQGCGVDCSQHRSYLHMHHVNGEGTDNKRSNLKILCVICHMEQPFHDHMKGNPRFQKEAQIVRQLQKEQGIFTVI

SEQ ID NO: 6580 - protein, 679 aa, Vibrio caribbeanicus
MTNSIASFIASFSADAISNAFIYLILSLLAVSVVLAAVSKASRFTAATTNILTSLGILGTFAGIVVGLMDFDPTNIDGSIESLLSGLKTAFLTSLVGMAASILYKAILGALPKKDVDAQQAVGPEEIFSVMSQQLKASTDQLNASNELIAAIKGDEDSSLTSQIKNLRTDINDGQRALNEQFKQVNDNHNEFKETLWAKMDEFGDLLSKSATEQVINALKEVIVEFNDKLTEQFGENFKRLDESVKKLVDWQENYRVQLEDMATKYQLGVDAISSTEKSVANINERAESIPATMEKLHQVMELGHGQVTELEHRLEAFKDLRDKAVEAMPQIREQMDTTMSVIGDSVKAASSHYENMLHESQTIIDNFSSTANQSVEVMRTNLEEGATKLAKELTTSAEKISHQLADAGEDFVQVTEDGVEGIKESFEVGVKKIAEELDSTTKEISTTLSSSSEQFAASTEESMNTMRSNLESGAQDISAQLKESAQDIGGKLAEASSDIQEQVGTATGGLSNVTNHLTDTTEQIRQHLEDSITELNGQLRVLVADIKDDSKETGRVLKEANQDLLASTKEIQQETTNAITKLHERLETTLEDVFQVQAQAVRRTFDSLEDQITDAVGKTGSAVEKQVEVLDLQMQQEINRTISEMGEALATVTQQFTRDYKALVREMNNVVTSSKMAV

SEQ ID NO: 6581 - protein, 236 aa, Vibrio caribbeanicus
MDKVFGSSKKHSDSGEHWMSVSDLMAGLMMVFLFISVALMRDAMVERDKIKEVAETYQQTQQAIYVALYEEFEKDLIKWGAEIDRETLSVNFTAPDVLFANGRADLNENFQQILDDFIPRYLSVLDSYKPIIQEIKIEGHTSSRWNHDSTDYEAYFNNMRLSQSRTRAVLGYIMSLEPVVVEHYHWVKQNVAAVGYSSSKLTLDKLGNEDEQKSRRVSFRVITNAEEQIRKILEEV

SEQ ID NO: 6582 - protein, 378 aa, Vibrio caribbeanicus
MKLSISFKNLNAAIELMEPKKKGDFNLEFVETSIEKLDLELAKGKDVELKDVDVDSGLLSYKGRQVLLYIKDHGSVVQNVIRKPETGNKFHVADCSKLKSMRSEGRFERYVVINDTSGEFPISGASYYGGHQEEGKAKLKICKFCLGQLNYQGYSSGNDRHAIFDGFDMAEFFSTYSSFFPHLPSRQAETAETGYSEDWSKVSSHYRVDKIFTCEQCNVSLKAHRHLLHVHHINGVKSDNRPKNLKALCIDCHSKEPLHSHMAVSHTERQLINKLRSEQSLLEDLGNWQSLFDYADPGVHGVLHACKHSHLRMPEINHFVTDRFGDFSARLELAWPDVKFGVAISEHDIEDARESGWEAVTVNDFLLNYRTQANYLRA

SEQ ID NO: 6583 - protein, 658 aa, Photobacterium aphoticum
MTEIIASLISNLDSDMISDLFIYLILFLFVFSIMLGIKGKGGAFTANTPNLLTSLGILGTFVGIVSGLMDFDPKNIDGSIESLLGGLKTAFLTSLMGMATSILYKGVDGFINRKEETEDVHDIGPEQIHRVMMKQLEASEEIIKSIRGEEESSLGSQIRLLRSDLNDGNKQLVKLAQSAEVKHDEFQLKLWQKMEEFGDLLSKSATEQVINALKEVIVEFNDKLTEQFGENFKRLDESVKKLVDWQENYRHQLEDMAEKYQLGVDAIALTEKSVASINERAESIPVTMEKLHQVMELGHGQVTELEERLEAFKDLRDKAVEAMPQIREHMDETISTIGQSVQAASTHYESMLAESQRVIDSFSQTADTSINTMKTEIESGANKVSEELVRGAQEIGGKLVESATEVTTTIGQSVEAASTHYEGMLTESQRVIDNFSQAADTSIHTMKTEIESGANKVSEELMRGAQDISGKLTESAQDITTNVGSASGALNETANHISNTTEQVRQHLEDMMVELNGEIRALVSGIKEDSAETGRILTTANNDLVRDTKAVQDATQYAITQMQQRLETSLEEVFQIQAKAVQRTFDSLEDQITSSVGKTGSAVEKQVEYLDEQMQQEINRTMNEMGQALATITQQFTRDYQKLVREMNNVVSSAQMAN

SEQ ID NO: 6584 - protein, 235 aa, Photobacterium aphoticum
MKQVFGAPTKTSEGDEHWMSVSDLMAGLMMVFLFISVALMRDAMLERDKIKEVAVTYEENQQAIYLALLDEFESDLQEWGAEIDRDSLSFNFTAPEVLFANGRASLTVQFQDILNDFFPRYLHVLNAYKPSIQEVRIEGHTSSRWNHGSSDSEAYFNNMRLSQSRTRTVLSYVMDLTPVKTEHYDWVKGHVAAVGYSSSKIIIDDHGVEDEKKSRRVSFRVITNAETQIRKILGG

SEQ ID NO: 6585 - protein, 273 aa, Photobacterium aphoticum
MRASGRFERYVVTNDTSGEFTVANSYGEETRARLKVCQNCLRQLNYKGCNTGVSIYPIVQNFDLNEFFSTYSSFFPHMPQRQAEHAQTGYTDDWQRVSSHYKVSQAFTCESCHVDLRKHRLYLHTHHINGVKSDNRPTNLQALCIDCHSKQPFHSHMILSHAERQLINQLRRDQGILDDLGEWRELFEYVDPGIHGVLHACRTEHYQLPEVGYYIENDFGEIGAKIELAWPGHFFGIAISADDIADAQSCGWTVVSAAEFLANYKRLAHNLRY

SEQ ID NO: 6586 - protein, 561 aa, Moraxella macacae 0408225
MKIFDAMISGYNLPFTIIMLALFLGAVGIVFKRNASKTWVDFANAMPAILTSIGIFGTFFGIVIALLDFSDNNIREQIHVIISGMQTAFITSVLGIFLSILLKIILIFKNNQNEDVDNINAEELLQRFIKQTNTTDKILTQHEITVKKLDELINAIGRDGDNSMVGQIRLMRADFSDNHKANYTLFDKQTKALVYLYNIAKQNQQEKQAFEQKLWQQMEWMNENLAKSATEKIAESLNKALMVLVEIAEKNHEERQVFERKLWQQMHQVTESLSKSATEQIIESLNQVIRDFNDKITEQFGENFKQLNQAVGHLLQWQENYKQQIEQMIAQYELGVKAIDLTKNSVANIEQSTSVIPNHMNELNAVIQLNQTNLNALTNHLQAFSDMRENAVQSLPEIQSHIALMLDNMQEGSNYVTHAFDEVQNTLTDTAQTFAKETQNSNNQVKAVANMIENWHQDFAHSLQLLQDNFSETLQNMVKEQQKSNQTIQHNLEQISEQSWNDTAEKIEGILSESHKGVQQQQNEALKSMGQSLISITRQFTDDYARLVNAMNDVINRNGGR

SEQ ID NO: 6587 - protein, 230 aa, Moraxella macacae 0408225
MLNALLGKITDKKDDGEQWLPISDLMSGLMILFFFIAISLILETQKVVISYEENQRAIYNALMQEFQKDLPTLGAEIDPKTLTFIFKNPEILFETGKSNLKPSYQQTLNNFFPRYMKVVYQYKHAIQEIRIEGHTSSEWTAGVDEHTAYFENMRLSQDRTRAVLQYVYYIRGIEQYRPWIKQNLASVGLSSSKAIVINKQEDKEQSKRVTFRIITNADEQLQNLAKEYAR

SEQ ID NO: 6588 - protein, 281 aa, Moraxella macacae 0408225
MNLAEILDKLQQNALKVSQNLVDYEPMVNSELDITIKQLKSRSGIEISLEDIELQGNVWTYKGHHVLLFIPDQGFGVDKVIAGNKEGRKYHLTDCKKIDEMKTEGRFGRYKVTNNTEGIFAVYGRHSETGETMHAEVRLNVCKLCLGRLNYQGYPKNKVQVYNNFDLDEFLETYRTHFKTTPANIGQDKAGYANNWEEISHRYRERQAWRCEQCQVDLSNHKSLLHTHHIDGVKHHNKDANLKALCIECHSKQPSHGHMRVSYKDGQLLQDLRRQQGIFRY

SEQ ID NO: 6589 - protein, 407 aa, Lacinutrix sp. 5H-3-7-4
MHEIGIFEIENNTLIFICKKLPWYILIAWFLYATLVVIFSNRLKKISNYYLIESIPSMFVTLGLLGTFLGISYGLINFNTDPGAIKDSIKDLLEGLKTAFYTSIFGITFSLIFKMIINYKLNSGSVAHPDDLKEQDLYSSMNNNLIAIREQTKSSLISLNDIKDNKLKNISEGTEGLALKLDQFFNDMATQSAGAIQEALMEIIEDFNGTFKNFIGELVEKNFDKLTQSIDQLITWQSDYKEDITKIKEAYERLAINHKDFVGNTEDWVSKLDKIAGSSSQLQLIINDFQSAFDDESRFSDVITKINESVINLHNTSEVVNKHTNQLNDTTVALTVTKDEITKWLNKEESVQAMVTALGDSLKELRQFDITQIESLDKAFIKRLENTFKGLDDIMGAQLRLIINKSK

SEQ ID NO: 6590 - protein, 234 aa, Lacinutrix sp. 5H-3-7-4
MSRRGTQESYWISFSDIMTGLMVIFMFIALNYIIQIIEYKFVEQDIYNSLELNLKQEIENEVIELSPDGTVKFNLQTKDKELFPSDRYTMTYEFEKTLNEFTPKYLKIITASNYLNNISEVRIEGHTDTIPPRRSRNRDSYDYNLELSSNRARSVLNYIRNHESYLNYPDSIKTRLDFLFTANGLSYSRALNSGKEVSYLSSDKSVDNDLSRRVEFKIVTSNEELAEKIINKKE

SEQ ID NO: 6591 - protein, 264 aa, Lacinutrix sp. 5H-3-7-4
MIYNFLKGTTANKIKEITKSEIERTSQYFIEPIENINYSKIEYTDKRFFFTKGEDTFLMFAYKSTYRTLHYNSLPKYHVCQCKTREEYAGFTYASAMPVEIYCRDQNQTLDKFQYLELCSNCATASQNAFYGFLAKGKPWYDYVIQYANSKNEIATKTKQNGYVIMWKQISQAIRERVDFCCENCHINLVQESFFLEVHHKDYNKKNNSDNNLIALCVLCHATVDDKHLRNFKSVPLKVETFIDSYLSYIDNHNKQRLLIWQQK

SEQ ID NO: 6592 - protein, 591 aa, Vibrio sp. HENC-03
MTELLASLIASFSAESISNGFIYLILLLLVGSILLAILGKAPRFTASTTNILTSLGILGTFAGIVVGLMDFDPQNIDGSIESLLGGLKTAFLTSLAGMAGSIFYKAALGLIPQKEREETKSVGPEEIFSVMSQQLKASTEQLNASNELLSAIKGDEDSSLTSQIKNLRTDINDGQRTLNDQFKQTTERNAEFQSTLWKKMDEFGELLSKSATEQVINALKEVIVDFNEKLTEQFGENFKRLDESVKKLVDWQENYRHQLEDMATKYQLGVDAISSTEKSVAHINERAEAIPVTMEKLHQVMELGHGQVTELEHRLEAFKDLRDKAVEAMPQIREQMDTTMAVIGDSVKAASTHYESMLVESQKIIDNFSATANQSVESMRTNLEEGATKVSHELESRAVEIGGRLAEASNDITDNVTTASGALQNSATYLTDNAEQIKQQLEDSIVELNSQLRVLVAEIKDDAKDTGTVLKEANQELLASTKEIQQETTNAISKLHERLETTLEDVFQVQAQAVRRTFDSLEDQITDSVGKTGSAVEKQVEVLDLQMQQEINRTMSEMGEALATITQQFTRDYQKLVREMNNVVTTSKMAV

SEQ ID NO: 6593 - protein, 236 aa, Vibrio sp. HENC-03
MDKVFGSSKKHSDSGEHWMSVSDLMAGLMMVFLFISVALMRDAMVERDKIKEVAETYQQTQQAIYVALYEEFEKDLIKWGAEIDRETLSVNFTAPDVLFANGRADLNENFQLILDDFIPRYLSVLDSYKPIIQEIKIEGHTSSRWNHDSTDYEAYFNNMRLSQSRTRAVLGYIMSLEPVVDEHYHWVKQNVAAVGYSSSKLTLDELGNEDEQKSRRVSFRVITNAEEQIRKILEEV

SEQ ID NO: 6594 - protein, 378 aa, Vibrio sp. HENC-03
MKLSISFKNLNAAIELMEPKKKGEFNLAFVETSIEKLDLELAKGKDVELKDVDVDSGLLSYKGRQVLLYIKDHGSAVQNVIRKPETGNKFHVADCSKLKSMRSEGRFERYVVINDTSGEFPISGASYYGGHQEEGKAKLKICKFCLGQLNYQGYSSGNDRHAIFDGFDMAEFFSTYSSFFPHLPSRQAETAETGYSKDWSKISSHYRVDKNFNCEQCNVSLKAHRHLLHVHHINGVKSDNRLKNLKALCIDCHSKEPLHSHLALSHTERQLINKLRSEQSLLEDLGNWQSLFDYADPGVHGVLHACKHSHLRMPEINHFVTDRFGDLSARLELAWPDVKFGVAISEHDIEDAKESGWEAVTVNDFLLNYRTQANYLRA

SEQ ID NO: 6595 - protein, 583 aa, Grimontia indica
MTNFLASLIASFSAEGISNAFIYSIFLLMLISTVLAFKGKAQRFTTNTTNLLTSLGILGTFAGIVVGLMEFNPTDIDGSIEALLAGLKTAFLTSLVGMAGSIIYKGIVGLIPEKEETAAQAIGPEDIFSVMSKQLAASTELLSAIKGDEDSSLTSQIKMLRTDISDANKSQTAFQDLQLAKGETFQTQLWKKMDEFGEVLSKSATEQVINALKEVIVEFNEKLTEQFGENFKRLDESVKKLVDWQENYRHQLEDMANKYQLGVDAISSTEKSVASINERAESIPATMEKLHQVMELGHGQVTELEHRLEAFKDLRDKAVEAMPQIREQMDSTMSVIGDSVKAASNHYETMLIESQKVIDHFGATATDSVEKLRTNIEGGAEKVSNQLIESSQTLSGKLAEASSDIQDQVSTATGGLRNVTDHLSESTEMIRQQLEDAFTELNAEMRVLVADIKDDAKQTGTVLKDANQELLASTREIQTETTEAIRKLHDRLETTLEEVFKIQAQHVRRTFDSLEDQITQSVGKTGSAVEKQVEVLDLQMQQEINRTMNEMGEALATITQQFTRDYQKLTREMSNVVNTKVAV

SEQ ID NO: 6596 - protein, 236 aa, Grimontia indica
MEKLFGNTKARSEGGEHWMSVSDLMAGLMMVFLFISVALMRDAMNERDKIKEVAVTYEKTQEAIYLALVDEFSSDLDRWGAEIDRNTLSLNFTAPDVLFANGKANLTDKFEVILDDFFPRYLEVLDSFKPSLQEIRIEGHTSSRWNHGSSDYEAYFNNMSLSQARTRAVLSYVMGLEPVRIEHYGWVKENVAAVGYSSSKLITNKFGVENEKRSRRVSFRVITNAEEQILKILGAE

SEQ ID NO: 6597 - protein, 361 aa, Grimontia indica
MKLALNIRSLMNAVDMMEPEKKGKFTIEFQTSHIDKISAELEKGKDVELKDVEIESGLLSYQGRHVTLYIKANGISARFHVSDCSTLQSMRSSGRFERYVVTNNTSGEFSVDTQHGEKKARLKVCQNCLRKLNYKGCNTTAPIAPIVQNFNMAEFFATYSSFFPHMPSRLAETADSGYTDDWSKISSHYRVDKNFECEGCKVNMRSQRALLHVHHINGVKSDNRPANLKALCIDCHSKQPMHEHMVLSHRERQTINDLRKQQGLLEDLGDWQELFELSDPGVHGVLHACRQAYLKVPEINYFVEDSFGDLAARLELAWPKHRFGVAISLNDIEDANKNGWHVVGINDFLESYKSQAYNLRY

SEQ ID NO: 6598 - protein, 675 aa, Endozoicomonas numazuensis
MESIGYFVTAVFVFFIVAIAIRSFQWKKKGQYPQFVEYAPTLLTTIGIFGTFLGIVLGLLAFDQNNIETSIAPLLGGLKTAFITSLAGMLSSLVLKVLYTTMFKDSHDSMDSVSDASPEAILRTMQAQLSATESLKSTLVGEQESTLLSQIKIMRGVLQSQLNATENLKESLVGNEETTLFGQLKIFRGDINDQMKMSRNLTTELFDAQQAQFSAFTEKLWLKLQDFVDTMSKSATEQVIEALKQVIQDFNNNLTEQFGENFKHLNEAVHKLVEWQESYKLQLEQMNQQYEQGVQAITATESSVAHISEKTQLIPQTMHDLHSVMTVNQQQLSELESHLEAFKEMRDRAVEAVPEIRRQVEETVTDISAAVSTANQHYSELLVESDRYIQNHVQTSEELLNKFATETEKGIDAVGSRLIEGSKAIGESLDTASTDFTESVVRTNENLLGSIQGHMESSETLMSKVVTETEKGIDQAGTRLVESSVAIGQSIDTAATEFTNNTARTNESLQTSSDYLQTQTEIIKQHLADTVSDLNNTLRDMIEKLVNDAQSMNKTMHDANQNLVADTSQVRDSFVKATEQLQKQLADVVEDAAMQQVNQARRTFEAMEEQVRQQVGLTGEAVDSQLKLIDQSMQQEVTRVMTEMGQALAQVTGKFTNDYIKLTQAMDKIVRQQAA

SEQ ID NO: 6599 - protein, 234 aa, Endozoicomonas numazuensis
MEQIFGKRREPVESGEHWLTISDLMAGLMMVFLFIAIVFMLDTQKENEKIKNVAVAYQENQVAIYDALMMEFEGDLDKWGAEIDRETLSFNFKSPEVLFDVGKISLKPGFQNILDDFFPRYLSVLKPFRDSLDEVRIEGHTSSDWNANSSEKEAYFKNMSLSQGRTRAVLYYLYGVIPSETDWIKKNIAAVGFSSSRLVLNEKGQEDAHRSRRVSFRAITNADIQIKRILEAES

SEQ ID NO: 6600 - protein, 380 aa, Endozoicomonas numazuensis
MKLKIDFSALHRAVAPLKHTVAEFEIISQSDELVSVASELLQGLVLGQDIQLEEIDGSQGILNYNGHQVMLYITDQGDDVEAVLQDGKQGRRIHIAECSTLELMRNAGRFGRYGVISRMDGMFPVSGINPDNGKEVHGESDLGVCKNCLKVLNYKSYEDLPKAAKSEIFINFEYESFFETYSSYFKSLPATSKKQLGAVDYTADWTSISTKFRQNLNYCCEHCGVDMSQYKHLMHVHHINGIKNDNSLENLRGLCADCHKKQPHHGHLHVSRENILLINNLRREQKKFDAFDYDKLDQYADTALGGLISKCRKFRLPTADLGVMVQSGSSVVSIDLAWPRSKVAVLIDSAEQALLESAGWTVFSVGSSMKHFEQFQKGVR

SEQ ID NO: 6601 - protein, 511 aa, Thiovulum sp. ES
MNTTDLLTTIIIGIIVILFFAEILYFYKRNTSIKSTVTIVGVLGTFIGIVIGLWGFDYVNVEKSLPTLLGGLTTAFLTSVAGMVAFLFLTIIEKWREKPSTNSENFVDILSDIREELKNLNGRVENTENKLSEIAKDSKKLDSLKELGEKLYGLKDLANQLGKLEELDKLQNLEKSNNSIVKKLDSLEKLEKSNSDISTKLTKLDSLHNLSKLDNLETLNTKLETSNEALAKLPEITNAITDLKTNQNEQNKTLIESFGKNFEDMNLLLDKTFQKISEGASKDIIEALQQVIQDFNDELTTQFGENFKELNKAVFDLVTWQENYKSSVEAMESNLKTSMDSMEKSKTSLETISARNGEVVETYDKLKETIETYKFQIDEVNRHLTTYAELSEKAKEVFPNIEKSIKDVGSNFQMATSSIQTDLGTLITDIDSAITQNGEKITNTLNTVSTEFENQKTQISETLQQHSETIIKISNELPTQLQDFGDGISAITGEFTKDYNMFLENAKKLMK

SEQ ID NO: 6602 - protein, 245 aa, Thiovulum sp. ES
MQNSENENGEEWLSISDLMSGLMLIFLLIAITFMYQVNKRLETTIDYKKKLEEISKEYALVEENLYQALRDEFRKEELEKWNVIILPNNTIRFNSPDVLFESGEDYVSDEFKGILVDFFPRYVGVLTRDDFVNFVEEVRVEGHTSSIWNGYTGINAYLKNLDLSQRRAKNVLDFAIRIDKVYPKFEWLKLKFRANGLSSAIPIRDENGNEDTEMSKRVEFRITTNARDALQKLETLRKEMESKEK

SEQ ID NO: 6603 - protein, 324 aa, Thiovulum sp. ES
MLNFGSSFKKLVQDSGIEIIERITIKTANGEKRIKLGGSQEENQVIANALSKNLSADEVRILEKSGVEIEFTNENGCALYSEDLIRTDNGLFYKGRRVLLHIAQRTSVKKNSPDNLPKYHLHYCKALEMQKNNGNLEKYRVSLSQDGTFHFSFGDKFISDQKLHVCKTCVKELYPNYKEMGVSDERKFYKGEYRNTLNVSYFSLKKHFQTRPETVIDGDSPKLVFDGLDVSGMDMDYQEVSNEYRKEWRKISIERKKAQNYTCQECNWKPRNANEKKYIHTHHMDKNKGNNLSSNLKVLCMECHYNNHPTLKEKQPYKDFLKIK

SEQ ID NO: 6604 - protein, 677 aa, Vibrio toranzoniae
MTGLLASFIASFSAESISNSFIYLILLLLVSSILLAVLGKAPRFTASTTNILTSLGILGTFAGIVVGLMDFDPQNIDGSIESLLGGLKTAFLTSLAGMAGSIFYKAALGLIPQKELEESKAVGPEEIFSVMSQQLQASTEQLNASNELLSAIKGDEDSSLTSQIKNLRTDINDGQRTLNEQFKQTTERNAEFQSTLWKKMDEFGELLSKSATEQVINALKEVIVDFNEKLTEQFGENFKRLDESVKKLVDWQENYRHQLEDMATKYQLGVDAISSTEKSVAHINERAEAIPVTMEKLHQVMELGHGQVTELEQRLEAFKDLRDKAVEAMPQIREQMDTTMNVIGDSVKAASTHYESMFNESQTIIDNFSSTANQSVDAMRTNLEEGATKLAQELTTSAEKISTQLADASEDFTQVTEEGVEDIKVSFEAGVKKIAEDLDTTTKEISTTLSASSQQFTATTEESMNTMRTNLESGAQDISTQLRESAQDIGGKLAEASSDIQEQVGTATGGLSNVTSHLTDTTEQIRQHLEDSITELNGQLRVLVADIKDDSKETGRVLKEANQELISSTKELQVETTSAISKLHDRLETTLEDVFQVQAQAVRRTFDSLEDQITESVGKTGSAVEKQVEVLDLQMQQELNRTISEMGEALATVTQQFTRDYKDLVREMNNVVSSRVA

SEQ ID NO: 6605 - protein, 236 aa, Vibrio toranzoniae
MEKLFGSSKRPSDSGEHWMSVSDLMAGLMMVFLFISVALMRDAMVERDKIKEVAETYQQTQEAIYVALFKEFEVDLKKWGAEIDRDTLSVNFTAPDVLFANGKANLTGNFQTILDDFFPRYLKVLDSYKPIIQEIKIEGHTSSKWNHDSTDYEAYFNNMRLSQSRTRAVLGYVMLLPNVAEQHYSWVKANVAAVGYSSSKLATNEEGLEDEDRSRRVSFRVITNAEEQIRKILGAS

SEQ ID NO: 6606 - protein, 361 aa, Vibrio toranzoniae
MKLSISFGSLKNAINLMEPDQKGEFKLELQETQMEKLDIELAEGKDVELKDVDVDSGLLSYKGRNVSLYIKANGSSARFHVADCKTLQSMRANGRFERYVVTNDTSGEFIVASGYGETKAKLKVCQNCLRQLNYKGCNTGTLISSIVQQFDMAQFFATYSSFFPHLPSRQAETAETGYTEDWAKVSSHYRVERDFTCQQCHLKLRAHRNLLHVHHISGVKSDNRPKNLKALCIDCHSKQPMHSHMALSHAERQLINNLRQEQGLLDDLSGWQELFDYSDPGVHGVLHACKKAYLNRPEINHFIIDRFGDFAARLELAWPENKFGIAISENDIEDAQEAGWEVVSVNDFLQNYRTRAHHLRA

SEQ ID NO: 6607 - protein, 435 aa, Mumia flava
MKTKTLLLLSGIAWAPYVFAGGPIGTVLADKQTLAFILLNTCLTIFFAFVRFDRFSVVHGPEILTTVGIFGCFLGIALALLQFDASNVSESVPHLLEGVKTAFWASVSGVFGSLVIRGRHYFWKTPIPQAPGAPKAATLDDVVSATHALQLSLSGNEQGSLLSQLKLMRQEQGDELRMLRTSFDTFAQRMSEDGSKALIEALKEVIRDFNAQINEQFGENFKHLNAAVEKLVVWQQQYKEELDNLQALQKSSADDLRGASSGLALFIDRASSFAQTATALEGTVRGLAQQHQLIDQSQRSIADVLSQMKDVTPQFSRKVDEMTESMKQGVARVQAEVGDVVKNFGVQVQSSSSEMKQLLTDTLRKSQSEVNDGLVRSMDAVRQSVVTLDKGLQEELTKSLETLGRQLASLSEKFVADYTPLTDRLREVVRIAGTA

SEQ ID NO: 6608 - protein, 230 aa, Mumia flava
MDFEHSNQSHWIPMADLMTGLMMVFMLLTAAFMLRVEQTTTLVVKEYETTKRDMQLALQKEFAKDLQQWNAEILGDMTIRFNDPTVLFATGSSELRPRFKQVLGQFFPRYVALLTSAQYKDAVKEIRIEGHTSALWTGTTDEKIAYFRNMELSQARTRSALEYLLSLPAVQGNEKWLVQHVTANGLSSSRPLAQDSQSAASQIANQRVEFRIVTNASEKMDLIAEKLAKK

SEQ ID NO: 6609 - protein, 282 aa, Mumia flava
MSFQLPNFLNWSLLNALRQEMGAPLAASFVPDHKFRDIELPVLERLQNNGVDVQFDEVEVLSDGTLAYKGYRVLLYIRDIMSIGHQESMPRYHLAYCRTLDKMRRNARFDRYVVANGDSGRFQVNVIENDVKTQHVRLNVCQNCLDEIHWNGFDMKMPRDGRLTLVSKFSLPDFFKKYPRDLMAVKPVHSSDTAPLNVYSQDWNEISERTKRQRGYRCAACNTMLRQTDSKFLHVHHRNGQKYDNRDSNLEVLCIGCHAEEPMHGHMRALREYQEYVERYRR

SEQ ID NO: 6610 - protein, 506 aa, Basilea psittacipulmonis DSM 24701
MGNNFFIENREFIINSVYFLLALWFVVSVFLIAKLAIYKNLDQHNPYIYEAIPSVFTTIGVLGTFVGIYFGLIDFNVYDINSSIPTLLEGLKHAFSTSIVGIVLSLIFSKISEFVLFRVEKRNAVIHDDNYDQKIIEELKELNEVQHKILSTINERDTHIDDVKDYYHESIQLFNQIVASQNRLEKLQTEENQIITNTQEMMVSQHQETMEKSTQFESRFTEAVQIIHQMAEHYKEQNKLIQDIAREKQEILSLFMIEIKQKFEEFSELLSQNNTEALVSVMEKVTEEFNQQMNTLISRLVQENFEQLNHSVMQLNQWQQENKAMIASLTEQFNQAATGLDSNHNTLKEITHHTEKLVSDAGYLQKLISELQRVIIDDNKFEKISTDLSNTADLIKKNTNAFDETTNKLNKWVENQMYFSDSVERLLSRLEEIDKIKDINEIFWKNTKEQMNEGVNLLHNASESLAKDLDTLNQTYQDQLNNVLMSLDMLIQRIIINYDGQYEKNK

SEQ ID NO: 6611 - protein, 222 aa, Basilea psittacipulmonis DSM 24701
MVEQLKKSEEALKRSQEQQKLIFENFTNSKLSIYQALKNEFSDDIEKWHIELGEDLSIKFTNPEVLFDLGKTTIKPHFKTILDDFLPRYFNIILYPQYRGTISEIRIEGHTDTVPALRYDNDPYIGNVILSQLRSTAVLKYFHESEYYQSLSPEQQQQLAFLLTANGLSYGRTLDSNKKLTYLTGKPISPELSRRVEFRIITNSANVIEKVLRKMESENEKY

SEQ ID NO: 6612 - protein, 268 aa, Basilea psittacipulmonis DSM 24701
MKNIELYQFSKLEQWLNKQNFPQLSDYNQITVDFEKVYKKGRISFESQIRPDEEGIFLRYLDKEYPGFMYIKEAFINYEGKFQFPKFHIYKCKTIQSFIDKGNFHQRYVFSTSNICDLIDKTTHQVFKNVTLELCHYCRTFSENSNFKEVKTTQDFVELLKKYSIDTELKVDVFGYVFRWDKVSQAFRESVDYTCAKCGLKPNNPRDRYFWHVDHIDGDKLNNQASNLQCLCIACHSKKDNAHRKQFSTLRMQKLLEDFEKIYPTAKE

SEQ ID NO: 6613 - protein, 399 aa, Sulfurovum sp. FS06-10
  MOD_RES (137)..(137): Any amino acid
MFSCVERYAFIGIFMGLQDFNPANMKNSIETILIGLKTAFFTSIAGMGTALALSIFQKLFNRNLDDAENQERILSEISEKLNHLEKLNQTQETDKIIGELERLRTVQSDTRDETKKVAISIDELRANSNKENRELIXILNINFDQMNRSLEIAIEKLSKGATEEIMNALKQVIEEFNQELQTQFGENFVKLNESVINLVEWQNNYKSHIEHIEENLQISSASIEKSKESLDVISSKNQEILNVYTNLKHIIKIYDIEIKDLTRHLETYAKLSLSAESMFSTITHNISQTKEEFTYLTEHIKKENAKQINDSKESTARIANDIKIKTTEIKSNFDEVTHSFEKNKKELELISNHFKNLGEQIPKSLQISLNALNQGLTSLTSTFQKDYKEIMDNYRKGLR

SEQ ID NO: 6614 - protein, 230 aa, Sulfurovum sp. FS06-10
MKSNSEWMSISDMMSGLMLIFMFIAISFMIQIQTDKDKMKEIAITYNKDKKELNKDLNLEFSKDLTKWEAQISQDNIITFNSPDVLFEGGESQIKEEFKNILNDFFPRYIKVLSSKKYIHEIDEIRIEGHTSDNWNGTTNAKDIYLNNMKLSQERANNVLSYCYTIDAPFIQNNRVWLEQHFRANGMAFSKLKYMDKNQTIPDILKSRRVEFKVQMKTEEKIYKILKASE

SEQ ID NO: 6615 - protein, 218 aa, Sulfurovum sp. FS06-10
MELIFSNFQTFLNAVQSITEEKLAQAKKILETHGKDIENISDIFVNDNGELFDLLPDGTLVRVNLYIATKEIDRYALNTIQSEDLYKYHIYQCSTISTMFNSGRKHRYKLNTREDGTFFYNFHDYNGKVLGIKDNQKLDICKNCLKKFLGKSPLSDYDVAHFNLKKFHQQNSGFFDFDTSSIEKGEDAKPNVYHRKWTQISNQIKTGMKRVDNGQFGR

SEQ ID NO: 6616 - protein, 440 aa, Sulfurovum sp. FS08-3
MNDFEKLLSMLESDINLAIVVIIGILALIDVVFKKDLKSQIVSLGVLGTFIGIFMGLQDFNEVDIKNSVSNILVGLKTAFFTSIVAMGTALVLAIIQKTLYKNIDDENNQENLLKEISDKLNHLEKLNQTQETDKIIGELERLRIVQTDTREETKKVAVAIDELKTNSNQENQKLISILDTNFEKMNNSLEIAIEKLSKGATEEIMKALETVIKEFNQELQSSFGDNFVQLNEAVINLLKWQENYKTHIETLDEKLELSTTSIEKSKESLEVISSKNKEVLNVYGELKRIIDVYDRQIQNLTQHLQTYATLSSSAENMFATITTNISKTKEEFSDLSEHIKKENTKQLDNATEITSKIANDIKLKTTEIKSNFNDLTSSFEKNKKELELISNHFKNLGEEIPKALKVSLESLNSGLTSLTNNFQKDYKDIMDNYKNGIRQ

SEQ ID NO: 6617 - protein, 250 aa, Sulfurovum sp. FS08-3
MKASDSEWMSISDMMSGLMMIFMFIAISFMIQVQNDKDKVEESNKKLKVLMQEAEKAKKRIKNIAITYNKDKTELNEDLHQEFSKNLNKWEAEITQDNIIVFHSPTVLFDNGEALLKKDFQAILDDFFPRYIKILASDKYQNEIDEIRIEGHTSNSWSQKISSDDIYLNNMTLSQSRANNVLSYCYTIDNITINQNKKWLEKHFRANGMAFSKLKFMNDTNTPDDNKSRRVEFKVQMKTEEKIYKILEAS

SEQ ID NO: 6618 - protein, 132 aa, Sulfurovum sp. FS08-3
MNKQYTSNDDVENFDLKKFHESNSSFFDFDTSSMEKGEDAKFNVYSHQWTQISNQIKTKYDYICQGCGWRPNTDDKKKFIHTHHQNGDKTNNSEDNLKVLCIECHANIDGYHARIKSMNGYQEFLKLKNISN

SEQ ID NO: 6619 - protein, 659 aa, Fusobacterium hwasookii ChDC F128
MEYIFKFLAFNIGQYIGVSLTISDLIIYFVMGYIIVHIIKNNKINDKEKRNFYINLLPILGVIGTFAGICIGLADFNSNEIEKSVPLLLQGLKTAFWTSLIGTSLAVFFNVWYSFKDKKDIEDEEDEIPLLKLQIKELQSISEKFNSFLENQAINNNSLKNLTEFFNNNEDKNLKKFEEIKNELKVLNDKQEKTNSFYETSLLKLEILDEINKKYDKNIENFALCNENISVLKENSILNLEENKKLNSNTTETLSKLELIEKINTDTLNKNSSIFENIELLLDNFKNYKDEFSNFFKASESQSRELITAFKEFATYMAEENSKAFIEALNKTIKDFNNNLIESFGSNFKQLNEAVIKLVDWQEHYKETIESTTENQRVIFDSFTGIEKELQTFSSETKNINSIVTELSTITKESVEQNIKLNETLSVFSELNSHAKELIPNLVEINNNIDKDIKTFNSYSNELIDNLNNFTNNLQNNFSQYIDDINRGVKSSTDSIMGIMEDSLKKIENNFDKSLENTNLKLKETSENIFTEIEKFNTDFSNNMKEQLDIFISNNENYSAGINRLVKGTLEAIDESEKNNSKMIDENLKQIEKLNIELNNHLKVHVENIEKGLQDSLNSSLDSLGEVMAKISDRFAKDYGPLADKLREIVELSNNKRVR

SEQ ID NO: 6620 - protein, 234 aa, Fusobacterium hwasookii ChDC F128
MTKKHHEDHFSPRVADLMSALTLIFLFISVVYMLQVNKEKERIEMIAKDFKNTKYEIYTDLNEEFKDDLKKWNAYIDKDTLSITFKEPDVFFDVGSSNINQKFKDILDDFFPRYVEILFTKYNNEIEEIRIEGHTSSEWNKNDDSLQAYFKNMTLSQERSKSVLEYCMLLNKMRPYREFLISKATANGLSYSHRVIEDGKENFSKSRRVEFKIKTTAEAHINDILEAGGFNETN

SEQ ID NO: 6621 - protein, 273 aa, Fusobacterium hwasookii ChDC F128
MKLINFLDFEPLKEIMEKMKVDRNEKIEIERIKKIEIARIWKELSSLSGLDIDINETDPSEKGYIKYREFDKLVAYIRDQKYFGEKFSLRKFHIAYNCKTLSDSRKSRDASKYKIVQNKSPEFTINILSEDAKTVIEANVIKKLEVCTNCLKALNYKNFLNVSKSEQDKIKNEFSFEEFLGTEFDKNEELIKSYNLDDIENDKVRLYPKNWDEISYNYRKSKKWVCEECGKDCSKNNSELEVHHIDHNPSNSNFYNLKALCKTCHSKIHPHME

SEQ ID NO: 6622 - protein, 463 aa, Myroides sp. A21
MIELIIALIVFTIAYSFGYVFFRRFRKNQINDPSKKGFFNNKYIFETIPSTFPTLGIFCTALGITMGIWNFNTDDIQNSMPELLNGLKLAFLATMLGIVGMIIFQKVAAVIQREIDDVNQNVVNESNELGALNVIIKKLNESTERNDINTKLLVDAIRGMNETIGSNSSNLENILKNELTKVCEVVTSMSVDIKDSIERNYNVELLSIGKSDEIIASLKDNQTEMSKKFDTFSVLLAKNNTEALVEVMKNVTETFSQQMNQIIEKLVKENFDALNNSVLNMVSWQEENKTQIQTLSDGYTSLTSNFEKNAVLLTDITNSVNGLVGDSSKLNELVLIMSEALMDDNNFTQTTKKLVHTIEMIEKSTEDFSNTTDKLNEWVNKEKNFNDSVELLIDKLEEFRDLNSDVWSRYRNEMDSAVGIIEKTSLTISKELSAIDDEFYNRLHTTLENLDMCIQRAIVKYEK

SEQ ID NO: 6623 - protein, 235 aa, Myroides sp. A21
MSKKESFWLPYADLMTVLMIVFLFISVGYMAILQKKEKERTNIIDTYIVLKEDLYNDLKHEFKDDFKKWDLELDRDLSIKFTNPEILFQSGKAELTTKFEDILNEFVPNYLNIVLDKKYKGRIAEVRIEGHTDDVKYLYTKDSYIRNVELSQERSRNVLAYIRSLEYYKELSSEEESLLQFLLTANGLSYGRTLDKNKELTFTTKKEIDRVNSRRVEFKIVIASDDILNEVINKK

SEQ ID NO: 6624 - protein, 265 aa, Myroides sp. A21
MEKNRLYDFSELIKFLDKKGFPNVEKPTLEIIREDLTQKQKEGKVEFKEDGIYLLHNNIWHKGYMYIKNADVNQYGLPKYHILECKTIKDQKSRDKFDNHYYWSNESHVDVRQRNSNQEYKEEVLDLCKNCAKEAKEIYYNTTELFHNSLNLDVNYSKKVIKIDINGYDVDWHNIKRKHQEEKNFLCEECGIDLQNDKRFIEVIHKDDDKTNNMLSNLRCLCLGCLANSVSKSKLSKAKLEQVKAFKNKYDGFYKSKNIFTRTKM

SEQ ID NO: 6625 - protein, 497 aa, Coxiellaceae bacterium HT99
MSRIFALTLTMLSFPVLASENTNAPTIISMLQQFSSLELFWMGLTVCLLVFFLIKFDRFAVTYGPEILTTMGIVGCFACIAWSLLHFNSNNITASIPSLLDGIKTAFCSSFIGVVGALGIRIKHKFCKDTLHQASKEIASTPFEPLLKEIINLRKTLSGDEEGSLLSQVKMLRQDSNDQQRKLQESFDKFAKHMVENNQKAFIEALQQAIRDFNQNLTEQFGENFKHLNQAVEKLVTWQEQYKDELDTIKEYQSQCSSDMKQASEAFTSVVEHAKQFSDIAQNLKTLLESMDKQKDVLFIQEKALSELLSTMKDHIPGFSTNTQKLISEISEGVKLVQTETVKIISDYTTEITVANDGMRDLLFDIVKKTQDSLYNGINDSVKTIRDTVANVEAQTSEVIKNHGVQLQSTQAEIKNLLVDGITKSQQEVSAGLQENARIIKEGVLALDKELEKGLTDSLTSLGKQLASLSEKFVSDYMPLTERLRDLVRLAKNSEPA

SEQ ID NO: 6626 - protein, 214 aa, Coxiellaceae bacterium HT99
MTGLMMVFMLIAVTFMLRVEQTTTLVVKEYEETKNDLAQALQKEFAKDLKQWNAELLGDMTIRFDDPDVLFDTGSYEVKPAFKEILKDFIPRYIALTSSKKYRSSIKEIRIEGHTSKKWSSGQDKKTAYIKNMRLSQERAQSMLEYILSLPSLVKHEEWMQKHFTSSGFSSSRPILNDNKSVNDDRSQRVEFVIVTNAESRMDEIAKEIKNING

SEQ ID NO: 6627 - protein, 288 aa, Coxiellaceae bacterium HT99
MVKLVDFYKFAQFNTLRKLMQAELIQEFKFDSGISLLEEDFISRLDNEGIEIESLNEIEFRDDKTLGYKGQRVLIYIRDVNHYREEIKLPKFHIATCETLEKMWKNKRSERYVLYRRENGVFQVNVMKDSKIDIRYEKLNVCRNCLTHLNWENYTQERTSRNAIVADFSISVFFKRFSKSLLTSLPSHDSDTAPVNDYPDDWDVTSKQLRIKAGYRCESCKVCLEDAGLRQYLHVHHIDGQKNNNTKHNLKVLCAKCHADEPDHGHMKSSHDYKQFLSMYLQLKSKKY

SEQ ID NO: 6628 - protein, 550 aa, Vibrio sp. VPAP30
MLTSIFEALLKGASATAITDVFLIALAMIFLLSMWWRQSGKHHSFTNYTPTLLTSLGILGTFTGIISGLLDFNTTDINNSVGPLLEGLKTAFITSLAGMLLSIIYKVVISSGVFSKVVEGGEVEEDIDVVDLYKAMTLQVESINQLRKSISENDESSLVGQIKLTRADLNENHKSAEKLLSSVSGTQQETFSQFEKELWNKLDEFADMMSKSATEQVVDALNQVIQDFNNNLTEQFGSNFQKLNDAVLELVTWQENYKTQLMDMKHQYDQGVLAISKTEESVSNISEDAKVIPDTMNILKEVMQVNQHQIQELDKHLNAFKDVRDKAVEAVPEIREQIENAIAGAKEANDKLAVGIVESSEHIRTVISEGADSYRDTVDQTRAALTESAQATANSSEEIKDRLASALEDINTQMHGLIIELQQGNQTLTSNYKEASQQILSDTDRVRDTFTESMDLMKKSLSSTIEEQAIEHKRQADKVFAGLEKTIEETLSQTGESVQKQVNMIDQTMGEEIEKVMQSMGTALTSISGRFTEDYSRLVKRMSDIVTQQV

SEQ ID NO: 6629 - protein, 235 aa, Vibrio sp. VPAP30
MNSIFERKQTEQDESHWLSVSDLMAGLMMVFLFIAIALMQSAFKERDKIREVAVAYQENQVAIFDALMLEFNDDLKRWNADIDEETLTFTFKAPEVLFSGGSSELSLAYQELLDEFFPRYMEVLMPFKESINEVRIEGHTSSDWKGLTKDQAYFENMRLSQERTRTVLNYVYKLDSTKNYASWLKSHFSAVGLSSSKLLYNDDGTENQSKSRRVSLRVLTNADIQIKQILQGGST

SEQ ID NO: 6630 - protein, 376 aa, Vibrio sp. VPAP30
MKLNVDLSSLWTKVNEMGAEITDFDIGVVWKDSDIEFDDELESGVDIDILDLSSEAGILSVKGRQVILFIPDHTFRIEKALINGADGNKFHIADCQKLDEMRRKNRFKERYKITNNLSGSFPIYGDSNYKGRLEGEAQLNVCKWCLSQLNYQGAANASSKERDAIVERFSIEEFFKTYSSLFRKLPKQYVELAKKGYSEDWGAVSSKVRKKADYVCQYCSVDLKSAKRLLHVHHRNGDKSDNSPDNLVALCADCHRKEPFHGHMFVKHEDMVKINQLRSDQAVYAQCDWNTVKRKADLSLQGVLDHCEKGGYTAPEVGYHLKTNNHLEALILELAWPKRKFGIVLSEPVEVDDWTILSLKEALEFFGKRSNRKRKR

SEQ ID NO: 6631 - protein, 560 aa, Photobacterium galatheae
MLTSIFEFYLKGVNASSITDFFLVTLVFIFCLSLLWKKSDKHHAFTNYTPTLLTSLGILGTFTGIISGLLDFDTSDIDNSVGPLLEGLKTAFITSLAGMLLSIIYKVFISSGVLSKVEDGGTIEEDIDIVDLYKVMNQQLDGISLLRKSISENDEASLVGQIKLTRSDINENYKNNGVFLDLITKNTTELLSISKSQQNTFNEFEKELWLKLQEFADMMSKSATEQVIDALKQVIQDFNSKLTEQFGKNFSDLNEAVKELVIWQENYKNQLNDMKLQYDLGVLAIAKTEESVSNISREAQNIPETMSVLKQIMEVNQHQIQELDSHLNAFKDVRDKAVEAVPEIRGQIELAISGAREASDKLAVGIVESSEHIKAVISEGAENYRDTVDRTRAALTESAQATANSSEEIKERFAKTLEDINSQMHSLILEIQQGSKTLNSNYREASEQIIQDTEKVRISFSDSMEQMKNSLSSTIEEQALEHRKQADRIFAGLEKTIEEALSNTGESVQKQVNMIDQTMGEEIEKVLQSMGTALTSISGRFTEDYSRLVKKMSDIVAQQA

SEQ ID NO: 6632 - protein, 235 aa, Photobacterium galatheae
MSTVFDRKSSEQDESHWLSVSDLMAGLMMVFLFIAIALMQNAFKERDKIKEVAVAYQDNQVAIYEALQTEFSQDLSRWNADIDEDTLTFTFKAPEVLFKEGSSMLSPDYRSLLDEFFPRYMTILMPFKESINEIRIEGHTSSDWNSLNADDAYFENMRLSQERTRSVLRYVYSLKITSNYSVWVKSHFSAVGLSSSKLIYDENGTENKVRSRRVSFRVLTNADIQIKQILQGEES

SEQ ID NO: 6633 - protein, 375 aa, Photobacterium galatheae
MKLNVDLSSLWARVHQMGAEVTDFDIGTVWQDGDIEFDDELESGIDVDIEDLTSEEGILSVKGRQVILFIPDHGFKVEKALLDGSEGNKFHVADCTKLDEMRRKNSFEERYKITNNFSGEFPIYGHGANKQFLEGTAGLNVCKLCLNHLNYQGSANATVSERNEIVNQFDIEEFFSTYSSLFRKLPKQYASLAKKGYSEDWESVSADIRKKSNYVCQYCSVDLKEAKRLLHVHHRNREKSDNSPQNLIALCADCHRKEPFHGHMFIKHEDMLTINRLRGEQNVYANCDWNTVKRKADLSLHGVLNHCEKKGYTVPEVGYLLNVPDRTSPLLLELAWLQRKFGIVLSDPVEVAGWTILSLEEALSFFGKNKKSTTR

SEQ ID NO: 6634 - protein, 550 aa, Serratia sp. TEL
MLAPLFEHLFRSIDSMLVTDVFILAIILTFISAWWCDHRNIHSKFREYAPTLMGALGILGTFTGIIIGLLNFNTESIDTSIPLLLGGLKTAFITSIIGMFFAILFNALDAFFFANKRDNLTDSVPETITPEHIHHELKENNQYLEKLISGLSGNEEGSLVAQVKLLRNEINDASRAQLSHHTEFSNKLWEQLKQFADLMAKGATEQIIDALKQVIIDFNNNLTEQFGENFKALDASVKKLVDWQDNYKNQIENMSEQYQQSVDSLVETRGAVAGIWEECKEIPLAMAALHDVLKVNQHQINELSQHLDAFVLLRDKATDAVPVIHEKLDEVGELLKAGALSVSSSLGQTGTELLANANAMRIALDEGSEGFRQSVTQTQQAFASMAHDVSNSSETLTSTLGETITEMKQSGDDFLKSLEAHSKELHRNMEKNTTDVVELFSKTGDKFNQQLSSNAENMFGTMQSSFDKASAGLTSQVKESVERFGGAINEQLHAFEQATEREMNREMQSLGNALLSISQGFVKNYDHLIKEYQSVLGQLQPLINSRQHRG

SEQ ID NO: 6635 - protein, 235 aa, Serratia sp. TEL
MDKIIGKQIPSQNQDNEHWVSMSDLMAGLMMVFMFISIAYMHYVRIEKEKIKEVAVAYEQAQQQLYNALNIEFSNDLPDWDAEIDKQTLEVRFKSPDVLFGLGSSELKPKFKEILNNFFPRYLKVLDQYKEHITEVRIEGHTSTDWTGAANQDEAYFNNMELSQGRTRAVLQYVHSLKESSAHQKWVKSKFSAVGYSSSHPILNAMGKEDQSRSRRVTFKVITNAELQIRRIIQE

SEQ ID NO: 6636 - protein, 363 aa, Serratia sp. TEL
MKIKIDLTELIALGKKMLPSGADFFLDEESIIFDPIDLELSEGKEVSIDDLDPGSGLISYRGRQVLLYIRDHTACYDAAVENAEKGKRFHIAWCRTLDNMRKKNRFERYHATNRVDGLFEIDDGLGRSQEVDLRVCMNCLERLNYKGSIDKNQKRIIFKSFSMSDFFSHYSTCFLHMPKGIYEKSNSGYTKNWKEISRSTREVADYHCSDCGVNMRSARHLCDVHHKNGVKYDNSPQNLCVLCRDCHRKQPFHSGIFVKRNEMAAIQNLRSQQGLLKSQSWSEIYALVDPSVKGDIEMMEFKRYPMPTLGFDLKNKNNEVVAIVDAAWPLLKIAVSLDSVEVEGWEIFSVGELVHQIQSGRVF

SEQ ID NO: 6637 - protein, 588 aa, Pseudoalteromonas sp. P1-25
MNILESLLRGFDTNVVSGVVLILMLFVFGLGLFYTKKAKQVEFVQFVPTLLTTMGIFGTFLGIVLGLLEFNQSDIEASIPLLLAGLKTAFITSLAGIFLSLVFKTLSTFSFLKPKQLEDSISHATPEAILGAMQAQVAETKVLKEAIVGNEESTLFGQLKILRGDINDNAKTSINIAQEQAVKQQENFEAFSEKLWLKLQDFADTLSKSATEQVIEALKQVISDFNNNLTEQFGDNFKQLNEAVVKLVEWQENYKVQLKEMSDQYAHGVASISATESSVAHISEQSQIIPQSMGELKGVMEVNQHQLAELERHLEAFKDMRDKAVEAVPQIQKQVEATVNDISAAVTTASDHYKTLLTQSDDYIKAHVQTSNDLLDKFAHETEKGINSVGDRLIESSDKIGKEIQTAGNEFTDNTARTNESLKTTSDHLQSQTEVIKQHLQDTVTDLNNNMRDMIEKLVDDAKDITSTMKQANQNLVTDTEQVRDTVVKSAEKLQQRLNEVIDDAATQQINQAKRTFDAMENEVKKQVGMTGEAVDSQLKLIDTAMQQEINRVMNEMGKALAQVSGKFVDDYIKLTKAMNEVVSQRVM

SEQ ID NO: 6638 - protein, 232 aa, Pseudoalteromonas sp. P1-25
MEKIFGSQNNSQDSGDHWLTVSDLMAGLMVVFLFIAIVFMMITQKENDKIKDVAVAYQQNQVAIYEALESEFEKDLDKWGATIDKETLAFNFQSPDVLFANNETRLSDAYKEILNDFFPRYINVLAPFRDSLDEIRIEGHTSSVGLRGSTEAQAYFYNMRLSQGRTRSVLEYGYALMPDESDWIKANIAAVGFSSSRLIKKNGVEDAARSRRVSFRAITNADIQIKRILEAQ

SEQ ID NO: 6639 - protein, 378 aa, Pseudoalteromonas sp. P1-25
MKLTVDFSALHRAVAPLGKIVTDFSITSDASELESIGSHLNQGMILGKDVQLDEIDGSNGVLNYDGHQVMLYIPDQGDDIEAVLSNGKLGRRIHVAECSTLELMRETGRFKRYDVINRVDGFFPVFGSSYRGGPNTEGEADLGVCKNCLKILNYKGYSTQSPQVKNQVFNSFSFEQFFEVYSSYFKSLPVNSKKHTSGYTPDWPSISAKLRSDLNYTCEQCGVDLKSEKRLLHTHHINGNKADNERDNLRVLCADCHKKQPHHDHIYVSNSDILKINQLRREQHKFDVFNYDNLRECADTALDGLLQKCESTRLPGAELGIVIQDKETFVSIDLCWPRRKVAVLINMSNSNILRRHGWTVFTAFDALNNFENFQRQIR

SEQ ID NO: 6640 - protein, 547 aa, Pseudomonas sp. Leaf48
MISQYLEGALRSASAGTMTELFIWVMLAIFAMAIIQGKTGKHGFFVEHAPAVLVSLGILGTFIGIVIGLLDFNAHDIKSSIEDLLDGLKTAFITSLVGMTLSIVLKALDAWWFEPARGKTEQPDSVTPEHIYGVMSRQEKLLEALNHSLAGSEEGSVAGQLKLLRSDMGDFRNGLDRGQHEFQDKLFKHLALFSEMLAQSATETVINALRQVIQDFNKHLVEQFGDNFKALNESVGKMVDWQEQYKQHVEVLEARIETAVRELERTATANEAISRSLTTSEQSIGSIDNHCQSIPTAIGQLEPVLQVNQHQIQELQRHLDVFIAMRDKATSAVPELQQHMDTLSKALSDGMQGVISTMHEGSMEFGRSVDLTNTALTEASHVISSQTEQINENMKDAAQEFGSSVRGTLESMLNNSKSLEQQMGLAIEQASGSLTETFKQATGKIQDSLTSTVDAALNTLRSTVEGNLSQTESLIQGSANRTMGSVEAQVREATERANASLQAQLNAMDQAIGRELEKVFREMGSALATISRRIADDHAELVSRTRS

SEQ ID NO: 6641 - protein, 240 aa, Pseudomonas sp. Leaf48
MDNLFRSRHSKKDDAEHWIGISDLMSGLMMMFLFIAVAYMYYVQVERENIKEIAVAYKDTQVAIYNDLNNEFKSDLPRWNASIDRNTLQVTFNNPEVLFRSGSPELSTQFQAMLSDFFPRYVAVLSRYRGAIDEIRIEGHTSSDWGTLHGDEAYFPNMALSQDRTRSVLQYVLSKLTSGADRDWVRSSFAAVGYSSSRRLVDASSTAEDAARSRRVNFRVFTNSELQIRTIIERLDGNQR

SEQ ID NO: 6642 - protein, 361 aa, Pseudomonas sp. Leaf48
MEINVDFSGLWAQVKRLNAETVDFDWTAAAQLDPIDIALLEGREVRLDDLNVINGLLSVDGRQVLLYIPDQFSPVDVVQLSPDKGKRFHVADCKTLNDMRSKGRFERYVVTNNLSGIFPISGKSSRGVREELDSRLLVCKNCLEKLNYQNYCHESARSTIWNGFEIGKFFETYSTSFRHLPRSLTQRALGNDYTKDWAEISADVRRRCGFTCEACAVSLTEHRHLLHVHHVNGVKQDNSTVNLRPLCADCHRKQPLHDHMFISTQNMQILNRLRREQSIVADDWKQAIALADLAVHGGLMHGRHKGFGVPVIGYEVMNAQELVVAEVAAAWPDHRIAMYVADAPAIEGWAVLNPVEFIDKY

SEQ ID NO: 6643 - protein, 435 aa, Burkholderia sp. LMG 29321
MKARAVLAVSCAALSPYAVAASPFSAVFSDTTTLFFILLNAVLTCYFVFYRFNRFAVVHGPEILTTVGILGCFLGIALALLHFDASNVSESVPHLLEGVKTAFWASVSGVFGSLLIRARHGLQKRPIPQADGAPKSATLDDVVAATHALQRSLSGTEEGSLLSQLKLMRQEQGDELKQLRTSFDTFAKRMSEDGSKALIEALKEVIRDFNTQINEQFGENFKHLNSAVEKLVVWQQQYKEELDKLQVLQKSSADDLRNASSGLALFIDRASGFASTAEALERTLKGLAQQHQAIDQSQRSMAEVLLQMKDVTPQFSRKVDEMTEAMKQGVAKVHSDTAEVVKTFGTQLQSSSAELKQLLTDTMKKSQTEVSDNLTRSMESIRQSVVALDKGLQEELSKSLESLGRQLASLSEKFVSDYTPLTDRLREVVRIAKSA

SEQ ID NO: 6644 - protein, 230 aa, Burkholderia sp. LMG 29321
MDFEHSNQSYWIPMADLMTGLMMVFMLLTAAFMLRVEQTTTLVVKEYETTKRDMQLALQKEFAKDLKQWNAEILGDMTIRFNDPTVLFATGSSELRPKFKEVLGQFFPRYVRLLTSQQYKSAVKEIRIEGHTSAAWTGTSDEKVAYFRNMELSQARTRSTLEYLLSLSALRDNEKWLVQHVTANGLSSSRPLSADEQTSKAQLANQRVEFRIVTNASEKMDAIAEKLQKQ

SEQ ID NO: 6645 - protein, 281 aa, Burkholderia sp. LMG 29321
MSIQLPDFLAWGAFNTLRHHMGAPLIDRFCPKRPIKEIELPLGERLKDGGVDVSVDQIEILDDRTLAYKGFRVLVYIRDVPNLGHREEMPRYHLAYCHTLEMMYRNKRSERYVVANSDSGLFQVNVIDGAVNSKLVALNVCQNCLAGISWKGFDMQQPRPHRLDLVSSFRLPEFFAKYPRDLMANKPGHTSDTAPLNDYPSGWTEISAQTKRNRGFCCGKCRTTLVQTDAKFLHVHHRNGQKNDNRDENLDVLCIGCHAEEPFHSHMKRLPDYKVFIERYR

SEQ ID NO: 6646 - protein, 550 aa, Serratia sp. 2880STDY5682895; identical to SEQ ID NO: 6184

SEQ ID NO: 6647 - protein, 205 aa, Serratia sp. 2880STDY5682895; identical to SEQ ID NO: 6185

SEQ ID NO: 6648 - protein, 363 aa, Serratia sp. 2880STDY5682895; identical to SEQ ID NO: 6186

SEQ ID NO: 6649 - DNA, 2115 bp, Xanthobacter autotrophicus Py2; identical to SEQ ID NO: 2

SEQ ID NO: 6650 - DNA, 891 bp, Xanthobacter autotrophicus Py2
atggccatcactgaagacaccgagcacgcagggtccgaggaaggtgagaactatttcatctccatgaccgacatgatggtcggggtgctgttcatcttcatcatcatgctcatggtgttcgccctggacttccgctccaagaccgacgtgcaggaggatgccatcgaggtggcccgcgaggtggcccgcaagctcgatgccatgagcgggcaggtgcgctcggccatcgccacggtggatgcctcccagcaggtgcgtcgccaactcttgcaggacatcgagagccagctccgcgcggaaggcctcaacgtgcagatcgacgagcagaacggcgtgctccgcctgaccgaggatgcggtacggttcgagccgagccggtcggatctcgccgggcgggcgcggtccaatgtggacaagatcgcccgggtcctcgaccgggtgcttcccgcctacaccgcctgccacgtggccgaaggtgcggcgggcggcacggcgtgccagccgggcgcgggtccctccctggagacggtctttatcgagggccacaccgacagcaccggcgaggacggcacgaactggcagctttccaccgagcgggcggtgaacacctatcgcgccatcgtcgcgggagcgccgcgcctgcgcggtcttcgcaacctgcgcggcgaggaaatcctgtcggtctccggctatgcctcgacccgccccatcgaccccaccgaaagccgggaggcctgggcccgcaaccgccgcatcgacctgcgcttcgtgatggaggtggacaaccggcggcgcctggaggagatccgcacgctcactgacgagatgaagcagcagatcgatcgcctcaccgccgccagcgccgcgcgggcgggcaagggcgcgccgtga

SEQ ID NO: 6651 - DNA, 1410 bp, Xanthobacter autotrophicus Py2
gtgaacgaggtccccacccgccttaaggacgcactgcgcgcggtggggcgcaggtccgcgccgacggctctccttcccagggaaccggcggtcgccagggcgctcgcgcggatcccggtcgacatgctcggcttttccgcgccggccaagggacggaactacaaccagatcgccgaggcgatcgcggcggcctgtcgcgccggccgtccgctggatcgcacggatctgcgggccgcgccctggtgcctgtggcagacccgcccggcgttggcgcaggacccggcctgcctcgaggcggtgctgggcgcggttgccgccagcccgcggcgccggtcgctcaggagcctggcctcggcctggatgatgagcttcgatccaggccagccgggcatggcggaggccgcccggctgctacgcaacagcgcgtcgttgatgggcagcccgtgggaccggctcgcggccacctacggcctgttccatgaggtcgaagggccgcgccgggtcgcggaggccgcgctctcgggacgggtgacccccgtggcggttctgaagcaaagcggcatcggcagcctcgacgcgaccagcggctatgccaaggcctgcctcgcgctgctgctcggcctgatcgagacgggacaggtgcgcgatgccatggaccggctgaagctggtgcgggatgtggccgtgcggccagacggtcggctggtgtttcaagaacttggaccccagacctgccgggctctgcttcgccccttccgggacgccatgccggaacgcgcggttcgcgatgcctatctcgacctgttgctgatgctgttcggcgatccccgcctgcgccccgccgcctgggcgcggatggtggaggagggcgagatggtccgtcgctggctgacggagcagtcgctgcgccagttcctcgacgtggcggaccgggcagctggcgcgcacgatttcggatccatgtggccggcccggcgccggttctgggaagcggtctatgacgcgggcctggtgagcgaggcgtgggtggtcttcggtccgttgggcctagatctggcgaagcggctcttcggcgagcacgccagcttcggccgcttctcgcacggcggcaggacgcaggtcgccacgggccacaccgtgcttctgctgcgcgtgggcctgcgtggtctggtggccgactggagcttcggcggcaagtgcaacatctggttcgactacgaggcgcccgacgcgccccggctctacaaggccaactactccaccgatgagcttggagtgcgggatccgggggcgggaggcgcgcagcaggaaaccgtgagcttcatgcacagcggcaactggcaggcccgagtcgccgacgagatccgcaaaatcaccggcgtccacattcctccctccagctatctctga

SEQ ID NO: 6652 - DNA, 2118 bp, Comamonas testosteroni
gtggtggatgcgcgcattggcacggagtttttcaagcacctgcccggcatcttgacgggcatcggcattatcggcacgttctttggtctgattttgggcttgcaggggtttgacttgtcggccttggaaaaggtggggggcgatgtcgccgatgcttcagcgcaagcggcgcagcagatcaccgagagcgtgggcaagctgctgacggatgtgaagtatgccttttacggctccatcgtttccatcatcgcgtcgattgtggtgacggcgctggagaagcagcgcctgaacgcctgttaccagcagttgggtgagctggtggaaaacattgatgggctgtttgacagtggggtgactgaggagtacctggccgagctggtgcaggccggggtagagagcgcgacccaaactcgccagctcaaagatagcctagtgacggacttgcgcgaaatgctgcaaaacctggtggacacgcaggtgcgcgagagcttgaagctggccgataccttgagtgtggcgtatcgcgattctggtcagcaactggccgagcaagtgagcggcgccattgtggggtcgctggctgagccgctgaagtccattgctggcgctgttcagcaggccagtggtgaccagagcagtcaggtgcaaggtttgctgcaggaagtgctgatggcctttatgagcaagctggaaaatacatttggccagcagttcagtggtttgagccagatgatggggcagtcggtgggggccatgcagtccatgcagcaaggctttaacgaactgttgatgaagctggaatctgctggtcaggccagcaccgatcacaacgccaaggctacggcgcaaatgctcagtgatatgcaggccgggcaaaacgccatgcaggctagtatgaatgaaatgctgggctcgttgcagcaggccgtggtggaaattggcaatgcagggcagggtggtgcagagcgcatggccaagcagttggaagcattgtttgcccaaagcgagcagcgtcagcaggtcatggcagagagtttgcaggcgtttgtagcctcggtgcagagttctgtgggccagggtcagcaggaaattctggaccgcttgggttctgcggtggaccgcctgagcgagcagctagagagcatgtttgcccaaacgggcgcgctgcaaaagcaggcgcaagaggattctaagcaaagcacgcgtgccgtgcatgccagcacacaggcagcgatggcagggattagtgagcaattgcagcaaattttcttacagtccggcactttgcaaaagcaggcacatgcggatgcagagcagagcgctcaggctgtacaggccagtgcgcaggccgctataggtggtttgagcagtcagttgcaaggtgtctttgagcagactgaggccctgcgcaagcaagcgcagactgatgcccgggaaactgctctggcgatgcagagcagtagccagcaagccgtggctgggctggagttgcaggtgcagactttgctaaaggcggtcgcgacgcaacacgatgctgtgcatgagcgtgctgttcagctgagtacccagacggctcagaatattcaacaaatgcagcagggtgcggacaagatgcgtctggctgctgagcgctttgatactgcgggggagggagtgaccaaagccggccaggccaccgttagtgcgatgggggcctttcagggaaccagcaatgcactggtaacggcgggacaagagttgagcagcgtggtcagtgattaccgaaaccaccgtgatgcagtaggcaagacattggcagtgctgcagaccgtgatggctagcacagaaggggaaagtgctgggcgccagcagtatttgcgtgatttgcaaacccatgcggagcggctgcaggtgatcaatcgcgatgcttcgaactatctggatcaggtcaatgaggttttggggcgtggttttggggaattctcagacaacatgaacagaaccctgaccaagaccatgggaagcctggacgccgagctgggcaaggccattacccagttgggtggtggtgtagaggtcgttcgcgacagccttgaacagttgagcgaggcgcttgatacggtgcgtcgcggtggatga

SEQ ID NO: 6653 - DNA, 747 bp, Comamonas testosteroni
atgttgcgtcatgcagtggcccgccgggccaaagaggaaggtgagaaaccgttctggatttcctatgccgacttgatgagcgccatgatggtgctgtttcttgtggtgatggtggtgtctattgtgatgttagtcatagcagttaagccaaaacctgctgatggtcccacccccgcgcaattgcgttacctcgccattcaggatatgtgcaaagacttacagcagaaagcgaatgcgctaaaccagaccattaaagtggaatgtagtgatcaccgcattgaattcggagaagcaggccgttttccgcacaacagctattcgctgaatccggaaggccgcaaggctttgcaggaggtggttccgctgattttgcaggctgctgacagtcaaaatgggaaagactggttcaagcaggtcgtgattgaagggtttaccgataccgagggctcatatttatacaacttgcacttgtctttgcagcgctcggaatgggtgatgtgcagcttgctggatgccagaagccctttgcagcacggtttgtccgaagcgcaccagcagcagattcgcaagcttttcttggcgggcggggtctctttcaataatcagaaaaaggacgcagccgccagccggcgcgtagagctgagcatgcagttctatggtctcgatgagaaagagaaaaatgccaggagcatttctgcgcattttgatacctcagtgcttgaaaaatgtcagctggagatgcgttga

SEQ ID NO: 6654 - DNA, 1728 bp, Comamonas testosteroni
atggctggtgttgaccacctgcgtgctctgctgaagaacgtgttgctgcgccaaggcggggacaatgcagtgaatgacacggagcctcactttgcgcaagtgcgcatggcagggcttgagttaaaggcaaagtttgatggcttggaggccgtcgttcctccacccgaggaaaagcggcgaagggctttgcagaagttttctcgtgcgctggatttgagccctgttgagtggcgctatgtctttgcgggcctgtcggatgacgatacagccggcggcacgctgctgcaaaacgatgacggctttcgccgtgtgcatgcggaggtggatagacggatttcgcagcagtgcctagttcggcgtgactggctggcgctgtgcttcagctatttttcctgtgctgaagaaaagcccgagctgaaccagaactggcagacattacgggcggatattgaccgtggttttgatgcggtatgtgcgagggagggcagagagaagacctggatgcaggtggtgcgggagcaccgtgatctgtttggtcagaagccgggtgagcggctggcagacgagatgctgggggggcgtgccaatgatttgagcaagctggagtcgattgcacaggtgtctggaaccagctggttatggcgcagcatttttgccgtggtgctatcccgtatcttcatgctggacgaggcgcagtttttattgcgtttgcctcagctgatcaaactcacagaaattaatcctttgcatgagagctcggttctcggagcttgcctgacacgctatgcccaaacgaagctgcgtgcagaacctcatgcggatttgctggatattgcgctggaacggtggggaaatcctcaggttcgtacgcgtcagaacttgtggcttcaccatgtcgatgagcctgtatgcaccatggcggtagcttggttggccaaacaggatttgaaccatttctttaccttgcttaaaggtgaagcgggagtggaccagtcgcgtctgttttactggttgcgctacgccgagcaaatgacttttacgcggattgtgctggggcgtgatgcgctgtatgaccgctctaccgattttgtggagttccgggcgaaaaatcggatgagattgagtaatttgggaaatgctacggctgctaataatgcagttattatgcaaattgggtcttactatttcgtggaattttcagcaacaggtaacgcttgctatgtgtatgaggttgataaggcgccgttcgatcccacgcagcgtgagctgtcattaacgctggatttgaagaggggcaccttgcgctggaagcatgctcctgctccatataagcaaggtgttgtggatggttggctgaatacctttgatggaaatatgcgtgctcttggcctttctatcaatgctcgtggagggctggcaagcttgccagtagcgcaagggcgtgagcgttttaatgtgcctgccaatggtggttctgaaatagttgctagtcctgttgctcaaaactcaggtctagccaataaaggggacacccaaagagctctggccataaaagagttgctgcgagcgcgtctgggggcgctgcaggtcgaggtgctcgaccaaagtcatcgtggtggaactttacaagttcagctgcttgaaatgcaccctcaaactgaccatgtgctgcgagcgctggggtttaagcccaagcattccaatcctctgatttactggaaaagctga

SEQ ID NO: 6655 - DNA, 3270 bp, Comamonas testosteroni
atgtttaagtcgatttggagcaagttcaaggcggtcgatgtacaagtcgatgggggggagtctgccttggtcgctcccgcttatgacgagcatggtttgtcttacgccattgaccaattggagagtaacgcaccctggcaacaaacatcttatttggagcagcttgaagaagaggactttgttacccgactgaatgaatgctggctattgccatgggattccctctatcaattgcagtcagacgaggaacacgcggcaagtgtgggtttgctgggagtgatgccttttgccagtcttcaacctcagttagcaagccatggaagcctggctgaggattcatttcgcattttcattaaaagctggttgcaagaagatgggcgtgaactgcatcagctggataggcgtggacctgtcgtagagttggataaaggcgccaagctattgcagcaggagacttggcagctgttatgcgccttgaaagatttggcgagggagcagcacgaatctcctggtatggcgaccaatcagctcggttgggccaaggtgcgcaagctggcgaaaaagtgcaatgcaggaatggatgaattcctggagaagacagtcgttttaaagccagagcgcttgaagctggggctgtcgaagcgcttggttggtggtacgcctgtgattgagctgcatccaacctttgaggaggagccaacggggtggactgatcactttgatggctatcaggctgtgcaaaacacctaccgcattgcgggtgatgatggttcgatcacgcatgtggtgatcccgccagaggtcaaggaagtgctggagcgggtcagactcttgccagggcgtcgtgtggctgcagatgatgctctgtcctttatacgtaacccctatacagtgattggtgaggccgcagatcaggtggttgacgaagtggagtatcagcaagagcgagaaaaggctggcatttactttcatcgctttcaagtcattccacaacttgcaggcgagggggctttgttgacagccgttcgtcttgtgctggagcctatctcccctgtgcctatggaggcagttgagattctgctgacgcatgcaggggagcttgctggctttgtgcgagagctggaagtgaagctggcagcggggctgccagcaggtttgtggcaggggtatgagctggagttgagtgattttgacttgcaccagtttcaaggccttaaggagttacttgactgctggaaagcggcggaggccggccagcagttcaagcaggttttggacctttctgcctacggggcgcgtgtcataggcattggtgaggcggagcgcattacctctccctttttggtgaaagatcaaacggaaaattggctccccgaggctatcaatccagacaaaggtgggcagtctatggaggcttcaggctgggagcctcgaagccaggagcagttcgatgcgtttgagcatgttctggaccaagcgcaagcggcggcggagccaacggttgtgctgccctggtctggtgagatgctgtctattgcgcaagcgcaggagctttacaactcttggaaaaagcgcctgaagcagacgaaagaggttaccgatgctggtgacggcaaagatgccgctggcaaggataagcgggctgtattgcagattgagctcaatattgatgatgccaactatgcgacggcgcgaaattcagcacttttaggtgctcataaggcgaaagcggatctgcccattttgctgaggccagagattgagttgcgtgaacatcagctcaagggtgtgagttggatgcagcacctgtttcaactttcaccacaacatgtgggtggctgcttgctggctgacgacatggggctggggaagacgattcagcttttgactttcatggttcggtacttagagctaaaccctgatggcccaccggtgctggtggtagctccggtgtcgttgctggacaactgggagcgtgaacttcagagatttttctacgccgatgagctcaaggtgctgaagctgtatgggactgcgcttgctgcggtgaaataccgtaaagaggaaattccgcaggatgtgcgtgcccagggcattagcaacttgctgcggcctgactggattgggcaaaaccgtgttgtgttgacgacctatgaaacgctgcgcgatcaggagttttcattggcccgtaaacaatgggccatcatggtttgtgacgaggcacagaaaatcaagaatcccgccgccatgattacgcaggccgcgaaggcgattcctacgcgttttcgggttgcttgtacgggaacccccgtagaaaacacgctcatggatttatggagtctttttgacttcattcagccggggctcttgggggcgctgaatcactttgggaaaacctaccagcgtcccattgaggctcacgagaagcgtgacgacaaggctttaagtcaattgagaagactgattgagccccagacattgcgcagaacgaagcaggatgtcgcgaaggacttgcctcaaaaactggaagatcagggttgcagatctttaaaaatggagagtttgcagcgtagtttgtatgtcgcatccatcaatgaataccgagagcgttgccagattcaggctcagatggagcagcgtgaaaatggcatgctgacgttgctgcatcgcctgaagatgctgtgcgcgcatccgtatggtgtgcagccagatattcgcttgaaagacagctcccccaaaatgatttggctcttggagcagttgcaaaaaataagtacgcatggtgacaaagtgattgtgttcactgagctgagggaggtgcagcgtgaaattcaacattccattgaacagcgcttcggatttaagccgacagtgatcaatggcgacacgagcaccaatggccaaagtgcaaatagtcgtcagcgcttgattgatcgctttcaagaagcttctggcttttccgtgatcattctttccacagtcgcggtggggtttggggtgaatgtgcaggccgctaaccatgtgattcatttcacacgctgctggaacccagccaaagaagatcaggctacagaccgggcgtatcgaattgggcaggaaaaggacgtctacgtgtactacccgaccattcgggatgcagaaatggtcacctttgaatcgacccttgatgatctcttgtccaagcgtcgatctttggctagagacatgttgcatggctcgtcagacatatcagcttcggactttgcatcgatgacgaggtcggcgggatag

SEQ ID NO: 6656 - DNA, 2127 bp, Pseudomonas aeruginosa PA7
atgatggatctgctgaaacacctgatccccgacttcgcccatatgttcagtgccaatcccaacggcatcagtgcctggttttggtctgcgacggcactgattttcggcttgtcgctttacttcctgtttgtgcacttccgccgttttcgtacccggctgcgtgccctgcgttctttgcttgaagggcaaagcaaggaaaccctggcactgagcaggcgcgaaaccatgcaaaaggcgcagggtttggatgcgcccaatgtcggcatgctgtggcgtgagttcgacgaaagtctggtgctgtcgtccgatcagaagcatctgttcaatacgctggatgccgagcatttcttcaatgccagaaccttggctcccggcctgacagctagccgcttgctggctgctgcaccgagcttcttggtggctatcggtgtgctcggcacattcgtgggcctgacggtggggctggaaggattggtcggcacctcggatgagatcgaggcactcaagggcggcatcaacaagctgatttccggtgctgccgtagctttcatgacgtcggtatggggggtgttcttcagcctattactgaactttgtcgaaaagatgttcgagcgttcagcgctgggccagatccaacagctgcagcacgatatcgacttcctctacccacgcatccccgccgagcagtcgctggtgcatatcgccgagtacggcaaggagagcaaggaagcgctgcaggagctgcacgagcgtattggcgatcgtctgcaggaaacgctcaatggcatgagcgaagcgatgcagacggcgctgaccgatgccctgaacaacataatggcgccagccattcagaccctggtcagcaccaccagccagcagtccacgcaggtgctggaaaagctggtgggtaatttcatggacggcatgacctctgtgggccgtgagcagggcttgcagatgcagcaggcggcggctgacgtgaacgctgccgtcagtggcatgagtgagcgcttgaaccaactgttcagcagcctgaatgaacagcagggtcgacagatggaagtggctcagcaacagagtgcggccttcgagacgcagctgcagcgcatcagtggttctgccgaagagcgccaggcacagatggagcaacgctttgctgagttgatgtcggggctgacgaaccagttgcagacccagttgggtaccgcccagcagcgcgacgaggagcgccaggtgctgttcgagcgcctgcttggccaggctagcagcagccagacggcaatgttggagcaattttccagctcaacccgcgagcagatgcaagcgatggctgaggcgggcaacgagcgccacagcaatctggagaaggtgttctctcgtttgatgatgaacctcaacacccagctcgattcgcaaatgggcgcggcagagcagcgtgagcaggcacgccaacagcgcttccaggagcagctcgatcaggtgtcgacccatcaacaggagctgctctccggtctggccagcgctgtgcaggcgacccagcagcaaagccgcctaatggcggatcagcatcaacagttgctgggccagctcaagcaggtctcggacgcaactgcgcagagcagcaagcatatggacagcagtgcgaatcagcttgggctgttgtccgcgaatctgcgtcaggccgctgattccttgggccaacggcttgaggcggttagtcatagtattgaaagagctggccagcagaacgccgagctcgcgacgcagttgcaaagccaggccgctaccttggcgcagctgcaggccaccttgctggagggtgcccagcgctttgagcaagcagccggcgaggcgcgtaacggctttggcgagatgaaatccgctcagcaggaatttctctctagtgtgcgccatgaattcaccgcgctgggagaaaagttgcgtgagcaggtcgaggcggtagagaagcaagccgaggaatggctgcgcagttatgccggcgaggtgcgtgtgcagactgatgagcgaatgaaccagtggaatgaggtatcgctgaagtatgccgatcagatgcaccgcgtcgtgcagaacatgagcagtattctggatgaactggaggcacgctga

SEQ ID NO: 6657 - DNA, 765 bp, Pseudomonas aeruginosa PA7
atgcgcctgggtaaatccaaggaagtgagcgtcgacgaagagaacccttactggatgtcattctcagacatcatgtcggcgctattggtgatcttcatcctggcttcggtgattctgatcctgcagttgatggaaattcagaaggagttgaaagagcgccaggtgcagtttgagcaagagctggtcgagctgaagaaagcagagcaggtgcgccgcaccattcttgatgaggccgtggaggccctgcgcaaacgcggcatcaaggtcgaggtgagcgagaaccatacggtcctgagtattcccaacgatctgctgggtttcgacacaggtgcctatgacattcatgccgcctatcaggcgcgtgcgctggagattggtaaggtcatcaatgaggtgatctcgcgagaggatcgagtcgagttcctcgatacgatcttcatcgaggggcatacggacaatcgtccgctccagggctttatgggcaaaggcaactgggggctgtcgacctttcgtgccatttctctctggcagttctgggggagcgcgctgtcccccgatgagcaactggcaaggctgaagaacaaggatggtaagccgctgttctcggtcagcggttacggcgaaacccgccccgtgttggttgaccagcagactgaggacgacttcaagcgcaatcgacgcatcgatatccgtttcaccattcgtcgtcccgacagcgctcagtacgagcaggttcgtgagcgtctggaggagctcaagccgtga

SEQ ID NO: 6658 - DNA, 1947 bp, Pseudomonas aeruginosa PA7
gtgctggtcgaaaaggtcgctcgaatgaaggccgcaagtggcaagagtgacgcctttgaagccatgttggcacgattgcgtgacatggcgagtacagggcgttttgacggcctgcctgagctgctaaaacgtcgtcttactgcgcgtgcgttgacctggttgtggctcaacgacgagaccatgggtaggcgtttgcttagttcgcgtctgctttcggtgctggtcgatgctcagcagccgaggctgacgcgtatcaccttacagcagttggctcagttctactttcgtcgcttcgacaagctggatgagcacgatgggctgcgtaagcagcttgagcagattttgctccagcaactgcatttactgcccgaacccaaagtaagtggcccccaggctgatccgctggtaacgctcaagcgtgatgctcattggttgttgccgcctgacgggccagtccaactggttgagcgggtacgcgacagtggccatgagctgggcgagacctttgaggtcatgggattgcagggctttgatgacgggcgttatggcgatatctgccgggcccacttctacctggaaaccctacgagggcttgcgcccggtgagtacgaccccgtgctggatgagctgcagaagcccgctgtgtccaaggctccgtacgagggcgagcgtcgtatcggccatgttgcgctggagattctgatcgatcgtgctggacaggagccgggtgaggtctggcagaactttattctgaatctggcgggggatccgcggatctcacgtaactcccccaattaccgcgagtggtggcagttcctcggtgaggagcgggtgcagaaggttcggggctggttgtccaaggaagatttgcggctgtttttgcaggcggtggaacagtttggaatcgaaacgcagaacgacgatctgcagcgcatgttccctgcacgcaagcagttcctagaggggctgtttaagctcaaactgatccgcaatacccgcttgctgcttggcgggcgggcacagcattcggtaaagcgcattctcggtaaagatgtgcaaaccagttttgccagcatggacgggcagatgaatgacaaggcggtcatctatctcgattgcggagactttcatctggtcgagggttcccacagttttaaaatctgggtctatctcgccgcgccgggagaggctttgcgttcctacgagcgctccagcttcagtcattccgatctgactacggctgttcctaaggcctacaagcgactgtatcctgagttgccctatgatgccttcacgcatcacccccctctttcctggcagaaccgggtattcagcttcctggctgataacggcatcgctctagatatcgagcagttgctcaatcgcagtgactaccagccttaccttcgtaaatttggtatgcctgtggtcaatgccaagcgaacacccgtgccgcctccaagtcagacagattttcccgcagagccggcgcgttcacgtgttggcaagactggcgcgacaacgatgtcagcgcctcaggggcgtaagcctgcagagatgattgcgagggactccagagctattcctagagaagaggcggccacagtacggcgaagcaaccagcagcatgatccggtagtgtcgcactccgtcagttcacctgatgcggctgctcctgcaacggcacgtccgtctctggtaggtgaaggattattgacaggcttgaaaccctctgcactgaagatactgcgctacttcgtggacaaccccggtgacaaagtccgatatgcagcgaatgttttcggtgtggactcgcgtgaaatcaatcagattttgtatggcccgttgaaggacatgtgcacgcgtgatgagcagttcggctggacggtgaatgaggcggcacgtctcgcgcttgaggcgttggatgaacaggacagggctgaataa

SEQ ID NO: 6659 - DNA, 3033 bp, Pseudomonas aeruginosa PA7
atggatatttttcggtcgctgattggtgagcgagacggggcgctcagtactcagcaaggctttcagtctcagcctgattccaatggcttgaatttctacctgcccttgccggccttcaaggcgctgcaaaccgggcagggcagtgctttagaaaagattcagctgatcgtgctcaacatgctggttgagcaagggattgccgaaaacacggccaacggttttcacatcggtgccgaagatattgcggggatggatcttgagcaggcggaaatcttgcgtttgccgagacgcttgccagggcactttctaacctcaatcagtgggcgcacgggcaacagtggttttcgtgtggcgatcacgctggaaatgccagacggccctgccagcttcagtcgcaaaggcccctatctgtacctgaccagcagtgagtgctattggctgacgccggctgaaattatggggttgcaggcttgggaactgcatgagtctttaggcccagaacagcgaggagaggcggctaatctgcgcctgatggccgagctgcagaccgctgcgcgcagcgggatgcgtattgatcttagccactttgagcggctagatgtggtggtgcctcagaacatcggagttatcgctacgcgtttaccagatggcagcctccaactctgcccgagccttggggatggctccagtgctgaccagctggaaaaacgctggtcgcagttggatatgaccgccgatggtggtgtgctgcgcatcgacaatcgtgtgttgctgctggatcaggcgcggatggatggcatccgcaatgtgctggccaacaaacgtatcccggctgatcaggtcaacgagtttattgccacgccaacggcgtttctcgatgctgcgctggtcaatcttgaggtgggcttttctgcccgggttgcgggtataggcaaacttcagcacatggatttcggtgtcctggatgcaaccaagaatgactggtttgcgcttgataagcgcccggcacctgcagcgatcctgagcaagctgattcagtctcctgaggatttgcagcgcttcgaggaggtactgcaggcggctaatgaacagggcgcgacgagtctgtcgtttgctggcgaggtgatcgatatctctgacgcgccgactgttcagcaagagctggccagggctcgccagaacatggctcatgtgagcgatagcgagccgcacagcgaggagggtgttctccctggggaggacaaggagaaagtcggggtcattctgaaggatgccgacgagattaattctgcgctgttgcgtaaggctgctgctgcgaagccgctggtggtgccagattggtcggcctatgcccgggagccgttccctcatcagcgtgaggggatcgagtggatgctgaagctgatgggcgcagcgttgcaggatgaaactgatgatctctatcgcctgcagggtggtttgcttgcagatgacatgggtctcggcaagacatacatgtcgctggtcgcagtcggggagtatctggccagtcagcgcgcggctgacaagccgcagaagccggttctggtggtggcgccactgagtctgctggaaaactgggaggatgaagtcggtaagaccttcgccagcatcccgttccgcgatgtggtggtgctgcagtcggggcggagtctgcgtgactatcgcgtcaaaggtgctgagcgtgaatcggtgcagttggcgtcgatgattgatgacagcagcggcatgatggatgagcagagcattcgctatgcactgcatgtggggccggaagcaggcgtgcatcgtctggacatggaccgtcgcttagtgctcacgacctatcagaccctgcgtgattatcagttctccctgtgccgaatcgactggggcatggtcatcttcgacgaggcgcagaacatcaagaatcccaatgcactgcagactattgccgctaaagggctcaaggcggatttcaaactgttggcgactggcacaccggtagaaaatagcctgggcgatttctggtgcctgatgcatacggtgcagcctggcttacttggtggctgggaaagcttccgcgatacctggatcaagccaattctggctgcaagcgatgaagagcgtgatgaggtacgggcgcgtttgggcgagcagctgcggcgtgctgtaggcatattcatgttgcggcgggttaaagaagatcagctcaaaggcctaccagccaagactattctcagtggtgtcgagcaagccgatcatggcctgcaacggtatgcagcgcagttgggtgtggtgatgaaaggcatccagttgcaggcctacgacgaagtcctcgacagctatcgggctcgtcgtgcaagcgctgaggatatgcgtggtaccgcactggcggctttgactcagcttcgctccatttccctgcacccacggctggagaatgagtcggcgctgtactgcgaggatggcaagcacgcgcgacaactgatgatggagtccggcaagctggcggtgctgctgcagttactcgatgagatccgtagcaagggtgaaaaggtcatcctgttcatgatgaccaagcgcctgcaacgagtcctcaagctctggctggatcagatctatgacctgaatgtagcggtgatcaatggtgacacccaggctgtggcgactcgcgccgaggatatgacgcgcaagaagctaattgccgagtttgaagcgaaaagtggcttcaacatcctgatcatgtcgccagtagccgctggtgtcggtttgacggtgattggggccaaccatgtggtgcatttagagcgtcattggaacccggctaaagaagcgcaagcgtctgatcgggtttaccggatcggccaaaccaagcccgtgttcatccatctgcctgccgtcactcacccccagtttgattccttcgatgtacaccttgaccgcttattgcgcggaaagctgatgcttaaagacgcggtagtgacaccagaggcggttagtgaaagtgagatgattcaatcgatggggctctga

SEQ ID NO: 6660 - DNA, 2127 bp, Pseudomonas aeruginosa PADK2_CF510
atgatggatctgctgaaacacctgatccccgatttcgcccatatgttcagtgccaatcccaacggcatcagtgcctggttttggtctgcgacggcactgattttcgtcctgtcgctgtactttctgtctgtgcactttcgccattttcgtacgcggctgcgtgccctgcgttctttgcttgatgggcaaagcaaggaaaccctggcgctcagccggcgcgaaaccatgcaaaaggcgcagggtttggatgcgcccaatgtcggcatgctgtggcgtgagttcgacgaaagcctggtgctgtcgtccgatcagaagcatctgttcaatacgctggatgccgagcatttcttcaatgccagaaccttggctcccggcctgacagccagccgcttgctggctgctgcaccgagtttcctggtggccatcggtgtgctcggcacattcgtgggcctgacggtgggcctggaaggattggtgggcacctcggatgagatcgagtcgctcaagggcggcatcaacaagctgatttccggtgctgccgtagccttcatgacgtcggtatggggtgtgttcttcagcttgttgctgaacttcctagaaaagatgttcgagcgcaacgcgctgaatgctattcagaagctgcagcacgatatcgactccctctatacgcgcacccccgcagagcaatcgctggtgcttatcgccgagtatggcaaggagagcaaggaagcgctgcaggagctgcacgagcgtattggcgatcgtctgcaggaaacgctcaatggcatgagcgaagcgatgcagacggcgctgaccgatgcgttgaacaacatcatggcgccagccattcagactctggtcagcaccaccagccagcagtccacgcaggtgctggaaaagctggtgggtaatttcatggatggcatgacctctgtcggccgtgagcagggcttgcagatgcagcaggcggcggctgacgtgaacgctgcagtcagtggcatgagtgagcgcctgaaccaattgttcagcagcctgaatgaacagcagggtcgacagatggaggtggctcagcaacagagtgcagccttcgaaacgcagctgcagcgtatcagcggttctgccgaggaacgccaggcgcagatggagcagcgctttgccgagttgatgtcggggctgacgaaccagttgcagacccagttgggtaccgcccagcagcgcgacgaggagcgccaggtgctgttcgagcgcctgcttggccaggctagcagcagccagacggcgatgttggagcaattttccagctcaacccgcgagcagatgcaagcgatggctgaggcgggcaacgagcgccacagcaatctggagaaggtgttctctcgtttgatgatgaacctcaacacccagctcgattcgcaaatgggcgcggcagagcagcgtgagcaggcacgccaacagcgcttccaggagcagctcgaccaggtgtcgacccatcaacaggaactgctctcaggtctggccagcgctgtgcaggcgacccagcagcaaagccgcctaatggcggatcagcatcaacagttgctgggccagctcaagcaggtatcggaagcgactgcacaaagcagcaaacatctggacagcagtgcgaatcagcttgggcttctatccgcgaatctgcgccaggccgccgataccttggggcagcgactcgaggccgttactcatggtgtcgagaaagctggccaacagaatgccgagctcgcggcgcagttacaaagccaggcctctaccctggcgcagctgcaggccacgttgctggagggggcgcagcgtttcgagcaagcagcaggtgaggcgcgtaatggctttggagagatgaaatccgctcagcaggagtttctctctggtgtgcgtcatgaattcaccgcgctgggcgaaaagctgcgtgagcaggtcgaggcggtagagaagcaagccgaggaatggctgcgcagctatgccggcgaagtccggacgcaaatcgatgaccgcatgaacaagtggaacgaggtgtcgctcagctacgccgaccagatgcatcgaacggtgcaagccctgagcagcattctggatgagctggaggcacgctga

SEQ ID NO: 6661 - DNA, 765 bp, Pseudomonas aeruginosa PADK2_CF510
atgcgcctgggtaaatccaaggaagtgagcgtcgacgaagagaacccttattggatgtccttctcggacatcatgtcggcgttgctggtgatcttcattctggcttcggtgattctgatcctgcagttgatggaaattcagaaggagctgaaagagcggcaggtgcagttcgagcaggaactggtcgagctgaaaaaagcagagcaggtgcgccgcaccattcttgatgaggccgtagaggctctgcgcgagcgcggcatcaaagtcgaggtgagcgagaaccatacggtcctgagtattcccaacgatctgctgggtttcgacaccggtgcctatgacattcatgccgcctatcaggcgcgcgctctggagatcggcaaggtcatcaatgaggtgatctcgcgagaggatcgagtcgagttcctcgatacgatcttcatcgaggggcatacggacaatcgtccgctccagggctttatgggcaaaggcaactgggggctttcaaccttccgtgccatttctctctggcagttctgggggagcgcgctgtccgccgaagagcaattggcgcggctgaagaacaaggatggcaagcccctgttctcggtcagcggttacggcgaaacccgtcccgttttggttgatcagcagactgaggatgacttcaagcgcaatcgacgcatcgacatccgcttcaccattcgtcgtcccgacagtgctcagtacgagcaggtgcgtgagcgcctggaggaggtcaagccgtga

SEQ ID NO: 6662 - DNA, 2013 bp, Pseudomonas aeruginosa PADK2_CF510
gtgaagctgcctcctgttcacatgccggtcgctgaatggcctgctacgacaatagagcattggcagatcctgatcgagaagggggcaaggatggttactgaggctgggcagggggatgcgttcgaggcgatgcttgagctgctccgcaggatggccaacaccggtcgctttgaaggtttgcccgctttgcttacacgccggctcactgcgcgtgcgctgacctggttgtggcttaacgacgatgccgtgggcaggcgtttgctcagttcacgcatgctctcggtgctgatcgatgctcagcagccgcggttcacacggatcaccctgcagcagctggcgcagttttactttcgtcgtttcgacgaactggatgagcacgaggggctgcgtgagcagcttgagcaggttttgcttcagcagctgcagctcttgcctgaccccaaggtgactggcccgcaggttgatcccttggtaaccctcaagcgtgatggtcattggttgttaccgctggacggaccggtgcaactggttggacgggtgcgcgaccgtggtcatgagctgggcgctacctttgaggtcatgggattgcagggctttgatgacgggcgttatggcgatatctgccgagctcacttttatttggaaaccctgcgtgagctttctcccggtgaatacgaccctgtgctggatgagctgcagaagcccgctgtgtccaaggcaccgtacgagggcgagcgtcgtatcggccatattgcgctggagattctgatcgatcgtgctggacaggagccgggtgaggtctggcagaactttattctcaatctggcgggggatccgcggatctcacgtaactcccccaattaccgcgagtggtggcagttcctcggtgaggagcgggtgcagaaggttcggggctggttgtccaaggaagatttgcggctgtttttgcaggcggtggaacagtttggaatcgaaacgcagaacgacgatctgcagcgcatgttccctgcacgcaagcagttcctagaggggctgtttaagctcaaactgatccgcaatacccgcttgctgcttggcgggcgggcacagcattcggtaaagcgcattctcggtaaagatgtgcaaaccagttttgccagcatggacgggcagatgaatgacaaggcggtcatctatctcgattgcggagactttcatctggtcgagggttcccacagttttaaaatctgggtctatctcgccgcgccgggggaggctttgcgttcctacgagcgctccagcttcagtcattccgatctgactacggctgttcctaaggcctacaagcgactgtatcctgagttgccctatgatgccttcacgcatcacccccctctttcctggcagaaccgggtattcagcttcctggctgataacggcatcgctctagatatcgagcagttgctcaatcgcagtgactaccagccttaccttcgtaaatttggtatgcctgtggtcaatgccaagcgaacacccgtgccgcctccaagtcagacagattttcccgcagagccggcgcgttcacgtgttggcaagactggcgcgacaacgatgtcagcgcctcaggggcgtaagcctgcagagatgattgcgagggactccagagctattcctagagaagaggcggccacagtacggcgaggcaaccagcagcatgatccggtagtgtcgcactccgtcagttcacctgatgcggctgctcctgcaacggcacgtccgtctctggtcggtgaaggattattgacaggcttgaaaccctctgcactaaagatattgcgctacttcgtggacaaccccggtgacaaagtccgatatgcagcgaatgttttcggtgtggactcgcgtgaaatcaatcagattttgtatggcccgttgaaggacatgtgcacgcgtgatgagcagttcggctggacggtgaatgaggcggcacgtctcgcgcttgaggcgttggatgaacaggacaggactgaataa

SEQ ID NO: 6663 - DNA, 3042 bp, Pseudomonas aeruginosa PADK2_CF510
atgagcttgatggatatttttcggtcgctgattggtgagcgagacggggcgctcagtactcagcaaggctttcagtctcagcctgattccaatggcttgaatttctacctgcccttgccggccttcaaggcgctgcaaaccgggcagggcagtgctttagaaaagattcagctgatcgtgctcaacatgctggctgagcaagggattgccgaaaatacggccaacggttttcacatcggtgcagaagatatcgccgggatggatttggagcaggccgagatcctgcgcttgccaagacgtctgcccggacgctttctcacttcgattagcgggcgcacgggcaacagtggttttcgtgtggcgatcatgctggaaatgccagacggccctgccagcttcagtcgcaaaggcccctatctgtacctgaccagcagtgagtgctattggctgacgccggctgaaatgatggggttgcaggcttgggagcggcacgagtctttaggcccagagcagcgaggagaggcggcaaatctacgcctgatggccgagctgcagaccgccgcgcgcagcgggatgcgtattgatcttcgccactttgaacggctggatgtggtggtgcctcagaacatcggggttatcgctacgcgtttaccagacggcagcctccaactctgcccgagcctgggggatggttccagtgctgaccagctggaaaaacgctggtcgcagttggatatgactgccgatggcggtgtgctgcgcatcgataatcgcgtactgctgcttgatcaggcgcggatggatggcatccgcaatgtgctagctaacaaacgtatcccggctgatcaggtcaacgagtttatagccacgccaacggcgtttctcgatgctgcgctggtcaatcttgaggttggcttctctacccgggttgcgggtattggcaaacttcagcacatggatttcggtgtgctggatgcaaccaagaatgactggtttgcgctggataagcgcccggcacctgcagcgatcctgagcaagctgattcaatcccccgaggacttgcagcgcttcgaggaggtactgcaggcggctaatgaacagggcgcgacgagtctgtcgtttgctggcgaggtgatcgatatctcggacgcgccgactgttcagcaagagctggccagggctcgccagaacatggctcctgtgagcgatagcgagccgcacagcgaggcggatgttctccagggggaggacaaggagaaagtcggggtcattctcaaggatgccgacgagattaattctgcgctgttgcgtaaggctgctgctgcgaagccgctggtggtgccagattggtcggcctatgcccgggagccgtttcctcatcagcgtgaggggatcgagtggatgctgaagctgatgggcgcagcgttgcaggatgaaactgatgatctctatcgcctgcagggtggtctgcttgcagatgacatgggcctcggcaagacatacatgtcgctggtcgcagtcggcgagtatctggccagtcagcgcgcggctgacaagccgcagaagccggttctggtggtggcgccactgagtctgctggaaaactgggaggatgaagtcggtaagaccttcgccagcattccgttccgcgatgtggtggtgctgcagtcggggcggagtctgcgtgactatcgtgtcaaaggtgctgagcgtgaatcggtgcagttggcgtcgatgattgatgacagcagcggcatgctggatgagcagagcattcgctatgcactgcatgtggggccggaagcaggcgtgcatcgtctggacatggaccgtcgcttagtgctcacgacctatcagaccctgcgtgattatcagttctccctgtgccgaatcgactggggcatggtcatcttcgacgaggctcagaacatcaagaaccccaatgcgctgcagactattgccgctaaagggctcaaggcggatttcaaactgttggcgactggcacaccggtagaaaatagcctgggcgatttctggtgcctgatgcatacggtgcagcctggcttacttggtggctgggaaagcttccgcgatacctggatcaagccaattctggctgcaagcgatgaagagcgtgatggggtacgggcgcgtttgggcgagcagctgcggcgtgctgtaggcatattcatgttgcggcgggttaaagaagatcagctcaaaggcctgccagccaagactattctcagtggtgtcgagcaagccgatcatggcctgcaacggtatgcggcgcagttgggtgtggtgatgaaaggcatccagttgcaggcctacgacgaagtcctcgacagctatcgggctcgtcgtgcaagcgctgaggatatgcgtggcaccgcactggcggctttgactcagcttcgctccatttccctgcacccacggctggagaatgagtcggcgctgtacagcgaggatggcaagcaggcgcgacaactgatgatagagtccggcaagctggcggtgctgctgcagttactcgatgagatccatagcaagggtgaaaaggtcatcctgttcatgatgaccaagcgcctgcaacgagtcctcaagctctggctggatcagatctatgacctgaatgtagcggtgatcaatggcgacacccaggctgtggcgactcgcgccgaggatatgacgcgcaagaagctaattgccgagtttgaagcgaaaagtggcttcaacatcctgatcatgtcgccagtagccgctggtgtcggtttgacggtgattggggccaaccatgtggtgcatttagagcgtcattggaacccggctaaagaagcgcaagcgtctgatcgggtttaccggatcggccaaaccaagccggtgttcatccatctgcctgccgtcactcacccccagtttgattcattcgatgtgcaccttgaccgcttattgcgcggaaagctgatgcttaaagacgcggtagtgacaccagaggcggttagtgaaagtgagatgatgcaatcgatggggctctga

SEQ ID NO: 6664 - DNA, 2196 bp, Pseudomonas aeruginosa ATCC 700888
atggactattcgaagtggttggacctttgggataaggcaacacccgagcagctgattgctcccgtgttcgtatttagtctggtgacggtgctgtgcctttggtatttgctgcgttacttcgtgcgctcatttgcattgagtcggcgcttgaagaagctcacgcggcaggtgcgggcaatcaaggagctgccgccggccaagcgccgtagcgagctggagcagctgttccaggagcatacgctggggcatgcctggcaggagtatgccgagacgctgcatgaccagttcgaggtgcgcgagggtgagcagcgcatgctgtgctcccgtgctacggcgggcgcggggcatttcttcaccgcacaaacggtggtggagacaccgctggggaccgagttttacaagcacttgccgggcatcctgacggggatcgggattgtcggcaccttcttcggcttgatgctgggcctgcagcacttcgaccccagcactcccgagcaggtcagctccagcgtcgatcagttgctcaaggacgtgctatttgccttcctcggctccttcttctcgatcttcgcctctattggcgtgaccctgaccgagaagtggcgtttgggccgctgctacaagcacctggaaaccctgactgagagtatcgatgggttgttcgacagtggcgtgggtgaggagtacctggcggagctggtgaagtcgagcaatgagagctcgatccaaacccgtcagctcaaggacagcctggttaccgacctgcgcgagatgctgcagaacctagtagatacccaggtgcgtgagaacctcaagttggctgataccctttcggcaagttaccgcgactctggtcaggtgctggccgagcggattggcggtgccatcgaaaacagcctcaagtctcccttggaggccatcgccggagctgtgaatactgccagtggcgaccagagcaaccaggtgcagagcctactcaccgatgtgctcacagcctttatgagcaagctggagagtacctttggccagcagttcaacggtttgcacgagatgctggggcagtcggtagcggccatgcagtccatgcagcacggcttcaatgaactggtcggcgacatgcgctcggccagcgaggcttcatcgcagaacagcgccaagatgatcgcgcagctgctggctgatatgcaggccgggcaaaacagcatgcaggccgggatgaacgagatgctggccaatctgcaggcgtccatcgcgcgtatcggcagtgaaggtgagggagctggtgagcggatggccaagcagttggagaagctgttcgccgatagcgaagcgcgtcagcaagccatggcggcaaatctgcaggcctttgtcgaatccatgcagcagagcatgggccagggccagcaggagaccatggccaagatcgccagctcggtggatgtgctgggcgagcagttgggcggcctgttcaagcagcttgagcataaccgtacgcagatggaccaggccagcaaggtcgcccaggtcgaactgcaccgtggtacgcgcgagatggttggcgggctggaagagcaggtgaaaaccctgctggatgccgtcgccgatcagcaaggcgcgatgcaggacagcctcaaactgcttggagcgcaaaccgagcaacacctgcagagcatgcaacaaggcgccgagaagatgcgcctggcagccgagcgcttcgacagcgccgggcagagcgtgagtaaagccggcgaggcgactgcgggcgtgctgggcgcgctgcagggcacgagcagcgatcttgtcggcgcttcccgcgaactgaccagtgtggtggccgactatcgcaataaccgtgaagcactgaatcagacgcttggggtcattcaaggtgtggtcgccactactcagggtgagtccgcggggcgtagtcagtacctgcaggatctgaagcagcaaggtgagcggctgcaggcgctcaatcgtgaagtgaacgactacctggagcagatcagcgcagtgctgggcaagggcttcaacgagtttagcgagggggtagatcgtagcctgcggcagacgctgggtagtctggatgccgagctgcacaaggcgatgaccagcctggccggtggtgtcgagggggtcaaggaaagcctggaagacttcagtgacatcatggagcgcgttcagcgccgctga

SEQ ID NO: 6665 - DNA, 738 bp, Pseudomonas aeruginosa ATCC 700888
atgttcggcaaatcagccgctcccgctcgggcgcgtgacgagggcgagaagcctttctggatttcattcgccgacctgatgacggcgatgatgatcttgtttttggtggtgatggtggcctcgctgagctcggtgacgcagcgcattcagcaggctgaacaaggtgagaaacagcgcggcaaggacatcgctaagctctgccatgatctcagactgagggcgggggatcttaactccaccatcgtggtggactgccgggataaccgcattagcttcggtgaggctgggcgcttcggccacaatcaatacttcctcaacagccaggggcagcaggccctgcaggatgttgtgccgttgatcttggatgctgctgacagcgaagagggacgcaagtggctcaagcaggtggtgatcgagggcttcaccgatacggacggttcctacctgtacaacctgcacctctcgctgcagcgctcggagtgggtgatgtgcagtctgctcgatagccgcagcccagtgcagaaagggctttcagctgagcgtcaacagcagattcgctccatgtttctggctggcggtgtgtcgttcaacaatgccaaggagagcaaggaggagagtcggcgggtggagctgcgcatgcagttcttcgggctcaaggaccaggagcatgaaggtcaggaaccggcgcttgagtttgcttacgcggcaaacgagaaatgccagttggagatgcgctag

SEQ ID NO: 6666 - DNA, 1587 bp, Pseudomonas aeruginosa ATCC 700888
ttggtggcgctgaaacgcgccagtactgagctttctcggcgctttgatcaggtcgaaaaagccctggcaccgccccgtgagaaacgcttgctggcacttggcaagttcaagcgcgagcaggcgctgacttcatcagagtggcgcctggttttcgccgggctggccgatgacgatgaagtcagtgttccggtgctggaagacgatcagctgtttgaccgtgttcatcgggaggtggctggccgtatcgagcagcggtcacttagccgccgcgactggctggcgctgtgtttcagctactttgcctacgatgagcacaagcccgacgacaacgcgaactggcgggtgctgcgtgacgatattgatcgcggcttcgatgctgtcaggcagcgtattggtcgcgagaaagagtggatgcgcattgtagccgagcatcgcgaactgttcggcgctcaggctggggcccgtctggcggaggagatatttgagggcagggcgcgtgacctttcctctctgcaggccattgcccaggtgccggatggtagttggttgtggcagcggatatttgcggttctgctttcgcgcattttcctgctggatgacgaaaccttcctaaagcgcctacgggagttggtagctctggggcaactgaatacgcgctatctcaatcaggtgctaagtgcctgccttactcgttatcaccgttcgcgatatcgcgaacagtcgtcctcgctactcaagcaggttgcgttggagcactggggcagcccacagatgcgttccaagcagaacgcctggttgcagtatgtggagcagcctgtctgcgccatggtggtggcctggttcgccaaggaagatctggaacacttcttcaccttgctcaagggcgaggcggaggtcgaccagtcgcgcctgttctactggctgcgattcaccaatcaaatgagctacacgcggattgtgatgggcagcgatgcctggcatgaccggagtagtgatttcgtggccttccgtgagaagaacaaaggacgcttgagtcagctaaccggagggtcaagccacatcaatgcggttgtgatgcagatcggtaactacttctttgttgagttttcaggtacgggccatgcctgctacgtctaccgggcggataggttgccatttaaccctgatcagcaagtgcttggtctgaatacagagctaaagcagaagggccataagcccgcgcctatgcggcactcacctgcgcccaggcgtcctaatgtggtcgaaggatggctggagaagtttgatgacgagctccgggcgctgggaatcgtcgcgcagcgtccagcttcatatacgcaaccccgcggttccgaagacaaacccgccgcccatagtgctgcgtctgcatccgtcgcgggtgattcgctggatgtgcaggttaagtcgatgttgggcagtgtgccctataagacgttcgatcaccgctcgaccagcggggtctaccaggttttgcttgccagggatgatgcggctgccaaaacagcgttgctgcgcctcggcttcaaggctgtgaaaaacaatgcactcatgttctggaggctttga

SEQ ID NO: 6667 - DNA, 3252 bp, Pseudomonas aeruginosa ATCC 700888
atgctcggccgatttttttccgggaaggatcgttctcagcccaccaagggggcggtgcctggtgcttaccagattgaagaagaaggtctttgttatgccttgagtctggccgatgacgatgcaagctggcccgttgctgcctacctggaccagctctttgaagaggactatgccagccagttgagtgatcgctggctgttgccttgggagtcgatctatcagctcttggatgatccagagcacgctagcagccttcctttacttggcttgcccgcgattgccaatctgcaaccgcagttggccagtaccggcggattgtcggatccagatttcaaggtatttatccggtcctggcgcaatccgcagacgggcaacctgattactttcgagcgtgttggcgccgtggcgcgctatgccgagaccactgagctgctgtcgcgggcggtctgggagctgttgaaggcgattcgggatctgcatgccactcagcagcaggcccctggagaagtcgccaaccagatcggttgggccaatatccgtaaattggccaaacgggctggtgcggggctggacgggttcctcgacaagaccgtggtggtcaaacccgagcacttgaggctgaagccgcgtaaggcagttgtcgccggtacgccgattatcgagttggatgtcgcgtttgatgggcagcctgacaattggttggccagtttcgatggttacaagcaggtgcaggataagtacagggtgccgggtgccgatggaacggtgacgcacgtgctgattgagccggatgtaaaggcggtgcttgaatctgttcgcgcgttaccggggcggcgggtagccggtgatgaagcgctgtcactggtgcgcaacccctacagcgtgatcggggatgcggccgagaaggttgttgatgcggacgagtatgaggagcagctggctgacgcgggcatctacttccatcgttttcgcctggaaccttgtctaggcgaagacggcaaacatattcagtcgattggtctgttccttgagccaatctcgtccaagccgctacccgaaattgagctgcgcttcgattttgcccatgagttcgcaccattcgtgaatgagctgcagatgaagttggcagctggtatgcccgcgggattctggcagggctatgagctggagctgagtgacttcgatctcgcgcaattggcaggggtcaatgagcttttgcgccactggcagcgccaggaggctgggcagacattcgaggcggtgctggatttggcctcgtatggtgatcgcgtcgtcggcattggtgaggcggagcgcattacatccccatttttggtgaaagaggcaacggaaaactggttgccggcggatgtgaaagagcttggggtggatagcgaactgctcagccagtgggatcctgccagccgcgaagattttgaagagtttgagcaccgcatcgaccaggcgcgtatggcgggtgatgaacaggtatgtctaccgggtactgaaaccccgctacctttccaggtcgcggagcagctttatgaagcctggtcgaagaagcttaatccggtcgagccaaaaccacctgtagtgactgagcccgtcgctggtcgtgcggtgctgcatatcgagcacaacattgaggaagcgacctatgcccagcgccgtgaggcggctctgctggcagggcggcatgccaacgcggatattccagaactgcttcgccccgaagttcaactgcgcgatcatcaaatgaaaggtgtggcgtggatgcagcacctgtttggcttatcacccgatcatgtcgcgggttgcttgcttgccgatgacatgggcttgggtaagaccattcaactgctgaccttcgttgtttggtacttggagcagaatcctcagggtaaaccggtcttgattgttgcccccgtttccctgttggataactgggagcgtgagctgcagcgattcttctatgcggatgcattgccggtattgaagctttatggcggcgcgctcagcgctgtgaagttcaagaaggatgagattcccggggatctgcaggccaaggggataaaaaatcttctgcggccgggttggatgggcgatgctcgtatcgtgctgaccacctatgaaaccttgcgtgatcaggaactctccttggcacggcagcagtgggccatcgtgatctgcgacgaggcgcagaagatcaagaacccggcggcgctgatcacgcaagcggcgaaagcaatcccctctcgattccgtatcgcctgcacgggtacgccggttgagaacacgctgatcgatttgtggtgtcttttcgactttattcagccgggcttcctgggagggctaaaccagttcggtcgggagtatcaacgccccattgaagcaggcttggagcgcgatacagcagcgcttgaacgcctgcgtgggcttatcgaaccccagacattacggcgtaccaagcaggatgtggcgaaggatctcccggccaaaatcgaggaccaggggtgccgcaaactgctgatgcacacgttgcagcgcaatctctatttgtccgaggttgcccagtacacacagaagcagcagatgcaggagcaattggagcagcgagagagcggcatgctcggcctgctgcacaagctcaagttggtgtgcgcccacccgttcagcgtacagcctgacccacgcttgagggagcactcgccgaagcttcaatggctcttaagcacgctggataacattgcgcgttcggacagcggcgataaggtcatccttttcaccgagttgcgggacatccaacgtgaattgcagcatgcgattcaggagcgcttcggcttcaaacccacggtaatcaatggcgataccagcaccagcagccagagtgcacagagccggcagcgactgatcgaccgttttcaagggcagcctggcttctcggtgataatcctctccactgttgcggttggattcggtgtgaacgtgcaggcagccaaccacgttatccatttcactcgctgctggaatccggccaaagaggatcaggcaaccgatcgcgcttaccggattgggcaggagaaggacgtgtacgtctattacccgaccgtacgtgatgcggggatgcctacatttgaggcgacgctggatgagctgctacagaagcgacgcgcgttggcgcgggatatgctgcatggggcatctgagcttcaggtatctgagtttggggaactgttaagggcgcaaggatga

SEQ ID NO: 6668 - DNA, 2196 bp, Pseudomonas aeruginosa E2
atggactattcgaagtggttggacctttgggataaggcaacacccgagcaactgattgctcctgtgtttgtgtttagcctggtgacggtgctgtgcctttggtacttgctgcgttacttcctgcgctcatttgcactgagcctgcgattgaaaaagctcacgcggcaggtgcgtgcaatcaaggaactacagccggccaagcgccgtagcgagctggagcagttgttccaggagcacacgctggggcatgcctggcaggagtatgccgagacgctgcatgaccagttcgaggtgcgcgagggtgagcagcgcttgctgtgctcccgtgccacggcgggcgcgggacattttttcaccgcgcaaacggtggtggagacgccgctgggaaccgagttttacaagcacctgccgggcatcctgacggggatcgggattgtcggcaccttcttcggcttgatgctgggcctgcagcactttgaccccagcacacccgagcaggtcagctccagcgtcgatcagctgctcaaagatgtgctgtttgccttcctcggttccttcttctcgatcttcgcttcgattggcgtgaccttgactgagaagtggcgcctgggccgctgttacaagcacctggaggccctgacggaaagtatcgacggcctgttcggcagcggggtaggtgaggagtatctggcagaactggtgaagtctagcaacgagagctcgatccagacccgtcagctcaaggacagtctggttaccgacctgcgcgagatgctgcagaacctggtggatacccaggtgcgtgagaatctcaagttggcagataccctttcggcaagttaccgcgactctggtcaggtgctggccgagcagattggcggtgccatcgaaaacagcctgaagtctcccctggaggccatcgccggagccgtgaataccgccagtggcgaccagagcaaccaggtgcagagcctactcaccgatgtgctcacagcctttatgagcaagctggagagtacctttggccagcagttcaacggtttgcacgagatgctggggcagtcggtagcggccatgcaatccatgcaacagggcttcaatgaactggtcggcgacatgcgctcggccagcgaggcttcatcgcagaacagcgccaagatgatcacgcagctgctggccgatatgcaggccgggcaaaacagcatgcaggccgggatgaacgagatgctggccaatctgcagacgtccatcgcgcgtatcggcagtgaaggtgagggggctggtgagcggatggccaagcagttggagaagctgttcgccgatagcgaagcgcgtcagcaagccatggcggcaaatctgcaggcctttgtcgaatccatgcagcagagcatgggccagggccagcaggagaccatggccaagatcgccaactcggtggatgtgctgggcgagcagttgggcggcctgttcaagcagcttgagcataaccgtacgcagatggaccaggccagcaaggtcgcccaggtcgaactgcaccgtggtacgcgcgagatggttggcgggctggaagagcaggtgaaaaccctgctggatgccgtcgccgatcagcaaggcgcgatgcaggacagcctcaaactgctgggagcgcaaaccgagcaacacctgcagagcatgcaacaaggcgccgagaagatgcgcctggcagccgagcgcttcgacagcgccggacagagcgtgagtaaagccggcgaggcgactgcgggcgtgctgggtgcgctgcagggcacgagcggcgatctggtcggcgcttcccgcgagctgaccagtgtggtggccgactatcgcaataaccgtgaagctctgaatcagacgcttgctgtcattcaaggtgtggtcgccactactcagggtgagtccgcggggcgtagccaatacttgcaggatctgaagcagcaaggcgagcggctgcaggcgctcaatcgtgaagtgaacgactacctggagcagatcagcgcagtgctgggcaagggcttcaacgagtttagcgagggggtagatcgtagcctgcggcagacactgggtagcctggatgccgagctgcacaaggcgatgaccagcctggccggtggtgtcgaaggggttaaggaaagcctggaagacttcagtgacatcatggagcgcgttcagcgccgctga

SEQ ID NO: 6669 - DNA, 738 bp, Pseudomonas aeruginosa E2
atgttcggcaaatcagccgcccccgctcgggcgcgtgacgagggcgagaaacccttctggatttcattcgccgacctgatgacggcgatgatgatcttgtttctggtggtgatggtggcctcgctaagctcggtgacgcagcgcattcagcaggctgaacaaggggagaaacagcgtggcaaggacattgctaagctctgccaggacctcaagctgagagcgggggatcttaactccaccatcgtggtggactgccgggataaccgcattagcttcggtgaggctgggcgcttcggccacaatcaatacttcctcaacagccaggggcaacaggccctgcaggatgttgtgccgttgatcttggatgccgctgacagcgaagaggggcgcaagtggctcaagcaggtggtgatcgagggcttcaccgatacggacggctcttacctgtacaacctgcacctctcgctgcagcgctcggagtgggtgatgtgcagtctgctcgatagccgcagcccggtgcagaaaggcctttcagctgagcgtcaacagcagattcgctccatgtttctggctggcggtgtgtcgttcaacaatgccaaggagagcaaggaggagagtcggcgggtggagctgcgcatgcagttcttcgggctcaaggaccaggggcatgaaggtcaggaaccggcgcttgagtttgcttacgcggcaaacgagaaatgccagttggagatgcgctag

SEQ ID NO: 6670 - DNA, 1587 bp, Pseudomonas aeruginosa E2
ttgccctcgctgaagcgcgccagcaccgagctttctcggcgctttgatcaggtcgaaaaagccctggcaccgccccgtgagaaacgcttgctggcacttggcaagttcaagcgcgagcaggcgctgacttcatcggagtggcgcctggttttcgccgggctggccgatgacgatgaagtcagtgtcccggtgctggaagacgatcagctgtttgaccgtgttcatcgagaggtggctggccgcatcgagcagcggtcactcagccgccgcgactggttggcgctgtgtttcagctactttgcctacgatgagcacaagcccgacgacaacgtgaactggcgggtgctgcgtggcgatattgatcgtggcttcgatgctgtcaggcagcgtattggtcgcgagaaagagtggatgcgcattgtagctgagcatcgcgaactgttcggagctcaggctggaactcgtctggcggaggagatattcgagggcagggcgcgtgacctttcctctctgcaggccattgcccaggtgccggatggtagttggttgtggcagcggatttttgcggttctgctctcacgcattttcctgctggatgacgaaaccttcctaaagcgcctgccggagttggtagctctggggcagctgaatacgcgctatctcaatcgggtgctgagtgcctgcctgactcgttatcaccgttcgcgatatcgcgagcagtcgtcctcgctactcaagcaagctgcgttggagcactggggtagcccacagatgcgttccaagcagaacgcctggttgcaatatgtggagcagcctgtctgcgccatggtggtggcctggttcgccaaggaagatctggagcacttcttcaccttgctcaagggcgaggcggaggttgaccagtcgcgcctgttctactggctgcgctttgccaatcaaatgagctatacgcggattgtgatgggtggcgatgcgtggcatgaccggggtagtgatttcgtggccttccgcgagaaaaacaaagggcgcttgagtcagcttaccggtgggccgagccacaacaacgcggtggtgatgcagataggcaactacttttttgtcgagttctccggtaccggcaatgcgtgctacgtctatcgtgctgatgccgctccattcaatcctgacaaaaaggtgctggggctggcaactgagctgaagcagcaaggacgggcgctgaagcgtatgtcccactctccagccccgcggcgacccaatgtggtcgaagggtggctggataagtttgatgacgagctccgagcgctgggaatcgtcgcgcagcgtccggcgtcatatacgcaaccccgcgtttctgaagacaagcccgccgcccatagtgctgcgtatgcatctgtcgcgggtgactcgctggacgtgcaggttaagtccatgttgggcagtgtgccctataagacgttcgaccaccgctcgaccagcggggtctaccaggttttgcttgccagggatgatgcggctgccaaaacagcgctgctgcgcctcggcttcaaggctgtgaaaaacaatgcactcatgttctggaggctttga

SEQ ID NO: 6671 - DNA, 3252 bp, Pseudomonas aeruginosa E2
atgctcggacgatttttttccgggaaggatcgttctcagtccgccaagggggcagcgcctggtgcttaccagatcgaagaactaggtctttgttatgccttgagtctggccggcgacgatgcaagctggcccgtcgcggcctacctggaccagctctttgaagaggactatgccagccagctgagtgatcgctggttgttgccttgggagtcgatctatcagctcttggatgatccggagcacgctagcagccttcctttacttggcttgcccgcgatttccgagctacagccacagttggccagcaccggtggcttgtcggatccggatttcaaggtgtttatccagtcctggcgtaacccgcagacgggcaacccgattactttcgagcgtgttggcgccgtggtgcgctacgccagcaccactgagctgcttccgcgagcggtctgggagcttttgaaggccattcgggatctgcatgccactcagcagcaggcgccgggagaagtcgccaaccagatcggttgggccaatatccgtaagttggccaagcgcgctggtgcgggattggacgggttcctcgacaaaactgtggtggtcaagcctgagcacttgaagctgaagccgcgtaaggcagttgtcgccggtacgccgattatcgagttggatgtcgcgtttgatgggcagcctgacaattggttggccagcttcgatggttacaagcaggtgcaggataagtacagggtgccgggtgccgatggaacggtgacgcacgtgctgattgagccggatgtaaaggcggtgcttgaatctgttcgcgcgttaccggggcggcgggtagccggtgatgaagcgctgtcactggtgcgcaacccctacagcgtgatcggggatgcggccgagaaggttgttgatgcggacgagtatgaggagcagctggctgacgcgggcatctacttccatcgttttcgcctggaaccttgtctaggcgaagacggcaaacatattcggtcgattggtctgttccttgagcctatctcgtccaagccgctacccgaaattgagctgcgcttcgattttgcccatgagttcgcaccattcgtgaatgagctgcaggtgaagttggcagctggtatgcccgcgggattctggcagggctatgagctggagctgagtgacttcgatctcgcgcaattggcgggggtcaatgagcttttgcgccactggcagcgccaggaggccgggcagacattcgaggcggtgctggatttggcctcgtatggtgatcgcgttgtcggcattggtgaggcggagcgcattacatccccatttttggtgaaagaggcaacggaaaactggttgccggcggatgtgaaagagcttggggtggatagcgaactgctcagccagtgggatcctgccagccgcgaagattttgaagagtttgagcaccgcatcgaccaggcgcgtatggcgggtgatgaacaggtatgtctaccgggtactgaaaccccgctacctttccaggtcgcggagcagctttatgaagcctggtcgaagaagcttaatccggtcgagccaaaaccacctgttgtgactgagcccgtagctggtcgtgcggtgctgcatatcgagcacaatattgaggaagcgacctatgcccagcgccgtgaggcggctctgctggcggggcggcatgccaacgcggatattccagaactgcttcgccccgaagttcaactgcgcgatcatcaaatgaaaggtgtggcgtggatgcagcacctgtttggcttatcacccgatcatgtcgcgggttgcttgcttgccgatgacatgggcttgggtaagaccattcaactgctgaccttcgttgtttggtatttggagcagaatcctcagggtaaaccggtcctgattgttgcccccgtttccctgttggataactgggagcgtgagctgcagcgattcttctatgcggattcattgccggtattgaagctttatggcggcgcgctcagcgctgtgaagttcaagaaggacgagattcccggggatctgcaggccaaggggataaaaaatcttctgcggccgggttggatgggcgatgctcgtatcgtgctgaccacctatgaaaccttgcgtgatcaggaactctccttggcacggcagcagtgggccatcgtgatctgcgacgaggcgcagaagatcaagaacccggcggcgctgatcacgcaagcggcgaaagcaatcccctctcgattccgtatcgcctgcacgggtacgccggttgagaacacgctgatcgatttgtggtgtcttttcgactttattcagccgggcttcctgggggggctgaatcagttcggtcgggagtatcaacgccccattgaggccggcttggagcgggacacgggagcgcttgaacgcttgcgtgggctcatcgagccgcagacgttgcggcgcaccaagcaagatgtggcgaaggatctcccagccaaaatcgaggatcagggatgtcgtaagctgcagatgcacacgttgcagcgcaatctctatttgtccgaggttgcccagtacacacagaagcagcagatgcaggagcaattggagcagcgagagagcggcatgctcggcctgctgcacaagctcaaactggtgtgcgcgcacccgttcggcgtgcagcctgatcctcgtttgagggagcactcaccgaagcttcaatggctcttgggcacgctggacaacatcgcgcgttcgggcaatggcgacaaggtcatcctgttcaccgagttgcgggacatccagcgtgaattgcagcatgcgattcaggagcgattcggattcaaacccactgtaatcaatggtgataccagcaccagcagccagagtgcgcagagccggcagcgcttgattgatcgtttccaagagcagccgggtttctcggtgataatcctctccactgttgcggttgggtttggtgtgaacgtgcaggcggccaaccacgttatccatttcactcgctgctggaatccggccaaagaggatcaggcaaccgatcgcgcttaccggattggtcaggagaaggacgtgtacgtctattacccgaccgtacgtgatgcggggatgcctacatttgaggcgacgctggatgagctgctacagaagcgacgcgcgttggcgcgggatatgctgcatggggcatctgagcttcaggtatctgagtttggggaactgttaagggcgcaaggatga

SEQ ID NO: 6672 - DNA, 2145 bp, Pseudomonas aeruginosa VRFPA02
ttgactgcgcccgccttcgtggtgagcttggtgacgttgctatgcctttggtacggcgtgcgttacttcctgtattcgttcgttctgagccgccgcatcaagcgggtgtcgaaggaggttcgcgccgtcggcgagctgcaaccggccaagcgtcgaggtgcactggagcaggtattccagaagcctccactgcaacatgcgtggcaggaatacgcggaaacgctgcacgaccaatttgaagtgcgtgatggcgagcggcagctgctgcgctctcgggcaacggctggcgctggacacttctttacgtcgcagacagtggtggaaacaccgcttggcactgagttctacaagcacttgccgggcattctgaccggcatcgggattgttggtaccttcttcggcttgatgctgggcctgcagcatttcaatccaggtacgcctgagcaggtcaacgccagcgtcgaccaattgctcaaggacgtactatttgccttcctgggctccttcttctcgatctttgcctccatcgccgtcacgctcactgagaagtggcgcctggggcgctgctacaagcacctggaaaaactgaccgaggccatcgacggcctattcgacagcggcgtcggcgaggagtatctggccgaactggtaaagtcgagcaatgaaagctcgatccagacgcgccaactgaaggacagccttgtcaccgacctgcgcgagatgctgcagaacctggtggacacccaggtgcgcgaaagcctgaagctggccgacaccctgtccgccagttaccgcgactccggccaggtgctggccgagcagattggtggtgcgatcgaaagcagtttgaaggctccactagagcaaattgcaggcgctgtccaatcggcgagtggcgaccagagcaaccaggtgcagagtctgctgcaggatgtgctggtggccttcatgaataagctggagagcaccttcggccagcagttcaatgggctacacgaaatgatggggcagtccgtggccgccatgcagtccatgcagcagggcttcaatagcctggtggacgacatgcgttcggctagcgagagctccacgcaaaacagcgcgaagatgatcgcgcagctcctggccgatatgcaggctgggcagaacagtatgcaagccagtatgaatgagatgctggccaatctgcaggcctccattgcgcgaatcggcagtgaaggcgagggggccggcgagcgcatggcccagcagttggagaagctattcgccgagagcgaagcgcgccagcaagccatggcggaaaacctgcaggcctttatcgagacgatgaagcagaacatcggccaggggcagcaggaaaccatggccaaaatcgccggctcggtggatgttcttggcgagcagttgggcgccatgttcaagcagatggagcagggccgcgcgcagatggaccaggctactaaggttgcccaggtcgagctacaccgcggtactcgcgagatggttggtgatcttgagaagcaggtcaatgacctgttggatgcggtagctgagcagagcggctccatgcaggacaccgtcaagctgctcagcgctcagaccgagcaacatttgcagagcatgcaagctggcgcggagaagatgcgcgtcgcagcagaacgcttcgaaacggcgggcctaagcgtcaccaaggccggtgaagccactgctaacgtacttggggctatgcagggcaccggaaccgaactggtgggtgcctcgcgggaactcagcagcatcgtggccgactatcgcaacaaccgcgacgccctggctcaaaccctgagcgtgattcaaggtgtggttgccagcgcgcaaagcgaggcctccggacgcacccagtacctgctggatatgaagcagcagagcgagcggctgcaagcgctgaaccgtgaggttcatgactacctcgagcagatcagtggtgtgctgggcaagggcttcggggagttcaccgagggcgtcgaccgtagcctgcgacagaccctgggcagcctggatgccgaactgcacaaggccatgactagcctggccggtggcgtcgagggtgtgaaggaaagcctggaagacttcagcgacatcatggaaagcatccagaaaaagtga

SEQ ID NO: 6673 - DNA, 738 bp, Pseudomonas aeruginosa VRFPA02
atgtttggcaaatcagccgcccctgctcgggcacgggacgaaggcgagaagcccttctggatctccttcgccgacctgatgacggcgatgatgatcctgtttttggtggtgatggtggcctcgctaagttctgtgacgcagcgtatccagcaggttgagcaaggcgagaagcagcggggaagtgaaatcaagaggctgtgtgagggccttaagcttaaagccgggaatctgaactccacgattgttgtggactgccacgataaccgcatcagctttggcgaggcgggccgcttcgggcacaaccagtacttgctcaacgcccaggggcaaaaggctttgcaggatgtcgtgtcgctgattctggacgcggccgacagcgaagaagggcgcaagtggctcaagcaggtggtgatcgagggcttcaccgataccgacggctcctatctgtacaacctccacctttccctgcagcgctcggaatgggtgatgtgcagcctgctcgatagtcgcagccccgtgcagcaaggcctttcagcggagcggcagcaacagattcgctcgatgttcctggccggtggcgtgtcgttcaacagtgcccgagaaactaaagaagcaagccgacgtgttgagttgcggatgcagttcttcgggctgaaggacaaggagcaacaggcgaaggaggagcagccaattttcacgacgacggcgctggagaagtgccagctggagatgcgctag

SEQ ID NO: 6674 - DNA, 1644 bp, Pseudomonas aeruginosa VRFPA02
atgagtcgggcgttgtcgtcactctccgatgccatagcacgtagcttgcagcgccagcaggaacgcacggcggataccgggctgaatagatttgtcgatttgcaacgtgcaaacgatgagcttactcggcgcttcaatcaagtcgagaaggctctgcctccgcctcaagagaagcggagggaagcactgcgcaagtttaggcgtgataagcaattaagctctacgccctcggaatacagaccggtgtttgctggcttggcagataaagatgacggcggcctgccggtgcttgaggatgacgtcctatttgaattggtgcatcgagaggtctctattcgaagtgaccaacaaaagctgagccgaaaggattggttggcactttgctacagctattttttctacgatcacgccaagccggcagataactccaattggcgggtcctgcgcagcgatatcgatcagggccttgatgcggtcaagcggcgcatcggtcgcgagaaagagtggatgcggattgtccagcagcaccgtgagctgttcggtgatcaggcgggaaaacagctcgcggaggaaatctttgcggggcgcgccaaggacctgtccgctctgcagaccatcgcacaggtgccggatagcagctggttgtggaagcgcatctttgatgtgttgctgtcgtgcatcgatgatctggatgacgacaccttcgtgcagcgcctgccggagctgactgagttggggcagttgaataatcggtacatggataaggtgctcagcgcctgcctgacccgctattaccgctcgcgttttcgcgaacagtcttcttctctgctcaagcaagccgcgcttgagcactggggcagtccgcaacttcgctcagaccaaaaccgctggctaaaccatgtggagcagcccgtttgcgccatggtgatggcctggttcgccaaggaggacctggagcacttcttcaggttgctcaagggcgaggcggaggttgatcattcgcgtctgttctattggctgcgctttgccaatcaaatgagctatacgcggatcgtgatgggtaatgatgcctggaatgaccgtggtagtgacttcgtggccttccgcgagaaaaacaaggggcgtttgagtcagttgacaggggcctcacgtcacgtcagcgccgtagtcatgcagatcggccaattcttttttgttgagttctccggaacagggcatgcctgctatgtctacaaagcagatcaagcacctttcaacccggatcggataaaactcgacctaaccactgagctgaagcagcaggggcgtgagctaaagcgcatgtctcactcgccggcaccgagacgccctaacctcgttgaaggttggctagaaaagttcgacaccgagctccgggagttgggcatagttcctcagtcccctagtggccacaacgagccccggaaagctggaagccagtcgtccattgagatccaggtggcagcccaactgcggcacgttaactaccagctgatggacaaccgcagcaagggtggcgccttgatggtcaagcttgcacgtgatgatgcgcgggccagagttgcgctagcgcggttgggatttaaagagatgaacaagaacccgctgacattctggagaagctaa

SEQ ID NO: 6675 - DNA, 3252 bp, Pseudomonas aeruginosa VRFPA02
atgctcgggcgattcttttcaaggaatgagcggaacgctcaaaaatcgaatgaagtctttaagccacaggtcgatgagttggggctctgttatccgctgagtttggctcaaagcgaggtgcattggccgctggcggcttatctcgaccagttgttcgaagaggatttcgcctcgcaactcagtgatcgttggctgttgccttgggatgcgctttaccaactgctggatgatcccgagcatcaaaccagcctgccgcttctgggcattccgccggaagccaattttcagccgctgttggctagcagcggcagcctcgccgaagcgggcttcatggtgttcatccagggctggcgagatcccaagactggcgctgccgtgaatattgatctcctagggcctgtcgttcgccagagagagcgtaccgagttgctgccccaagcggtttggtcactgctgcaagctgtgcggcgcttgagtacggcgcaaaaggaagcgcccggagaggctaccaatcagatcggttgggcgaatatccgcaagcaggccaagaaggccaacgctgggatggatggttttctcgacaaaacgtttgtggtcaagcctgagcggctgcagctgaaacccaggaaaagtatggtgggcggcaccccggtcatcgagcttgaagcgtccttcgacgggcagccggccaactggatggcgagcttcgatggctacaagcaggtgcaggataggtaccgtgtgacgggcgacgacggaacggtcacccacgtgctgatagagcctgaggtcaaggcggtgctggaatcggtgagggctctacccggccggcgcgtggcgggcgacgaggctttgtccctgattcgaaacccctacagcgtcattggcgacgccgctcagaaagtggtcgatccggaagagtacgaggccggtctcgcggaggccggtattcatttccatcgctttcgtattgagccggcactgagtgccgatggacggcagatcgagtctgtcggcctatacctggacccgatcacggcatcgccggagcccgaggtcgaattccgttttacggcggctcacgagctagcgccatttgtgcatgagttgcagatcaagctggccgctgggctgcctgctgggctttggcagggctatgagctcgagctgagcgacttcgacctggcccagctggcagggattagtgggttgctcagcgattggcagcgacaggaggtcgggcagaccttcgaggcggtgctggacctggcttcctacggggatcgcgtcatcggtatcggtgaagcggagcgcattacctcgccgtttttggtcaaagagtccaccgagaactggctgcccgatgacgtcaaggcattgggtattgatggcgagctgctgaacagctgggatcccgcgaaccgcgagcatttcaacgagtttgaacaccgtctcgatcaagcccgcgaggctggcgacgagcaagtgcatctgccaggtagcgagacgccattgcccctgaaagcggctgagcagctatacgacgcttggtccagaaagctcaatccaggtgaggcaaacgctacgggcagtgagaaagcagacaagcctcccagggccgtgctgcagatcgagcacaacatcgaagacgccgcttatgcccagacccgcgaggcagcgttgatggcggcacacaatgccaacgcggatctcccagagttactgcggcctgaaatccagttgcgagagcatcagctgaagggcgtggcctggatgcagcatttgttcaagctggcgccggatcgagtcgccggttgcttgctggccgacgacatggggctggggaagactatccagctgttgacgttcgtgacccggtacctggagcagcaatccgagggtgagcccgtcctgatcgtggcgccggtgtccctgctggacaactgggagcgcgagctgcagcggttcttctacgcggatgcgctgccggtgctgaagctctacggtagcgcgctgagcgctgtgaagttcaggaaggaagagataccgaatgaactgcaagcgaaaggcatcaagaacctactgcgccccggctggatggcagatgcgcgtattgtcttgactacctacgagacgcttcgggatcaggagttttctctggcccgccagcagtgggcgattgtgatctgcgatgaagcgcagaagatcaagaacccggcggcactcatcactcaggcggcgaaagccattcccgcgcgctttcgggtggcctgcaccggtacgccggtcgagaatactctgatcgatttgtggtgcctgttcgactttatccagccaggattcttgggcgggctgaatcagttcggccgagagtatcagcggcctatcgagtccggtgtcgatcgcgataccgaggcgctagaacggctgcgtggcttgattgagccgcaaacactgcgacgtaccaagcaggatgtggcaaaggaccttcccgccaagatcgaggaccaggccagccggtcgctgccgatgcatgccttgcagcgcaatctctatctgtccgaggtcgcccagtacagccagaagcagcagatgcaggagcaactggagcaacgcgaaagcggcatgctcggcctgctgcatcgcctcaagctggtgtgcgcgcaccccttcagcgtgcagcctgacccgcgcttgcgggagcactctcccaagctacaatggatgttggcccagctagggcgcatcaagcgttcgggcaacggtgacaaggtcatcctgtttaccgagctgcgggacattcagcgcgagcttcaacacgccatccaggagcgcttcggcttcaagccgaccgtgatcaacggcgacaccagcaccagcagccaaagtgcacaaagtcgccagcgcttgatcgatcgcttccaggaggagcctggcttctcggtgataattctctcgacggtagcggttggcttcggcgttaacgtacaagctgcgaaccacgtgatccatttcacccgctgctggaaccccgccaaagaagatcaggcaacagaccgcgcctaccgcatcggccaggagaaggacgtgtacgtctattacccgaccatccgcgaccccagcatgccgacattcgaagccacgctggatgagcttttgcagaagcggcgtgccttggcgcgagacatgttgcacggcgcttcggaaatcaaggcagcggagtttggtgaggttttgagagcgcagggatga

SEQ ID NO: 6676 - DNA, 2127 bp, Pseudomonas aeruginosa VRFPA03; identical to SEQ ID NO: 6656

SEQ ID NO: 6677 - DNA, 765 bp, Pseudomonas aeruginosa VRFPA03; identical to SEQ ID NO: 6657

SEQ ID NO: 6678 - DNA, 1254 bp, Pseudomonas aeruginosa VRFPA03
atgccggtcgctgaatgggcgcccgtggtgcgggagcgatggacggtgctggtcgaaaaggtcgctcgaatgaaggccgcaagtggcaagagtgacgcctttgaagccatgttggcacgattgcgtgacatggcgagtacagggcgttttgacggcctgcctgagctgctaaaacgtcgtcttactgcgcgtgcgttgacctggttgtggctcaacgacgagaccatgggtaggcgtttgcttagttcgcgtctgctttcggtgctggtcgatgctcagcagccgaggctgacgcgtatcaccttacagcagttggctcagttctactttcgtcgcttcgacaagctggatgagcacgatgggctgcgtaagcagcttgagcagattttgctccagcaactgcatttactgcccgaacccaaagtaagtggcccccaggctgatccgctggtaacgctcaagcgtgatgctcattggttgttgccgcctgacgggccagtccaactggttgagcgggtacgcgacagtggccatgagctgggcgagacctttgaggtcatgggattgcagggctttgatgacgggcgttatggcgatatctgccgggcccacttctacctggaaaccctacgagggcttgcgcccggtgagtacgaccccgtgctggatgagctgcagaagcccgctgtgtccaaggctccgtacgagggcgagcgtcgtatcggccatgttgcgctggagattctgatcgatcgtgctggacaggagccgggtgaggtctggcagaactttattctgaatctggcgggggatccgcggatctcacgtaactcccccaattaccgcgagtggtggcagttcctcggtgaggagcgggtgcagaaggttcggggctggttgtccaaggaagatttgcggctgtttttgcaggcggtggaacagtttggaatcgaaacgcagaacgacgatctgcagcgcatgttccctgcacgcaagcagttcctagaggggctgtttaagctcaaactgatccgcaatacccgcttgctgcttggcgggcgggcacagcattcggtaaagcgcattctcggtaaagatgtgcaaaccagttttgccagcatggacgggcagatgaatgacaaggcggtcatctatctcgattgcggagactttcatctggtcgagggttcccacagttttaaaatctgggtctatctcggagggtgtccgaaattttgtgtaaccggctcatga

SEQ ID NO: 6679 - DNA, 2127 bp, Pseudomonas aeruginosa BL22; identical to SEQ ID NO: 6656

SEQ ID NO: 6680 - DNA, 765 bp, Pseudomonas aeruginosa BL22; identical to SEQ ID NO: 6657

SEQ ID NO: 6681 - DNA, 2013 bp, Pseudomonas aeruginosa BL22
gtgaagctgcctcctgttcacatgccggtcgctgaatgggcgcccgtggtgcgggagcgatggacggtgctggtcgaaaaggtcgctcgaatgaaggccgcaagtggcaagagtgacgcctttgaagccatgttggcacgattgcgtgacatggcgagtacagggcgttttgacggcctgcctgagctgctaaaacgtcgtcttactgcgcgtgcgttgacctggttgtggctcaacgacgagaccatgggtaggcgtttgcttagttcgcgtctgctttcggtgctggtcgatgctcagcagccgaggctgacgcgtatcaccttacagcagttggctcagttctactttcgtcgcttcgacaagctggatgagcacgatgggctgcgtaagcagcttgagcagattttgctccagcaactgcatttactgcccgaacccaaagtaagtggcccccaggctgatccgctggtaacgctcaagcgtgatgctcattggttgttgccgcctgacgggccagtccaactggttgagcgggtacgcgacagtggccatgagctgggcgagacctttgaggtcatgggattgcagggctttgatgacgggcgttatggcgatatctgccgggcccacttctacctggaaaccctacgagggcttgcgcccggtgagtacgaccccgtgctggatgagctgcagaagcccgctgtgtccaaggctccgtacgagggcgagcgtcgtatcggccatgttgcgctggagattctgatcgatcgtgctggacaggagccgggtgaggtctggcagaactttattctgaatctggcgggggatccgcggatctcacgtaactcccccaattaccgcgagtggtggcagttcctcggtgaggagcgggtgcagaaggttcggggctggttgtccaaggaagatttgcggctgtttttgcaggcggtggaacagtttggaatcgaaacgcagaacgacgatctgcagcgcatgttccctgcacgcaagcagttcctagaggggctgtttaagctcaaactgatccgcaatacccgcttgctgcttggcgggcgggcacagcattcggtaaagcgcattctcggtaaagatgtgcaaaccagttttgccagcatggacgggcagatgaatgacaaggcggtcatctatctcgattgcggagactttcatctggtcgagggttcccacagttttaaaatctgggtctatctcgccgcgccgggagaggctttgcgttcctacgagcgctccagcttcagtcattccgatctgactacggctgttcctaaggcctacaagcgactgtatcctgagttgccctatgatgccttcacgcatcacccccctctttcctggcagaaccgggtattcagcttcctggctgataacggcatcgctctagatatcgagcagttgctcaatcgcagtgactaccagccttaccttcgtaaatttggtatgcctgtggtcaatgccaagcgaacacccgtgccgcctccaagtcagacagattttcccgcagagccggcgcgttcacgtgttggcaagactggcgtgacaacgatgtcagcgcctcaggggcgtaagcctgcagagatgattgcgagggactccagagctattcctagagaagaggcggccacagtacggcgaagcaaccagcagcatgatccggtagtgtcgcactccgtcagttcacctgatgcggctgctcctgcaacggcacgtccgtctctggtaggtgaaggattattgacaggcttgaaaccctctgcactgaagatactgcgctacttcgtggacaaccccggtgacaaagtccgatatgcagcgaatgttttcggtgtggactcgcgtgaaatcaatcagattttgtatggcccgttgaaggacatgtgcacgcgtgatgagcagttcggctggacggtgaatgaggcggcacgtctcgcgcttgaggcgttggatgaacaggacagggctgaataa

SEQ ID NO: 6682 - DNA, 3042 bp, Pseudomonas aeruginosa BL22
atgagcttgatggatatttttcggtcgctgattggtgagcgagacggggcgctcagtactcagcaaggctttcagtctcagcctgattccaatggcttgaatttctacctgcccttgccggccttcaaggcgctgcaaaccgggcagggcagtgctttagaaaagattcagctgatcgtgctcaacatgctggttgagcaagggattgccgaaaacacggccaacggttttcacatcggtgccgaagatattgcggggatggatcttgagcaggcggaaatcttgcgtttgccgagacgcttgccagggcactttctaacctcaatcagtgggcgcacgggcaacagtggttttcgtgtggcgatcacgctggaaatgccagacggccctgccagcttcagtcgcaaaggcccctatctgtacctgaccagcagtgagtgctattggctgacgccggctgaaattatggggttgcaggcttgggaactgcatgagtctttaggcccagaacagcgaggagaggcggctaatctgcgcctgatggccgagctgcagaccgctgcgcgcagcgggatgcgtattgatcttagccactttgagcggctagatgtggtggtgcctcagaacatcggagttatcgctacgcgtttaccagatggcagcctccaactctgcccgagccttggggatggctccagtgctgaccagctggaaaaacgctggtcgcagttggatatgaccgccgatggtggtgtgctgcgcatcgacaatcgtgtgttgctgctggatcaggcgcggatggatggcatccgcaatgtgctggccaacaaacgtatcccggctgatcaggtcaacgagtttattgccacgccaacggcgtttctcgatgctgcgctggtcaatcttgaggtgggcttttctgcccgggttgcgggtataggcaaacttcagcacatggatttcggtgtcctggatgcaaccaagaatgactggtttgcgcttgataagcgcccggcacctgcagcgatcctgagcaagctgattcagtctcctgaggatttgcagcgcttcgaggaggtactgcaggcggctaatgaacagggcgcgacgagtctgtcgtttgctggcgaggtgatcgatatctctgacgcgccgactgttcagcaagagctggccagggctcgccagaacatggctcatgtgagcgatagcgagccgcacagcgaggagggtgttctccctggggaggacaaggagaaagtcggggtcattctgaaggatgccgacgagattaattctgcgctgttgcgtaaggctgctgctgcgaagccgctggtggtgccagattggtcggcctatgcccgggagccgttccctcatcagcgtgaggggatcgagtggatgctgaagctgatgggcgcagcgttgcaggatgaaactgatgatctctatcgcctgcagggtggtttgcttgcagatgacatgggtctcggcaagacatacatgtcgctggtcgcagtcggggagtatctggccagtcagcgcgcggctgacaagccgcagaagccggttctggtggtggcgccactgagtctgctggaaaactgggaggatgaagtcggtaagaccttcgccagcatcccgttccgcgatgtggtggtgctgcagtcggggcggagtctgcgtgactatcgcgtcaaaggtgctgagcgtgaatcggtgcagttggcgtcgatgattgatgacagcagcggcatgatggatgagcagagcattcgctatgcactgcatgtggggccggaagcaggcgtgcatcgtctggacatggaccgtcgcttagtgctcacgacctatcagaccctgcgtgattatcagttctccctgtgccgaatcgactggggcatggtcatcttcgacgaggcgcagaacatcaagaatcccaatgcactgcagactattgccgctaaagggctcaaggcggatttcaaactgttggcgactggcacaccggtagaaaatagcctgggcgatttctggtgcctgatgcatgcggtgcagcctggcttacttggtggctgggaaagcttccgcgatacctggatcaagccaattctggctgcaagcgatgaagagcgtgatgaggtacgggcgcgtttgggcgagcagctgcggcgtgctgtaggcatattcatgttgcggcgggttaaagaagatcagctcaaaggcctaccagccaagactattctcagtggtgtcgagcaagccgatcatggcctgcaacggtatgcagcgcagttgggtgtggtgatgaaaggcatccagttgcaggcctacgacgaagtcctcgacagctatcgggctcgtcgtgcaagcgctgaggatatgcgtggtaccgcactggcggctttgactcagcttcgctccatttccctgcacccacggctggagaatgagtcggcgctgtactgcgaggatggcaagcacgcgcgacaactgatgatggagtccggcaagctggcggtgctgctgcagttactcgatgagatccgtagcaagggtgaaaaggtcatcctgttcatgatgaccaagcgcctgcaacgagtcctcaagctctggctggatcagatctatgacctgaatgtagcggtgatcaatggtgacacccaggctgtggcgactcgcgccgaggatatgacgcgcaagaagctaattgccgagtttgaagcgaaaagtggcttcaacatcctgatcatgtcgccagtagccgctggtgtcggtttgacggtgattggggccaaccatgtggtgcatttagagcgtcattggaacccggctaaagaagcgcaagcgtctgatcgggtttaccggatcggccaaaccaagcccgtgttcatccatctgcctgccgtcactcacccccagtttgattccttcgatgtacaccttgaccgcttattgcgcggaaagctgatgcttaaagacgcggtagtgacaccagaggcggttagtgaaagtgagatgattcaatcgatggggctctga

SEQ ID NO: 6683 - DNA, 2196 bp, Pseudomonas aeruginosa BL21; identical to SEQ ID NO: 6664

SEQ ID NO: 6684 - DNA, 738 bp, Pseudomonas aeruginosa BL21; identical to SEQ ID NO: 6665

SEQ ID NO: 6685 - DNA, 1677 bp, Pseudomonas aeruginosa BL21
atgagccgggctctgtcgtttctgtcggcggccatcgcttccggcttgcagcgccagaatgagcgtagcggcgatgtcgggctcagtggcttggtggcgctgaaacgcgccagtactgagctttctcggcgctttgatcaggtcgaaaaagccctggcaccgccccgtgagaaacgcttgctggcacttggcaagttcaagcgcgagcaggcgctgacttcatcagagtggcgcctggttttcgccgggctggccgatgacgatgaagtcagtgttccggtgctggaagacgatcagctgtttgaccgtgttcatcgggaggtggctggccgtatcgagcagcggtcacttagccgccgcgactggctggcgctgtgtttcagctactttgcctacgatgagcacaagcccgacgacaacgcgaactggcgggtgctgcgtgacgatattgatcgcggcttcgatgctgtcaggcagcgtattggtcgcgagaaagagtggatgcgcattgtagccgagcatcgcgaactgttcggcgctcaggctggggcccgtctggcggaggagatatttgagggcagggcgcgtgacctttcctctctgcaggccattgcccaggtgccggatggtagttggttgtggcagcggatatttgcggttctgctttcgcgcattttcctgctggatgacgaaaccttcctaaagcgcctacgggagttggtagctctggggcaactgaatacgcgctatctcaatcaggtgctaagtgcctgccttactcgttatcaccgttcgcgatatcgcgaacagtcgtcctcgctactcaagcaggttgcgttggagcactggggcagcccacagatgcgttccaagcagaacgcctggttgcagtatgtggagcagcctgtctgcgccatggtggtggcctggttcgccaaggaagatctggaacacttcttcaccttgctcaagggcgaggcggaggtcgaccagtcgcgcctgttctactggctgcgattcaccaatcaaatgagctacacgcggattgtgatgggcagcgatgcctggcatgaccggagtagtgatttcgtggccttccgtgagaagaacaaaggacgcttgagtcagctaaccggagggtcaagccacatcaatgcggttgtgatgcagatcggtaactacttctttgttgagttttcaggtacgggccatgcctgctacgtctaccgggcggataggttgccatttaaccctgatcagcaagtgcttggtctgaatacagagctaaagcagaagggccataagcccgcgcctatgcggcactcacctgcgcccaggcgtcctaatgtggtcgaaggatggctggagaagtttgatgacgagctccgggcgctgggaatcgtcgcgcagcgtccagcttcatatacgcaaccccgcggttccgaagacaaacccgccgcccatagtgctgcgtctgcatccgtcgcgggtgattcgctggatgtgcaggttaagtcgatgttgggcagtgtgccctataagacgttcgatcaccgctcgaccagcggggtctaccaggttttgcttgccagggatgatgcggctgccaaaacagcgttgctgcgcctcggcttcaaggctgtgaaaaacaatgcactcatgttctggaggctttga

SEQ ID NO: 6686 - DNA, 3252 bp, Pseudomonas aeruginosa BL21; identical to SEQ ID NO: 6667

SEQ ID NO: 6687 - DNA, 2127 bp, Pseudomonas aeruginosa BL20; identical to SEQ ID NO: 6656

SEQ ID NO: 6688 - DNA, 765 bp, Pseudomonas aeruginosa BL20; identical to SEQ ID NO: 6657

SEQ ID NO: 6689 - DNA, 2013 bp, Pseudomonas aeruginosa BL20
gtgaagctgcctcctgttcacatgccggtcgctgaatgggcgcccgtggtgcgggagcgatggacggtgctggtcgaaaaggtcgctcgaatgaaggccgcaagtggcaagagtgacgcctttgaagccatgttggcacgattgcgtgacatggcgagtacagggcgttttgacggcctgcctgagctgctaaaacgtcgtcttactgcgcgtgcgttgacctggttgtggctcaacgacgagaccatgggtaggcgtttgcttagttcgcgtctgctttcggtgctggtcgatgctcagcagccgaggctgacgcgtatcaccttacagcagttggctcagttctactttcgtcgcttcgacaagctggatgagcacgatgggctgcgtaagcagcttgagcagattttgctccagcaactgcatttactgcccgaacccaaagtaagtggcccccaggctgatccgctggtaacgctcaagcgtgatgctcattggttgttgccgcctgacgggccagtccaactggttgagcgggtacgcgacagtggccatgagctgggcgagacctttgaggtcatgggattgcagggctttgatgacgggcgttatggcgatatctgccgggcccacttctacctggaaaccctacgagggcttgcgcccggtgagtacgaccccgtgctggatgagctgcagaagcccgctgtgtccaaggctccgtacgagggcgagcgtcgtatcggccatgttgcgctggagattctgatcgatcgtgctggacaggagccgggtgaggtctggcagaactttattctgaatctggcgggggatccgcggatctcacgtaactcccccaattaccgcgagtggtggcagttcctcggtgaggagcgggtgcagaaggttcggggctggttgtccaaggaagatttgcggctgtttttgcaggcggtggaacagtttggaatcgaaacgcagaacgacgatctgcagcgcatgttccctgcacgcaagcagttcctagaggggctgtttaagctcaaactgatccgcaatacccgcttgctgcttggcgggcgggcacagcattcggtaaagcgcattctcggtaaagatgtgcaaaccagttttgccagcatggacgggcagatgaatgacaaggcggtcatctatctcgattgcggagactttcatctggtcgagggttcccacagttttaaaatctgggtctatctcgccgcgccgggagaggctttgcgttcctacgagcgctccagcttcagtcattccgatctgactacggctgttcctaaggcctacaagcgactgtatcctgagttgccctatgatgccttcacgcatcacccccctctttcctggcagaaccgggtattcagcttcctggctgataacggcatcgctctagatatcgagcagttgctcaatcgcagtgactaccagccttaccttcgtaaatttggtatgcctgtggtcaatgccaagcgaacacccgtgccgcctccaagtcagacagattttcccgcagagccggcgcgttcacgtgttggcaagactggcgcgacaacgatgtcagcgcctcaggggcgtaagcctgcagagatgattgcgagggactccagagctattcctagagaagaggcggccacagtacggcgaagcaaccagcagcatgatccggtagtgtcgcactccgtcagttcacctgatgcggctgctcctgcaacggcacgtccgtctctggtaggtgaaggattattgacaggcttgaaaccctctgcactgaagatactgcgctacttcgtggacaaccccggtgacaaagtccgatatgcagcgaatgttttcggtgtggactcgcgtgaaatcaatcagattttgtatggcccgttgaaggacatgtgcacgcgtgatgagcagttcggctggacggtgaatgaggcggcacgtctcgcgcttgaggcgttggatgaacaggacagggctgaataa

SEQ ID NO: 6690 - DNA, 3042 bp, Pseudomonas aeruginosa BL20; identical to SEQ ID NO: 6682

SEQ ID NO: 6691 - DNA, 2127 bp, Pseudomonas aeruginosa BL09; identical to SEQ ID NO: 6656

SEQ ID NO: 6692 - DNA, 765 bp, Pseudomonas aeruginosa BL09; identical to SEQ ID NO: 6657

SEQ ID NO: 6693 - DNA, 2013 bp, Pseudomonas aeruginosa BL09; identical to SEQ ID NO: 6689

SEQ ID NO: 6694 - DNA, 3042 bp, Pseudomonas aeruginosa BL09; identical to SEQ ID NO: 6682

SEQ ID NO: 6695 - DNA, 2196 bp, Pseudomonas aeruginosa X13273; identical to SEQ ID NO: 6664

SEQ ID NO: 6696 - DNA, 738 bp, Pseudomonas aeruginosa X13273; identical to SEQ ID NO: 6665

SEQ ID NO: 6697 - DNA, 1677 bp, Pseudomonas aeruginosa X13273; identical to SEQ ID NO: 6685

SEQ ID NO: 6698 - DNA, 3252 bp, Pseudomonas aeruginosa X13273; identical to SEQ ID NO: 6667

SEQ ID NO: 6699 - DNA, 2196 bp, Pseudomonas aeruginosa 19660
atggactattcgaagtggttggacctttgggataaggcaacacccgagcaactgattgctcctgtgtttgtgtttagcctggtgacggtgctgtgcctttggtatttgctgcgttacttcctgcgctcatttgcactgagcctgcgattgaaaaagctcacgcggcaggtgcgtgcaatcaaggaactacagccggccaagcgccgtagcgagctggagcagttgttccaggagcacacgctggggcatgcctggcaggagtatgccgagacgctgcatgaccagttcgaggtgcgcgagggtgagcagcgcttgctgtgctcccgtgccacggcgggcgcgggacattttttcaccgcgcaaacggtggtggagacgccgctgggaaccgagttttacaagcacctgccgggcatcctgacggggatcgggattgtcggcaccttcttcggcttgatgctgggcctgcagcactttgaccccagcacacccgagcaggtcagctccagcgtcgatcagctgctcaaagatgtgctgtttgccttcctcggttccttcttctcgatcttcgcttcgattggcgtgaccttgactgagaagtggcgcctgggccgctgttacaagcacctggaggccctgacggaaagtatcgacggcctgttcggcagcggggtaggtgaggagtatctggcagaactggtgaagtctagcaacgagagctcgatccagacccgtcagctcaaggacagtctggttaccgacctgcgcgagatgctgcagaacctggtggatacccaggtgcgtgagaatctcaagttggcagataccctttcggcaagttaccgcgactctggtcaggtgctggccgagcagattggcggtgccatcgaaaacagcctgaagtctcccctggaggccatcgccggagccgtgaataccgccagtggcgaccagagcaaccaggtgcagagcctactcaccgatgtgctcacagcctttatgagcaagctggagagtacctttggccagcagttcaacggtttgcacgagatgctggggcagtcggtagcggccatgcaatccatgcaacagggcttcaatgaactggtcggcgacatgcgctcggccagcgaggcttcatcgcagaacagcgccaagatgatcacgcagctgctggccgatatgcaggccgggcaaaacagcatgcaggccgggatgaacgagatgctggccaatctgcagacgtccatcgcgcgtatcggcagtgaaggtgagggggctggtgagcggatggccaagcagttggagaagctgttcgccgatagcgaagcgcgtcagcaagccatggcggcaaatctgcaggcctttgtcgaatccatgcagcagagcatgggccagggccagcaggagaccatggccaagatcgccaactcggtggatgtgctgggcgagcagttgggcggcctgttcaagcagcttgagcataaccgtacgcagatggaccaggccagcaaggtcgcccaggtcgaactgcaccgtggtacgcgcgagatggttggcgggctggaagagcaggtgaaaaccctgctggatgccgtcgccgatcagcaaggcgcgatgcaggacagcctcaaactgctgggagcgcaaaccgagcaacacctgcagagcatgcaacaaggcgccgagaagatgcgcctggcagccgagcgcttcgacagcgccggacagagcgtgagtaaagccggcgaggcgactgcgggcgtgctgggtgcgctgcagggcacgagcggcgatctggtcggcgcttcccgcgagctgaccagtgtggtggccgactatcgcaataaccgtgaagctctgaatcagacgcttgctgtcattcaaggtgtggtcgccactactcagggtgagtccgcggggcgtagccaatacttgcaggatctgaagcagcaaggcgagcggctgcaggcgctcaatcgtgaagtgaacgactacctggagcagatcagcgcagtgctgggcaagggcttcaacgagtttagcgagggggtagatcgtagcctgcggcagacactgggtagcctggatgccgagctgcacaaggcgatgaccagcctggccggtggtgtcgaaggggttaaggaaagcctggaagacttcagtgacatcatggagcgcgttcagcgccgctga

SEQ ID NO: 6700 - DNA, 738 bp, Pseudomonas aeruginosa 19660; identical to SEQ ID NO: 6669

SEQ ID NO: 6701 - DNA, 1677 bp, Pseudomonas aeruginosa 19660
atgaaccgggcactgtcgtctctgtcggcggccatcgcctcgggcctagagcgccagagtgagcgcagcggcgatgtaggtctcagtgctttgccctcgctgaagcgcgccagcaccgagctttctcggcgctttgatcaggtcgaaaaagccctggcaccgccccgtgagaaacgcttgctggcacttggcaagttcaagcgcgagcaggcgctgacttcatcggagtggcgcctggttttcgccgggctggccgatgacgatgaagtcagtgtcccggtgctggaagacgatcagctgtttgaccgtgttcatcgagaggtggctggccgcatcgagcagcggtcactcagccgccgcgactggttggcgctgtgtttcagctactttgcctacgatgagcacaagcccgacgacaacgtgaactggcgggtgctgcgtggcgatattgatcgtggcttcgatgctgtcaggcagcgtattggtcgcgagaaagagtggatgcgcattgtagctgagcatcgcgaactgttcggagctcaggctggaactcgtctggcggaggagatattcgagggcagggcgcgtgacctttcctctctgcaggccattgcccaggtgccggatggtagttggttgtggcagcggatttttgcggttctgctctcacgtattttcctgctggatgacgaaaccttcctaaagcgcctgccggagttggtagctctggggcagctgaatacgcgctatctcaatcgggtgctgagtgcctgcctgactcgttatcaccgttcgcgatatcgcgagcagtcgtcctcgctactcaagcaagctgcgttggagtactggggtagcccacagatgcgttccaagcagaacgcctggttgcaatatgtggagcagcctgtctgcgccatggtggtggcctggttcgccaaggaagatctggagcacttcttcaccttgctcaagggcgaggcggaggttgaccagtcgcgcctgttctactggctgcgctttgccaatcaaatgagctatacgcggattgtgatgggtggcgatgcgtggcatgaccggggtagtgatttcgtggccttccgcgagaaaaacaaagggcgcttgagtcagcttaccggtgggccgagccacaacaacgcggtggtgatgcagataggcaactacttttttgtcgagttctccggtaccggcaatgcgtgctacgtctatcgtgctgatgccgctccattcaatcctgacaaaaaggtgctggggctggcaactgagctgaagcagcaaggacgggcgctgaagcgtatgtcccactctccagccccgcggcgacccaatgtggtcgaagggtggctggataagtttgatgacgagctccgagcgctgggaatcgtcgcgcagcgtccggcgtcatatacgcaaccccgcgtttctgaagacaagcccgccgcccatagtgctgcgtatgcatctgtcgcgggtgactcgctggacgtgcaggttaagtccatgttgggcagtgtgccctataagacgttcgaccaccgctcgaccagcggggtctaccaggttttgcttgccagggatgatgcggctgccaaaacagcgctgctgcgcctcggcttcaaggctgtgaaaaacaatgcactcatgttctggaggctttga

SEQ ID NO: 6702 - DNA, 3252 bp, Pseudomonas aeruginosa 19660
atgctcggacgatttttttccgggaaggatcgttctcagtccgccaagggggcagcgcctggtgcttaccagatcgaagaactaggtctttgttatgccttgagtctggccggcgacgatgcaagctggcccgtcgcggcctacctggaccagctctttgaagaggactatgccagccagctgagtgatcgctggttgttgccttgggagtcgatctatcagctcttggatgatccggagcacgctagcagccttcctttacttggcttgcccgcgatttccgagctacagccacagttggccagcaccggtggcttgtcggatccggatttcaaggtgtttatccagtcctggcgtaacccgcagacgggcaacccgattactttcgagcgtgttggcgccgtggtgcgctacgccagcaccactgagctgcttccgcgagcggtctgggagcttttgaaggccattcgggatctgcatgccactcagcagcaggcgccgggagaagtcgccaaccagatcggttgggccaatatccgtaagttggccaagcgcgctggtgcgggattggacgggttcctcgacaaaactgtggtggtcaagcctgagcacttgaagctgaagccgcgtaaggcagttgtcgccggtacgccgattatcgagttggatgtcgcgtttgatgggcagcctgacaattggttggccagcttcgatggttacaagcaggtgcaggataagtacagggtgccgggtgccgatggaacggtgacgcacgtgctgattgagccggatgtaaaggcggtgcttgaatctgttcgcgcgttaccggggcggcgggtagccggtgatgaagcgctgtcactggtgcgcaacccctacagcgtgatcggggatgcggccgagaaggttgttgatgcggacgagtatgaggagcagctggctgacgcgggcatctacttccatcgttttcgcctggaaccttgtctaggcgaagacggcaaacatattcggtcgattggtctgttccttgagcctatctcgtccaagccgctacccgaaattgagctgcgcttcgattttgcccatgagttcgcaccattcgtgaatgagctgcaggtgaagttggcagctggtatgcccgcgggattctggcagggctatgagctggagctgagtgacttcgatctcgcgcaattggcgggggtcaatgagcttttgcgccactggcagcgccaggaggccgggcagacattcgaggcggtgctggatttggcctcgtatggtgatcgcgttgtcggcattggtgaggcggagcgcattacatccccatttttggtgaaagaggcaacggaaaactggttgccggcggatgtgaaagagcttggggtggatagcgaactgctcagccagtgggatcctgccagccgcgaagattttgaagagtttgagcaccgcatcgaccaggcgcgtatggcgggtgatgaacaggtatgtctaccgggtactgaaaccccgctacctttccaggtcgcggagcagctttatgaagcctggtcgaagaagcttaatccggtcgagccaaaaccacctgttgtgactgagcccgtagctggtcgtgcggtgctgcatatcgagcacaatattgaggaagcgacctatgcccagcgccgtgaggcggctctgctggcggggcggcatgccaacgcggatattccagaactgcttcgccccgaagttcaactgcgcgatcatcaaatgaaaggtgtggcgtggatgcagcacctgtttggcttatcacccgatcatgtcgcgggttgcttgcttgccgatgacatgggcttgggtaagaccattcaactgctgaccttcgttgtttggtatttggagcagaatcctcagggtaaaccggtcctgattgttgcccccgtttccctgttggataactgggagcgtgagctgcagcgattcttctatgcggattcattgccggtattgaagctttatggcggcgcgctcagcgctgtgaagttcaagaaggacgagattcccggggatctgcaggccaaggggataaaaaatcttctgcggccgggttggatgggcgatgctcgtatcgtgctgaccacctatgaaaccttgcgtgatcaggaactctccttggcacggcagcagtgggccatcgtgatctgcgacgaggcgcagaagatcaagaacccggcggcgctgatcacgcaagcggcgaaagcaatcccctctcgattccgtatcgcctgcacgggtacgccggttgagaacacgctgatcgatttgtggtgtcttttcgactttattcagccgggcttcctgggggggctgaatcagttcggtcgggagtatcaacgccccattgaggccggcttggagcgggacacgggagcgcttgaacgcttgcgtgggctcatcgagccgcagacgttgcggcgcaccaagcaagatgtggcgaaggatctcccagccaaaatcgaggatcagggatgtcgtaagctgcagatgcacacgttgcagcgcaatctctatttgtccgaggttgcccagtacacacagaagcagcagatgcaggagcaattggagcagcgagagagcggcatgctcggcctgctgcacaagctcaaactggtgtgcgcgcacccgttcggcgtgcagcctgatcctcgtttgagggagcactcaccgaagcttcaatggctcttgggcacgctggacaacatcgcgcgttcgggcaatggcgacaaggtcatcctgttcaccgagttgcgggacatccagcgtgaattgcagcatgcgattcaggagcgattcggattcaaacccactgtaatcaatggcgataccagcaccagcagccagagtgcgcagagccggcagcgcttgattgatcgtttccaagagcagccgggtttctcggtgataatcctctccactgttgcggttgggtttggtgtgaacgtgcaggcggccaaccacgttatccatttcactcgctgctggaatccggccaaagaggatcaggcaaccgatcgcgcttaccggattggtcaggagaaggacgtgtacgtctattacccgaccgtacgtgatgcggggatgcctacatttgaggcgacgctggatgagctgctacagaagcgacgcgcgttggcgcgggatatgctgcatggggcatctgagcttcaggtatctgagtttggggaactgttaagggcgcaaggatga

SEQ ID NO: 6703 - DNA, 2196 bp, Pseudomonas aeruginosa S54485; identical to SEQ ID NO: 6664

SEQ ID NO: 6704 - DNA, 738 bp, Pseudomonas aeruginosa S54485; identical to SEQ ID NO: 6665

SEQ ID NO: 6705 - DNA, 1677 bp, Pseudomonas aeruginosa S54485; identical to SEQ ID NO: 6685

SEQ ID NO: 6706 - DNA, 3252 bp, Pseudomonas aeruginosa S54485; identical to SEQ ID NO: 6667

SEQ ID NO: 6707 - DNA, 2196 bp, Pseudomonas aeruginosa E2; identical to SEQ ID NO: 6668

SEQ ID NO: 6708 - DNA, 738 bp, Pseudomonas aeruginosa E2; identical to SEQ ID NO: 6669

SEQ ID NO: 6709 - DNA, 1677 bp, Pseudomonas aeruginosa E2
atgaaccgggcactgtcgtctctgtcggcggccatcgcctcgggcctagagcgccagagtgagcgcagcggcgatgtaggtctcagtgctttgccctcgctgaagcgcgccagcaccgagctttctcggcgctttgatcaggtcgaaaaagccctggcaccgccccgtgagaaacgcttgctggcacttggcaagttcaagcgcgagcaggcgctgacttcatcggagtggcgcctggttttcgccgggctggccgatgacgatgaagtcagtgtcccggtgctggaagacgatcagctgtttgaccgtgttcatcgagaggtggctggccgcatcgagcagcggtcactcagccgccgcgactggttggcgctgtgtttcagctactttgcctacgatgagcacaagcccgacgacaacgtgaactggcgggtgctgcgtggcgatattgatcgtggcttcgatgctgtcaggcagcgtattggtcgcgagaaagagtggatgcgcattgtagctgagcatcgcgaactgttcggagctcaggctggaactcgtctggcggaggagatattcgagggcagggcgcgtgacctttcctctctgcaggccattgcccaggtgccggatggtagttggttgtggcagcggatttttgcggttctgctctcacgcattttcctgctggatgacgaaaccttcctaaagcgcctgccggagttggtagctctggggcagctgaatacgcgctatctcaatcgggtgctgagtgcctgcctgactcgttatcaccgttcgcgatatcgcgagcagtcgtcctcgctactcaagcaagctgcgttggagcactggggtagcccacagatgcgttccaagcagaacgcctggttgcaatatgtggagcagcctgtctgcgccatggtggtggcctggttcgccaaggaagatctggagcacttcttcaccttgctcaagggcgaggcggaggttgaccagtcgcgcctgttctactggctgcgctttgccaatcaaatgagctatacgcggattgtgatgggtggcgatgcgtggcatgaccggggtagtgatttcgtggccttccgcgagaaaaacaaagggcgcttgagtcagcttaccggtgggccgagccacaacaacgcggtggtgatgcagataggcaactacttttttgtcgagttctccggtaccggcaatgcgtgctacgtctatcgtgctgatgccgctccattcaatcctgacaaaaaggtgctggggctggcaactgagctgaagcagcaaggacgggcgctgaagcgtatgtcccactctccagccccgcggcgacccaatgtggtcgaagggtggctggataagtttgatgacgagctccgagcgctgggaatcgtcgcgcagcgtccggcgtcatatacgcaaccccgcgtttctgaagacaagcccgccgcccatagtgctgcgtatgcatctgtcgcgggtgactcgctggacgtgcaggttaagtccatgttgggcagtgtgccctataagacgttcgaccaccgctcgaccagcggggtctaccaggttttgcttgccagggatgatgcggctgccaaaacagcgctgctgcgcctcggcttcaaggctgtgaaaaacaatgcactcatgttctggaggctttga

SEQ ID NO: 6710 - DNA, 3252 bp, Pseudomonas aeruginosa E2; identical to SEQ ID NO: 6671

SEQ ID NO: 6711 - DNA, 2196 bp, Pseudomonas aeruginosa VRFPA05
atggactattcgaagtggttggacctttgggataaggcaacacccgagcaactgattgctcctgtgtttgtgtttagcctggtgacggtgctgtgcctttggtacttgctgcgttacttcctgcgctcatttgcactgagcctgcgattgaaaaagctcacgcggcaggtgcgtgcaatcaaggaactacagccggccaagcgccgtagcgagctggagcagttgttccaggagcacacgctggggcatgcctggcaggagtatgccgagacgctgcatgaccagttcgaggtgcgcgagggtgagcagcgcttgctgtgctcccgtgccacggcgggcgcgggacattttttcaccgcgcaaacggtggtggagacgccgctgggaaccgagttttacaagcacctgccgggcatcctgacggggatcgggattgtcggcaccttcttcggcttgatgctgggcctgcagcactttgaccccagcacacccgagcaggtcagctccagcgtcgatcagctgctcaaagatgtgctgtttgccttcctcggttccttcttctcgatcttcgcttcgattggcgtgaccttgactgagaagtggcgcctgggccgctgttacaagcacctggaggccctgacggaaagtatcgacggcctgttcggcagcggggtaggtgaggagtatctggcagaactggtgaagtctagcaacgagagctcgatccagacccgtcagctcaaggacagtctggttaccgacctgcgcgagatgctgcagaacctggtggatacccaggtgcgtgagaatctcaagttggcagataccctttcggcaagttaccgcgactctggtcaggtgctggccgagcagattggcggtgccatcgaaaacagcctgaagtctcccctggaggccatcgccggagccgtgaataccgccagtggcgaccagagcaaccaggtgcagagcctactcaccgatgtgctcacagcctttatgagcaagctggagagtacctttggccagcagttcaacggtttgcacgagatgctggggcagtcggtagcggccatgcaatccatgcaacagggcttcaatgaactggtcggcgacatgcgctcggccagcgaggcttcatcgcagaacagcgccaagatgatcacgcagctgctggccgatatgcaggccgggcaaaacagcatgcaggccgggatgaacgagatgctggccaatctgcagacgtccatcgcgcgtatcggcagtgaaggtgagggggctggtgagcggatggccaagcagttggagaagctgttcgccgatagcgaagcgcgtcagcaagccatggcggcaaatctgcaggcctttgtcgaatccatgcagcagagcatgggccagggccagcaggagaccatggccaagatcgccaactcggtggatgtgctgggcgagcagttgggcggcctgttcaagcagcttgagcataaccgtacgcagatggaccaggccagcaaggtcgcccaggtcgaactgcaccgtggtacgcgcgagatggttggcgggctggaagagcaggtgaaaaccctgctggatgccgtcgccgatcagcaaggcgcgatgcaggacagcctcaaactgctgggagcgcaaaccgagcaacacctgcagagcatgcaacaaggcgccgagaagatgcgcctggcagccgagcgcttcgacagcgccgggcagagcgtgagtaaagccggcgaggcgactgcgggcgtgctgggcgcgctgcagggcacgagcagcgatcttgtcggcgcttcccgcgaactgaccagtgtggtggccgactatcgcaataaccgtgaagcactgaatcagacgcttgcggtcattcaaggtgtggtcgccactactcagggtgagtccgcggggcgtagtcagtacctgcaggatctgaagcagcaaggtgagcggctgcaggcgctcaatcgtgaagtgaacgactacctggagcagatcagcgcagtgctgggcaagggcttcaacgagtttagcgagggggtagatcgtagcctgcggcagacgctgggtagtctggatgccgagctgcacaaggcgatgaccagcctggccggtggtgtcgagggggtcaaggaaagcctggaagacttcagtgacatcatggagcgcgttcagcgccgctga

SEQ ID NO: 6712 - DNA, 738 bp, Pseudomonas aeruginosa VRFPA05
atgttcggcaaatcagccgctcccgctcgggcgcgtgacgagggcgagaagcctttctggatttcattcgccgacctgatgacggcgatgatgatcttgtttttggtggtgatggtggcctcgctgagctcggtgacgcagcgcattcagcaggctgaacaaggtgagaaacagcgcggcaaggacatcgctaagctctgccatgatctcagactgagggcgggggatcttaactccaccatcgtggtggactgccgggataaccgcattagcttcggtgaggctgggcgcttcggccacaatcaatacttcctcaacagccaggggcaacaggccctgcaggatgttgtgccgttgatcttggatgccgctgacagcgaagaggggcgcaagtggctcaagcaggtggtgatcgagggcttcaccgatacggacggctcttacctgtacaacctgcacctctcgctgcagcgctcggagtgggtgatgtgcagtctgctcgatagccgcagcccggtgcagaaaggcctttcagctgagcgtcaacagcagattcgctccatgtttctggctggcggtgtgtcgttcaacaatgccaaggagagcaaggaggagagtcggcgggtggagctgcgcatgcagttcttcgggctcaaggaccaggggcatgaaggtcaggaaccggcgcttgagtttgcttacgcggcaaacgagaaatgccagttggagatgcgctag

SEQ ID NO: 6713 - DNA, 1677 bp, Pseudomonas aeruginosa VRFPA05
atgaaccgggcactgtcgtctctgtcggcggccatcgcctcgggcctagagcgccagagtgagcgcagcggcgatgtaggtctcagtgctttgccctcgctgaagcgcgccagcaccgagctttctcggcgctttgatcaggtcgaaaaagccctggcaccgccccgtgagaaacgcttgctggcacttggcaagttcaagcgcgagcaggcgctgacttcatcagagtggcgcctggttttcgccgggctggccgatgacgatgaagtcagtgttccggtgctggaagacgatcagctgtttgaccgtgttcatcgggaggtggctggccgtatcgagcagcggtcacttagccgccgcgactggctggcgctgtgtttcagctactttgcctacgatgagcacaagcccgacgacaacgcgaactggcgggtgctgcgtgacgatattgatcgcggcttcgatgctgtcaggcagcgtattggtcgcgagaaagagtggatgcgcattgtagccgagcatcgcgaactgttcggcgctcaggctggggcccgtctggcggaggagatatttgagggcagggcgcgtgacctttcctctctgcaggccattgcccaggtgccggatggtagttggttgtggcagcggatatttgcggttctgctttcgcgcattttcctgctggatgacgaaaccttcctaaagcgcctgcgggagttggtagctctggggcaactgaatacgcgctatctcaatcaggtgctaagtgcctgccttactcgttatcaccgttcgcgatatcgcgaacagtcgtcctcgctactcaagcaggttgcgttggagcactggggcagcccacagatgcgttccaagcagaacgcctggttgcagtatgtggagcagcctgtctgcgccatggtggtggcctggttcgccaaggaagatctggaacacttcttcaccttgctcaagggcgaggcggaggtcgaccagtcgcgcctgttctactggctgcgattcaccaatcaaatgagctacacgcggattgtgatgggcagcgatgcctggcatgaccggagtagtgatttcgtggccttccgtgagaagaacaaaggacgcttgagtcagctaaccggagggtcaagccacatcaatgcggttgtgatgcagatcggtaactacttctttgttgagttttcaggtacgggccatgcctgctacgtctaccgggcggataggttgccatttaaccctgatcagcaagtgcttggtctgaatacagagctaaagcagaagggccataagcccgcgcctatgcggcactcacctgcgcccaggcgtcctaatgtggtcgaaggatggctggagaagtttgatgacgagctccgggcgctgggaatcgtcgcgcagcgtccagcttcatatacgcaaccccgcggttccgaagacaaacccgccgcccatagtgctgcgtctgcatccgtcgcgggtgattcgctggatgtgcaggttaagtcgatgttgggcagtgtgccctataagacgttcgatcaccgctcgaccagcggggtctaccaggttttgcttgccagggatgatgcggctgccaaaacagcgttgctgcgcctcggcttcaaggctgtgaaaaacaatgcactcatgttctggaggctttga

SEQ ID NO: 6714 - DNA, 3252 bp, Pseudomonas aeruginosa VRFPA05
atgctcggccgatttttttccgggaaggatcgttctcagcccaccaagggggcggtgcctggtgcttaccagattgaagaagaaggtctttgttatgccttgagtctggccgatgacgatgcaagctggcccgttgctgcctacctggaccagctctttgaagaggactatgccagccagttgagtgatcgctggctgttgccttgggagtcgatctatcagctcttggatgatccagagcacgctagcagccttcctttacttggcttgcccgcgattgccaatctgcaaccgcagttggccagtaccggcggattgtcggatccagatttcaaggtatttatccggtcctggcgcaatccgcagacgggcaacctgattactttcgagcgtgttggcgccgtggcgcgctatgccgagaccactgagctgctgccgcgggcggtctgggagctgttgaaggcgattcgggatctgcatgccactcagcagcaggcccctggagaagtcgccaaccagatcggttgggccaatatccgtaaattggccaaacgggctggtgcggggctggacgggttcctcgacaagaccgtggtggtcaaacccgagcacttgaggctgaagccgcgtaaggcagttgtcgccggtacgccgattatcgagttggatgtcgcgtttgatgggcagcctgacaattggttggccagtttcgatggttacaagcaggtgcaggataagtacagggtgccgggtgccgatggaacggtgacgcacgtgctgattgagccggatgtaaaggcggtgcttgaatctgttcgcgcgttaccggggcggcgggtagccggtgatgaagcgctgtcactggtgcgcaacccctacagcgtgatcggggatgcggccgagaaggttgttgatgcggacgagtatgaggagcagctggctgacgtgggcatctacttccatcgttttcgcctggaaccttgtctaggcgaagacggcaaacatattcagtcgattggtctgttccttgagcctatctcgtccaagccgctacccgaaattgagctgcgcttcgattttgcccatgagttcgcaccattcgtgaatgagctgcaggtgaagttggcagctggtatgcccgcgggattctggcagggctatgagctggagctgagtgacttcgatctcgcgcaattggcaggggtcaatgagcttttgcgccactggcagcgccaggaggccgggcagacattcgaggcggtgctggatttggcctcgtatggtgatcgcgtcgtcggcattggtgaggcggagcgcattacatccccatttttggtgaaagaggcaacggaaaactggttgccggcggatgtgaaagagcttggggtggatagcgaactgctcagccagtgggatcctgccagccgcgaagattttgaagagtttgagcaccgcatcgaccaggcgcgtatggcgggtgatgaacaggtatgtctaccgggtactgaaaccccgctacctttccaggtcgcggagcagctttatgaagcctggtcgaagaagcttaatccggtcgagccaaaaccacctgtagtgactgagcccgtcgctggtcgtgcggtgctgcatatcgagcacaacattgaggaagcgacctatgcccagcgccgtgaggcggctctgctggcagggcggcatgccaacgcggatattccagaactgcttcgccccgaagttcaactgcgcgatcatcaaatgaaaggtgtggcgtggatgcagcacctgtttggcttatcacccgatcatgtcgcgggttgcttgcttgccgatgacatgggcttgggtaagaccattcaactgctgaccttcgttgtttggtacttggagcagaatcctcagggtaaaccggtcctgattgttgcccccgtttccctgttggataactgggagcgtgagctgcagcgattcttctatgcggatgcattgccggtattgaagctttatggcggcgcgctcagcgctgtgaagttcaagaaggatgagattcccggggatctgcaggccaaggggataaaaaatcttctgcggccgggttggatgggcgatgctcgtatcgtgctgaccacctatgaaaccttgcgtgatcaggaactctccttggcacggcagcagtgggccatcgtgatctgcgacgaggcgcagaagatcaagaacccggcggcgctgatcacgcaagcggcgaaagcaatcccctctcgattccgtatcgcctgcacgggtacgccggttgagaacacgctgatcgatttgtggtgtcttttcgactttattcagccgggcttcctgggagggctaaatcagttcggtcgggagtatcaacgccccattgaagcaggcttggagcgcgatacagcagcgcttgaacgcctgcgtgggcttatcgaaccccagacattgcggcgtaccaagcaggatgtggcgaaggatctcccggccaaaatcgaggaccaggggtgccgcaaactgctgatgcacacgttgcagcgcaatctctatttgtccgaggttgcccagtacacacagaagcagcagatgcaggagcaattggagcagcgagagagcggcatgctcggcctgctgcacaagctcaagttggtgtgcgcccacccgttcagcgtacagcctgacccacgcttgagggagcactcgccgaagcttcaatggctcttaagcacgctggataacattgcgcgttcggacagcggcgataaggtcatccttttcaccgagttgcgggacatccaacgtgaattgcagcatgcgattcaggaacgcttcggcttcaaacccacggtaatcaatggcgataccagcaccagcagccagagtgcacagagccggcagcgactgatcgaccgttttcaagagcagcctggcttctcggtgataatcctctccactgttgcggttggattcggtgtgaacgtgcaggcagccaaccacgttatccatttcactcgctgctggaatccggccaaagaggatcaggcaaccgatcgcgcttaccggattgggcaggagaaggacgtgtacgtctattacccgaccgtacgtgatgcggggatgcctacatttgaggcgacgctggatgagctgctacagaagcgacgcgcgttggcgcgggatatgctgcatggggcatctgagcttcaggtatctgagtttggggaactgttaagggcgcaaggatga

SEQ ID NO: 6715 - DNA, 2127 bp, Pseudomonas aeruginosa PS42; identical to SEQ ID NO: 6656

SEQ ID NO: 6716 - DNA, 765 bp, Pseudomonas aeruginosa PS42; identical to SEQ ID NO: 6657

SEQ ID NO: 6717 - DNA, 2013 bp, Pseudomonas aeruginosa PS42; identical to SEQ ID NO: 6689

SEQ ID NO: 6718 - DNA, 3042 bp, Pseudomonas aeruginosa PS42
atgagcttgatggatatttttcggtcgctgattggtgagcgagacggggcgctcagtactcagcaaggctttcagtctcagcctgattccaatggcttgaatttctacctgcccttgccggccttcaaggcgctgcaaaccgggcagggcagtgctttagaaaagattcagctgatcgtgctcaacatgctggttgagcaagggattgccgaaaacacggccaacggttttcacatcggtgccgaagatattgcggggatggatcttgagcaggcggaaatcttgcgtttgccgagacgcttgccagggcactttctaacctcaatcagtgggcgcacgggcaacagtggttttcgtgtggcgatcacgctggaaatgccagacggccctgccagcttcagtcgcaaaggcccctatctgtacctgaccagcagtgagtgctattggctgacgccggctgaaattatggggttgcaggcttgggaactgcatgagtctttaggcccagaacagcgaggagaggcggctaatctgcgcctgatggccgagctgcagaccgctgcgcgcagcgggatgcgtattgatcttagccactttgagcggctagatgtggtggtgcctcagaacatcggagttatcgctacgcgtttaccagatggcagcctccaactctgcccgagccttggggatggctccagtgctgaccagctggaaaaacgctggtcgcagttggatatgaccgccgatggtggtgtgctgcgcatcgacaatcgtgtgttgctgctggatcaggcgcggatggatggcatccgcaatgtgctggccaacaaacgtatcccggctgatcaggtcaacgagtttattgccacgccaacggcgtttctcgatgctgcgctggtcaatcttgaggtgggcttttctgcccgggttgcgggtataggcaaacttcagcacatggatttcggtgtcctggatgcaaccaagaatgactggtttgcgcttgataagcgcccggcacctgcagcgatcctgagcaagctgattcagtctcctgaggatttgcagcgcttcgaggaggtactgcaggcggctaatgaacagggcgcgacgagtctgtcgtttgctggcgaggtgatcgatatctctgacgcgccgactgttcagcaagagctggccagggctcgccagaacatggctcatgtgagcgatagcgagccgcacagcgaggagggtgttctccctggggaggacaaggagaaagtcggggtcattctgaaggatgccgacgagattaattctgcgctgttgcgtaaggctgctgctgcgaagccgctggtggtgccagattggtcggcctatgcccgggagccgttccctcatcagcgtgaggggatcgagtggatgctgaagctgatgggcgcagcgttgcaggatgaaactgatgatctctatcgcctgcagggtggtttgcttgcagatgacatgggtctcggcaagacatacatgtcgctggtcgcagtcggggagtatctggccagtcagcgcgcggctgacaagccgcagaagccggttctggtggtggcgccactgagtctgctggaaaactgggaggatgaagtcggtaagaccttcgccagcatcccgttccgcgatgtggtggtgctgcagtcggggcggagtctgcgtgactatcgcgtcaaaggtgctgagcgtgaatcggtgcagttggcgtcgatgattgatgacagcagcggcatgatggatgagcagagcattcgctatgcactgcatgtggggccggaagcaggcgtgcatcgtctggacatggaccgtcgcttagtgctcacgacctatcagaccctgcgtgattatcagttctccctgtgccgaatcgactggggcatggtcatcttcgacgaggcgcagaacatcaagaatcccaatgcactgcagactattgccgctaaagggctcaaggcggatttcaaactgttggcgactggcacaccggtagaaaatagcctgggcgatttctggtgcctgatgcatacggtgcagcctggcttacttggtggctgggaaagcttccgcgatacctggatcaagccaattctggctgcaagcgatgaagagcgtgatgaggtacgggcgcgtttgggcgagcagctgcggcgtgctgtaggcatattcatgttgcggcgggttaaagaagatcagctcaaaggcctaccagccaagactattctcagtggtgtcgagcaagccgatcatggcctgcaacggtatgcagcgcagttgggtgtggtgatgaaaggcatccagttgcaggcctacgacgaagtcctcgacagctatcgggctcgtcgtgcaagcgctgaggatatgcgtggtaccgcactggcggctttgactcagcttcgctccatttccctgcacccacggctggagaatgagtcggcgctgtactgcgaggatggcaagcacgcgcgacaactgatgatggagtccggcaagctggcggtgctgctgcagttactcgatgagatccgtagcaagggtgaaaaggtcatcctgttcatgatgaccaagcgcctgcaacgagtcctcaagctctggctggatcagatctatgacctgaatgtagcggtgatcaatggtgacacccaggctgtggcgactcgcgccgaggatatgacgcgcaagaagctaattgccgagtttgaagcgaaaagtggcttcaacatcctgatcatgtcgccagtagccgctggtgtcggtttgacggtgattggggccaaccatgtggtgcatttagagcgtcattggaacccggctaaagaagcgcaagcgtctgatcgggtttaccggatcggccaaaccaagcccgtgttcatccatctgcctgccgtcactcacccccagtttgattccttcgatgtacaccttgaccgcttattgcgcggaaagctgatgcttaaagacgcggtagtgacaccagaggcggttagtgaaagtgagatgattcaatcgatggggctctga

SEQ ID NO: 6719 - DNA, 2127 bp, Pseudomonas aeruginosa PA38182; identical to SEQ ID NO: 6656

SEQ ID NO: 6720 - DNA, 765 bp, Pseudomonas aeruginosa PA38182; identical to SEQ ID NO: 6657

SEQ ID NO: 6721 - DNA, 768 bp, Pseudomonas aeruginosa PA38182
gtgaagctgcctcctgttcacatgccggtcgctgaatgggcgcccgtggtgcgggagcgatggacggtgctggtcgaaaaggtcgctcgaatgaaggccgcaagtggcaagagtgacgcctttgaagccatgttggcacgattgcgtgacatggcgagtacagggcgttttgacggcctgcctgagctgctaaaacgtcgtcttactgcgcgtgcgttgacctggttgtggctcaacgacgagaccatgggtaggcgtttgcttagttcgcgtctgctttcggtgctggtcgatgctcagcagccgaggctgacgcgtatcaccttacagcagttggctcagttctactttcgtcgcttcgacaagctggatgagcacgatgggctgcgtaagcagcttgagcagattttgctccagcaactgcatttactgcccgaacccaaagtaagtggcccccaggctgatccgctggtaacgctcaagcgtgatgctcattggttgttgccgcctgacgggccagtccaactggttgagcgggtacgcgacagtggccatgagctgggcgagacctttgaggtcatgggattgcagggctttgatgacgggcgttatggcgatatctgccgggcccacttctacctggaaaccctacgaggcttgcgcccggtgagtacgaccccgtgctggatgagctgcagaagcccgctgtgtccaaggctccgtacgagggcgagcgtcgtatcggccatgttgcgctggagattctga

SEQ ID NO: 6722 - DNA, 3087 bp, Pseudomonas aeruginosa PA38182
atgagcttgatggatatttttcggtcgctgattggtgagcgagacggggcgctcagtactcagcaaggctttcagtctcagcctgattccaatggcttgaatttctacctgcccttgccggccttcaaggcgctgcaaaccgggcagggcagtgctttagaaaagattcagctgatcgtgctcaacatgctggttgagcaagggattgccgaaaacacggccaacggttttcacatcggtgccgaagatattgcggggatggatcttgagcaggcggaaatcttgcgtttgccgagacgcttgccagggcactttctaacctcaatcagtgggcgcacgggcaacagtggttttcgtgtggcgatcacgctggaaatgccagacggccctgccagcttcagtcgcaaaggcccctatctgtacctgaccagcagtgagtgctattggctgacgccggctgaaattatggggttgcaggcttgggaactgcatgagtctttaggcccagaacagcgaggagaggcggctaatctgcgcctgatggccgagctgcagaccgctgcgcgcagcgggatgcgtattgatcttagccactttgagcggctagatgtggtggtgcctcagaacatcggagttatcgctacgcgtttaccagatggcagcctccaactctgcccgagccttggggatggctccagtgctgaccagctggaaaaacgctggtcgcagttggatatgaccgccgatggtggtgtgctgcgcatcgacaatcgtgtgttgctgctggatcaggcgcggatggatggcatccgcaatgtgctggccaacaaacgtatcccggctgatcaggtcaacgagtttattgccacgccaacggcgtttctcgatgctgcgctggtcaatcttgaggtgggcttttctgcccgggttgcgggtataggcaaacttcagcacatggatttcggtgtcctggatgcaaccaagaatgactggtttgcgcttgataagcgcccggcacctgcagcgatcctgagcaagctgattcagtctcctgaggatttgcagcgcttcgaggaggtactgcaggcggctaatgaacagggcgcgacgagtctgtcgtttgctggcgaggtgatcgatatctctgacgcgccgactgttcagcaagagctggccagggctcgccagaacatggctcatgtgagcgatagcgagccgcacagcgaggagggtgttctccctggggaggacaaggagaaagtcggggtcattctgaaggatgccgacgagattaattctgcgctgttgcgtaaggctgctgctgcgaagccgctggtggtgccagattggtcggcctatgcccgggagccgttccctcatcagcgtgaggggatcgagtggatgctgaagctgatgggcgcagcgttgcaggatgaaactgatgatctctatcgcctgcagggtggtttgcttgcagatgacatgggtctcggcaagacatacatgtcgctggtcgcagtcggggagtatctggccagtcagcgcgcggctgacaagccgcagaagccggttctggtggtggcgccactgagtctgctggaaaactgggaggatgaagtcggtaagaccttcgccagcatcccgttccgcgatgtggtggtgctgcagtcggggcggagtctgcgtgactatcgcgtcaaaggtgctgagcgtgaatcggtgcagttggcgtcgatgattgatgacagcagcggcatgatggatgagcagagcattcgctatgcactgcatgtggggccggaagcaggcgtgcatcgtctggacatggaccgtcgcttagtgctcacgacctatcagaccctgcgtgattatcagttctccctgtgccgaatcgactggggcatggtcatcttcgacgaggcgcagaacatcaagaatcccaatgcactgcagactattgccgctaaagggctcaaggcggatttcaaactgttggcgactggcacaccggtagaaaatagcctgggcgatttctggtgcctgatgcatacggtgcagcctggcttacttggtggctgggaaagcttccgcgatacctggatcaagccaattctggctgcaagcgatgaagagcgtgatgaggtacgggcgcgtttgggcgagcagctgcggcgtgctgtaggcatattcatgttgcggcgggttaaagaagatcagctcaaaggcctaccagccaagactattctcagtggtgtcgagcaagccgatcatggcctgcaacggtatgcagcgcagttgggtgtggtgatgaaaggcatccagttgcaggcctacgacgaagtcctcgacagctatcgggctcgtcgtgcaagcgctgaggatatgcgtggtaccgcactggcggctttgactcagcttcgctccatttccctgcacccacggctggagaatgagtcggcgctgtactgcgaggatggcaagcacgcgcgacaactgatgatggagtccggcaagctggcggtgctgctgcagttactcgatgagatccgtagcaagggtgaaaaggtcatcctgttcatgatgaccaagcgcctgcaacgagtcctcaagctctggctggatcagatctatgacctgaatgtagcggtgatcaatggtgacacccaggctgtggcgactcgcgccgaggatatgacgcgcaagaagctaattgccgagtttgaagcgaaaagtggcttcaacatcctgatcatgtcgccagtagccgctggtgtcggtttgacggtgattggggccaaccatgtggtgcatttagagcgtcattggaacccggctaaagaagcgcaagcgtctgatcgggtttaccggatcggccaaaccaagcccgtgttcatccatctgcctgccgtcactcacccccagtttgattccttcgatgtacaccttgaccgcttattgcgcggaaagctgatgcttaaagacgcggtagtgacaccagaggcggttagtgaaagtgagatgattcaatcgatggggcttatgctggctcgacgccgcagcttggctcaaccagccaaacctgcctag

SEQ ID NO: 6723 - DNA, 2196 bp, Pseudomonas aeruginosa PA38182
atggacttcacgaattggttggatttgttagggaaagcaacacacgagcaattgactgcgcccgccttcgtggtgagcttggtgacgttgctatgcctttggtacggcgtgcgttacttcctgtattcgttcgttctgagccgccgcatcaagcgggtgtcgaaggaggttcgcgccgtcggcgagctgcaaccggccaagcgtcgaggtgcactggagcaggtattccagaagcctccactgcaacatgcgtggcaggaatacgcggaaacgctgcacgaccaatttgaagtgcgtgatggcgagcggcagctgctgcgctctcgggcaacggctggcgctggacacttctttacgtcgcagacagtggtggaaacaccgcttggcactgagttctacaagcacttgccgggcattctgaccggcatcgggattgttggtaccttcttcggcttgatgctgggcctgcagcatttcaatccaggtacgcctgagcaggtcaacgccagcgtcgaccaattgctcaaggacgtactatttgccttcctgggctccttcttctcgatctttgcctccatcgccgtcacgctcactgagaagtggcgcctggggcgctgctacaagcacctggaaaaactgaccgaggccatcgacggcctattcgacagcggcgtcggcgaggagtatctggccgaactggtaaagtcgagcaatgaaagctcgatccagacgcgccaactgaaggacagccttgtcaccgacctgcgcgagatgctgcagaacctggtggacacccaggtgcgcgaaagcctgaagctggccgacaccctgtccgccagttaccgcgactccggccaggtgctggccgagcagattggtggtgcgatcgaaagcagtttgaaggctccactagagcaaattgcaggcgctgtccaatcggcgagtggcgaccagagcaaccaggtgcagagtctgctgcaggatgtgctggtggccttcatgaataagctggagagcaccttcggccagcagttcaatgggctacacgaaatgatggggcagtccgtggccgccatgcagtccatgcagcagggcttcaatagcctggtggacgacatgcgttcggctagcgagagctccacgcaaaacagcgcgaagatgatcgcgcagctcctggccgatatgcaggctgggcagaacagtatgcaagccagtatgaatgagatgctggccaatctgcaggcctccattgcgcgaatcggcagtgaaggcgagggggccggcgagcgcatggcccagcagttggagaagctattcgccgagagcgaagcgcgccagcaagccatggcggaaaacctgcaggcctttatcgagacgatgaagcagaacatcggccaggggcagcaggaaaccatggccaaaatcgccggctcggtggatgttcttggcgagcagttgggcgccatgttcaagcagatggagcagggccgcgcgcagatggaccaggctactaaggttgcccaggtcgagctacaccgcggtactcgcgagatggttggtgatcttgagaagcaggtcaatgacctgttggatgcggtagctgagcagagcggctccatgcaggacaccgtcaagctgctcagcgctcagaccgagcaacatttgcagagcatgcaagctggcgcggagaagatgcgcgtcgcagcagaacgcttcgaaacggcgggcctaagcgtcaccaaggccggtgaagccactgctaacgtacttggggctatgcagggcaccggaaccgaactggtgggtgcctcgcgggaactcagcagcatcgtggccgactatcgcaacaaccgcgacgccctggctcaaaccctgagcgtgattcaaggtgtggttgccagcgcgcaaagcgaggcctccggacgcacccagtacctgctggatatgaagcagcagagcgagcggctgcaagcgctgaaccgtgaggttcatgactacctcgagcagatcagtggtgtgctgggcaagggcttcggggagttcaccgagggcgtcgaccgtagcctgcgacagaccctgggcagcctggatgccgaactgcacaaggccatgactagcctggccggtggcgtcgagggtgtgaaggaaagcctggaagacttcagcgacatcatggaaagcatccagaaaaagtga

SEQ ID NO: 6724 - DNA, 738 bp, Pseudomonas aeruginosa PA38182; identical to SEQ ID NO: 6673

SEQ ID NO: 6725 - DNA, 1644 bp, Pseudomonas aeruginosa PA38182; identical to SEQ ID NO: 6674

SEQ ID NO: 6726 - DNA, 3252 bp, Pseudomonas aeruginosa PA38182; identical to SEQ ID NO: 6675

SEQ ID NO: 6727 - DNA, 2127 bp, Pseudomonas aeruginosa VRFPA09; identical to SEQ ID NO: 6656

SEQ ID NO: 6728 - DNA, 765 bp, Pseudomonas aeruginosa VRFPA09; identical to SEQ ID NO: 6657

SEQ ID NO: 6729 - DNA, 1992 bp, Pseudomonas aeruginosa VRFPA09
atgccggtcgctgaatgggcgcccgtggtgcgggagcgatggacggtgctggtcgaaaaggtcgctcgaatgaaggccgcaagtggcaagagtgacgcctttgaagccatgttggcacgattgcgtgacatggcgagtacagggcgttttgacggcctgcctgagctgctaaaacgtcgtcttactgcgcgtgcgttgacctggttgtggctcaacgacgagaccatgggtaggcgtttgcttagttcgcgtctgctttcggtgctggtcgatgctcagcagccgaggctgacgcgtatcaccttacagcagttggctcagttctactttcgtcgcttcgacaagctggatgagcacgatgggctgcgtaagcagcttgagcagattttgctccagcaactgcatttactgcccgaacccaaagtaagtggcccccaggctgatccgctggtaacgctcaagcgtgatgctcattggttgttgccgcctgacgggccagtccaactggttgagcgggtacgcgacagtggccatgagctgggcgagacctttgaggtcatgggattgcagggctttgatgacgggcgttatggcgatatctgccgggcccacttctacctggaaaccctacgagggcttgcgcccggtgagtacgaccccgtgctggatgagctgcagaagcccgctgtgtccaaggctccgtacgagggcgagcgtcgtatcggccatgttgcgctggagattctgatcgatcgtgctggacaggagccgggtgaggtctggcagaactttattctgaatctggcgggggatccgcggatctcacgtaactcccccaattaccgcgagtggtggcagttcctcggtgaggagcgggtgcagaaggttcggggctggttgtccaaggaagatttgcggctgtttttgcaggcggtggaacagtttggaatcgaaacgcagaacgacgatctgcagcgcatgttccctgcacgcaagcagttcctagaggggctgtttaagctcaaactgatccgcaatacccgcttgctgcttggcgggcgggcacagcattcggtaaagcgcattctcggtaaagatgtgcaaaccagttttgccagcatggacgggcagatgaatgacaaggcggtcatctatctcgattgcggagactttcatctggtcgagggttcccacagttttaaaatctgggtctatctcgccgcgccgggagaggctttgcgttcctacgagcgctccagcttcagtcattccgatctgactacggctgttcctaaggcctacaagcgactgtatcctgagttgccctatgatgccttcacgcatcacccccctctttcctggcagaaccgggtattcagcttcctggctgataacggcatcgctctagatatcgagcagttgctcaatcgcagtgactaccagccttaccttcgtaaatttggtatgcctgtggtcaatgccaagcgaacacccgtgccgcctccaagtcagacagattttcccgcagagccggcgcgttcacgtgttggcaagactggcgcgacaacgatgtcagcgcctcaggggcgtaagcctgcagagatgattgcgagggactccagagctattcctagagaagaggcggccacagtacggcgaagcaaccagcagcatgatccggtagtgtcgcactccgtcagttcacctgatgcggctgctcctgcaacggcacgtccgtctctggtaggtgaaggattattgacaggcttgaaaccctctgcactgaagatactgcgctacttcgtggacaaccccggtgacaaagtccgatatgcagcgaatgttttcggtgtggactcgcgtgaaatcaatcagattttgtatggcccgttgaaggacatgtgcacgcgtgatgagcagttcggctggacggtgaatgaggcggcacgtctcgcgcttgaggcgttggatgaacaggacagggctgaataa

SEQ ID NO: 6730 - DNA, 2347 bp, Pseudomonas aeruginosa VRFPA09
atgagcttgatggatatttttcggtcgctgattggtgagcgagacggggcgctcagtactcagcaaggctttcagtctcagcctgattccaatggcttgaatttctacctgcccttgccggccttcaaggcgctgcaaaccgggcagggcagtgctttagaaaagattcagctgatcgtgctcaacatgctggttgagcaagggattgccgaaaacacggccaacggttttcacatcggtgccgaagatattgcggggatggatcttgagcaggcggaaatcttgcgtttgccgagacgcttgccagggcactttctaacctcaatcagtgggcgcacgggcaacagtggttttcgtgtggcgatcacgctggaaatgccagacggccctgccagcttcagtcgcaaaggcccctatctgtacctgaccagcagtgagtgctattggctgacgccggctgaaattatggggttgcaggcttgggaactgcatgagtctttaggcccagaacagcgaggagaggcggctaatctgcgcctgatggccgagctgcagaccgctgcgcgcagcgggatgcgtattgatcttagccactttgagcggctagatgtggtggtgcctcagaacatcggagttatcgctacgcgtttaccagatggcagcctccaactctgcccgagccttggggatggctccagtgctgaccagctggaaaaacgctggtcgcagttggatatgaccgccgatggtggtgtgctgcgcatcgacaatcgtgtgttgctgctggatcaggcgcggatggatggcatccgcaatgtgctggccaacaaacgtatcccggctgatcaggtcaacgagtttattgccacgccaacggcgtttctcgatgctgcgctggtcaatcttgaggtgggcttttctgcccgggttgcgggtataggcaaacttcagcacatggatttcggtgtcctggatgcaaccaagaatgactggtttgcgcttgataagcgcccggcacctgcagcgatcctgagcaagctgattcagtctcctgaggatttgcagcgcttcgaggaggtactgcaggcggctaatgaacagggcgcgacgagtctgtcgtttgctggcgaggtgatcgatatctctgacgcgccgactgttcagcaagagctggccagggctcgccagaacatggctcatgtgagcgatagcgagccgcacagcgaggagggtgttctccctggggaggacaaggagaaagtcggggtcattctgaaggatgccgacgagattaattctgcgctgttgcgtaaggctgctgctgcgaagccgctggtggtgccagattggtcggcctatgcccgggagccgttccctcatcagcgtgaggggatcgagtggatgctgaagctgatgggcgcagcgttgcaggatgaaactgatgatctctatcgcctgcagggtggtttgcttgcagatgacatgggtctcggcaagacatacatgtcgctggtcgcagtcggggagtatctggccagtcagcgcgcggctgacaagccgcagaagccggttctggtggtggcgccactgagtctgctggaaaactgggaggatgaagtcggtaagaccttcgccagcatcccgttccgcgatgtggtggtgctgcagtcggggcggagtctgcgtgactatcgcgtcaaaggtgctgagcgtgaatcggtgcagttggcgtcgatgattgatgacagcagcggcatgatggatgagcagagcattcgctatgcactgcatgtggggccggaagcaggcgtgcatcgtctggacatggaccgtcgcttagtgctcacgacctatcagaccctgcgtgattatcagttctccctgtgccgaatcgactggggcatggtcatcttcgacgaggcgcagaacatcaagaatcccaatgcactgcagactattgccgctaaagggctcaaggcggatttcaaactgttggcgactggcacaccggtagaaaatagcctgggcgatttctggtgcctgatgcatacggtgcagcctggcttacttggtggctgggaaagcttccgcgatacctggatcaagccaattctggctgcaagcgatgaagagcgtgatgaggtacgggcgcgtttgggcgagcagctgcggcgtgctgtaggcatattcatgttgcggcgggttaaagaagatcagctcaaaggcctaccagccaagactattctcagtggtgtcgagcaagccgatcatggcctgcaacggtatgcagcgcagttgggtgtggtgatgaaaggcatccagttgcaggcctacgacgaagtcctcg

SEQ ID NO: 6731 - DNA, 2196 bp, Pseudomonas aeruginosa PA99
atggactattcgaagtggttggacctttgggataaggcaacacccgagcagctgattgctcccgtgttcgtatttagtctggtgacggtgctgtgcctttggtacttgctgcgttacttcctgcgctcatttgcattgagtcggcgcttgaagaagctcacgcggcaggtgcgggcaatcaaggagctgcagccggccaagcgccgtagcgagctggagcagctgttccaggagcatacgctggggcatgcctggcaggagtatgccgagacgctgcatgatcagttcgaggtgcgcgagggtgagcagcgcatgctgtgctcccgtgccacggcgggcgcgggacatttcttcaccgcgcaaacggtggtggagacgccgctggggaccgagttttacaagcacctgccgggcatcctgacggggatcgggattgtcggcaccttcttcggcttgatgctgggcctgcagcacttcgaccccagcacacccgagcaggtcagctccagcgtcgatcagctgctcaaagatgtgctgtttgccttcctcggttccttcttctcgatcttcgcttcgattggcgtgaccttgactgagaagtggcgcctgggccgctgttacaagcacctggaggccctgacggaaagtatcgacggcctgttcggcagcggggtaggtgaggagtatctggcagaactggtgaagtcgagcaacgagagctcgatccagactcgtcagctcaaagacagtctggttaccgacctgcgcgagatgctgcagaacctggtggatacccaggtgcgtgagaatctcaagttagcagataccctttcggcaagttaccgcgactctggtcaggtgctggcccagcagattggcggtgccatcgaaaacagcctgaagtctcccctggaggccatcgccggagccgtgaataccgccagtggcgaccagagcaaccaggtgcagagcctactcaccgatgtgctcacagcctttatgagcaagctggagagtacctttggccagcagttcaacggtttgcacgagatgctggggcggtcggtagcggccatgcaatccatgcaacagggcttcaatgaactggtcggcgacatgcgctcggccagcgaggcttcatcgcacaacagcgccaagatgatcgcgcagctgctggccgatatgcaggccgggcaaaacagcatgcaggccgggatgaacgagatgctggccaatctgcagacgtccatagcgcgtatcggcagtgaaggtgagggggctggtgagcggatggccaagcagttggagaagctgttcgccgatagcgaagcgcgtcagcaagccatggcggcaaatctgcaggcctttgtcgaatccatgcagcagagcatgggccagggccagcaggagaccatggccaagatcgccagctcggtggatgtgctgggcgagcagttgggcggcctgttcaagcagcttgagcataaccgtacgcagatggatcaggccagcaaggtcgcccaggtcgaactgcaccgtggtacgcgcgagatggttggcgggctggaagagcaggtgaaaaccctgctggatgccgtcgccgatcagcaaggcgcgatgcaggacagcctcaaactgctgggggcgcaaaccgagcaacacctgcagagcatgcaacaaggcgccgagaagatgcgcctggcagccgagcgcttcgacagcgccggacagagcgtgagtaaagccggcgaggcgactgcgggcgttctgggtgcgctgcagggcacgagcggcgatctggtcggcgcttcccgcgagctgaccagtgtggtggccgactatcgcaataaccgtgaagctctgaatcagacgcttgcggtcattcaaggtgtggtcgccactactcagggtgagtccgcggggcgtagccaatacttgcaggatctgaagcagcaaggcgagcggctgcaggcgctgaatcgtgaagtgaacgactatctggagcagatcagcgcagtgctgggcaagggcttcaacgagtttagcgagggggtagatcgtagcctgcggcagacgctgggtagcctggatgccgagctgcacaaggcgatgaccagcctggccggtggtgtcgaaggggttaaggaaagcctggaagacttcagtgacatcatggagcgcgttcagcgccgctga

SEQ ID NO: 6732 - DNA, 738 bp, Pseudomonas aeruginosa PA99
atgttcggcaaatcagccgcccccgctcgggcgcgtgacgagggcgagaaacccttctggatttcattcgccgacctgatgacggcgatgatgatcttgtttctggtggtgatggtggcctcgctgagttcggtgacgcagcgcattcagcaggctgaacaaggggagaaacagcgtggcaaggacatcgctaagctctgccagcacctcaagctgagggcgggggatcttaactccaccatcgtggtggactgccgggataaccgcattagcttcggtgaggctgggcgcttcggccacaatcaatacttcctcaacagccaggggcaacaggccctgcaggatgttgtgccgttgatcttggatgctgctgacagcgaagaggggcgcaagtggctcaaacaggtggtgattgagggcttcaccgatacggacggctcttacctgtacaacctgcacctctcgctgcagcgctcggagtgggtgatgtgcagtctgctcgatagccgcagcccggtgcagaaaggcctttcagctgagcgtcaacagcagattcgctccatgtttctggctggcggtgtgtcgttcaacaatgccaaggagagcaaggaggagagtcggcgggtggagctgcgcatgcagttcttcgggctcaaggaccaggggcatgaaggtcaggaaccggcgcttgagtttgcttacgcggcaaacgagaaatgccagttggagatgcgctag

SEQ ID NO: 6733 - DNA, 1677 bp, Pseudomonas aeruginosa PA99
atgaaccgagcactgtcgtctctgtcggcggccatcgcttcgggcctagagcgccagagtgagcgcagcggcgatgtagggctcagtgccttgccctcgctaaagcgcgccagcaccgagctttctcggcgctttgatcaggtcgagaaagccctggcaccgccccgtgagaaacgcttgctggcacttggcaagttcaagcgcgagcaggcgctgacttcatcggagtggcgcctggttttcgccgggctggccgatgacgatgaagtcagtgttcctgtgctggaagacgatcagctgtttgatcgtgttcatcgggaggtggctggccgcatcgagcagcggtcactcagtcgccgcgactggctggcactgtgtttcagctactttgcctacgatgagcacaagcccgacgacaacgtgaactggcgggtgctgcgtgacgatattgatcgtggcttcgatgctgtcaggcagcgtattggtcgcgagaaagagtggatgcgcattgtagctgagcatcgcgaactgttcggagctcaggctggaactcgtctagcggaggagatattcgagggcagggcgcgtgacctttcctctctgcaggccattgcccaggtgccggatggtagttggttgtggcagcggatttttgcggttctgctctcacgcattttcctgctggatgacgaaaccttcctaaagcgcctgccggaattggtagctctggggcagctgaatacgcgttatctcaatcgggtgctgagtgcctgcctgactcgttatcaccgttcgcgatatcgcgagcagtcgtcctcgctactcaagcaagctgcgttggagcactggggtagcccacagatgcgttccaagcagaacgcctggttgcaatatgtggagcagcctgtctgcgccatggtggtggcctggttcgccaaggaagatctggagcacttcttcaccttgctcaagggcgaggcggaggttgaccagtcgcgcctgttctactggctgcgctttgccaatcaaatgagctatacgcggattgtgatgggtggcgatgcgtggcatgaccggggtagtgatttcgtggccttccgcgagaaaaacaaagggcgtttgagtcagcttaccggtgggccgagtcacaacaacgcggtggtgatgcagataggcaactacttttttgtcgagttctccggtaccggcaatgcgtgctacgtctatcgtgctgatgccgctccattcaatcctgacaaacaggtgctggggctggcaactgagctgaagcagcaaggacgggcgctgaagcgtatgtcccactctccagccccgcggcgacccaatgtggtcgaagggtggctggataagtttgatgacgagctccgagcgctgggaatcgtcgcgcagcgtccggcgtcatatacgcaaccccgcgtttctgaagacaagcccgccgcccatagtgctgcgtatgcatctgtcgcgggtgactcgctcgacgttcaggttaagtccatgttgggcagtgtgccctataagacgttcgaccaccgctcgactagcggggtctaccaggttttgcttgccagggatgatgcggctgccaaaacagcgctgctgcgcctcggcttcaaggctgtgaaaaacaatgcactcatgttctggaggctttga

SEQ ID NO: 6734 - DNA, 3249 bp, Pseudomonas aeruginosa PA99
atgctcggacgatttttttccgggaaggatcgttctcagtccgccaagggggcagcgcctggtgcttaccagatcgaagaacaaggtctttgttatgccttgagtctggccggcgacgatgcaagctggcccgtcgcggcctacctggaccagctctttgaagaggactatgccagccagctgagtgatcgctggttgttgccttgggagtcgatctatcagctcttggatgatccggagcacgcgagcagccttcctttacttggcttgcccgcgatttccgagctacagccacagttggccagcaccggtggcttgtcggatccggatttcaaggtgtttatccagtcctggcgcaatccgcagacgggtaacccgattactttcgagcgtgttggcgccgtggtgcgttatgccagcgccactgaattactgccgcgagcggtctgggagcttttgaaggccattcgggatctgcatgccattcagcagcaggccccgggagaagtcaccaaccagatcggttgggccaatatccgtaagttggccaaacgcgctggtgcgggattggacgggttcctcgacaaaactgtggtggtcaagcctgagcacttgaagctgaagccgcgtaaggccgttgtcgcgggcacgccgattatcgagttggatgtcgcgtttgatgggcagcctgacaattggttggccagcttcgatggttacaagcaggtacaggataagtatcgagtaccgggtgccgatggaacggtgacgcatgtgctgattgagccggatgtaaaggcagtgcttgagtctgttcgcgcactaccggggcggcgagtggctggcgatgaagcgctgtcactggtgcgcaacccctacagcgtgatcggggatgcggccgagaaagtggtcaatgcggacgagtatgaggagcagctggccgacgctggcatctacttccatcgtttccgcttggagccttgcctaggcgaagacggcaaacatattcagtcgattggtctgttccttgagcccatctcggccaagccgctgcccgaagtcgagctgcgcttcgattttgcacatgaattcactccattcgtgaatgagctgcaagtgaagttggcggctggtatgcccgcgggattctggcagggctatgagctggagctgagtgacttcgatctcgcgcaattggcaggggtcaatgagcttttgcgccactggcaacgccaggaggccgggcagacattcgaggcggtgctcgatttggcctcgtatggtgatcgcgtcgttggtatcggtgaggctgagcgcattacatctccgtttttggtgaaagaggcaacggaaaactggttgccggcggatgtgaaagagcttggggtggatagcgaattgctcagccagtgggatcctgccagccgcgaagattttgaagagtttgagcatcgcatcgaccaggcgcgtatggcgggtgatgaacaggtatgtctaccgggtactgaaactccgctacctatccaggtcgcggagcagctttatgaggcctggtcgaaaaaaattaacccggtcgagcctaaatcatctgctgctgagccggcagccggtcgtgcggtgctgcatatcgagcacaacattgaagaagcgacctacgcccagcaccgcgaggcggcactgttggcggggcggcatgcgaatgcggatctcccggagctgcttcgtcctgaggtacagctgcgcgatcatcagatgaaaggtgtagcatggatgcagcacctgtttggcttatcaccggatcatgtcgcgggttgcttgcttgccgatgacatgggcttgggtaagaccattcaactgctgaccttcgttgtttggtatttggagcagaatcctcagggtaaaccggtcctgattgttgcccccgtttccctgttggataactgggagcgtgagctgcagcgattcttctatgcggatgcattgccggtattgaagctttatggcggcgcgctcagcgcggtgaagttcaagaaggacgagattcctgaggatctgcaggccaaggggataaaaaatcttctgcggccgggttggatgggcgatgctcgtatcgtgctgaccacctatgaaaccttgcgtgatcaggaactctccttggcgcggcagcaatgggccatcgtgatctgcgacgaggcgcagaagatcaagaacccggcggcgctgatcacgcaagcggcgaaagcaatcccctcgcgattccgcatcgcctgcacggggacgccggtggagaacacgctgatcgatttgtggtgtcttttcgactttatccagccgggcttcctgggggggctgaatcagttcggtcgggagtatcaacgccccatcgaggccggcatgcagcgggacacggcggcgcttgaacgcctgcgtggacttatcgaaccccagacattgcggcgtaccaagcaagatgtggcgaaggatctcccagccaaaatcgaggatcagggatgtcgtaagctgcagatgcacacgttgcagcgcaatctctatttgtccgaggttgcccagtacacacagaagcagcagatgcaggagcaactggagcagcgagagagcggcatgctcggcctgctgcacaagctcaaactggtgtgcgcgcacccgttcggcgtgcagcctgatcctcgtttgagggagcactcaccgaagcttcaatggctcttgggcacgctggacaacatcgcgcgttcgggcaatggcgacaaggtcatcctgttcaccgagttgcgggacatccagcgtgaattgcagcacgcgattcaggagcgcttcggcttcaaacccacggtaatcaatggcgataccagcaccagcagccagagtgcacagagccggcagcgtctgatcgaccgttttcaagaacagcctggcttctcggtgatcatcctctctactgttgcggttggattcggcgtgaacgtgcaggcagccaaccatgttatccatttcactcgctgctggaatccggctaaagaggatcaggcaactgatcgcgcttaccgaattggtcaagagaaggacgtgtacgtctattacccgaccgtgcgtgatgcgggaatgcctacatttgaggcgacgctggatgaactgctgcagaagcgacgcgcgttggctcgggatatgctgcatggggcatctgagcttcagacagctgagtttggggaactgttaagggcgcaaggatga

SEQ ID NO: 6735 - DNA, 2346 bp, Pseudomonas aeruginosa BWH033
atggaatttctatatcacctgttgcccaatttttccttactgaaaggcggtagcacggaagcgctgggcgtcatcttttggttggtcatggcaacgctatttggctattcgctagtttcgttggtgatgagcagcatccgctttagggtacgggttcgtgccttgaacagcttggtcacggggcagaaccgcgaaaacctggcattaagccgtcgagagatattgcaaaaagccctatcgctcaaggaccaacgaattggtgcgctatggcgggagttcgatgacagcttggttagctccagcgaccataagcagctctttaatactttggatgccgagcatttctttaatgtgcgaactcttgcgcatggtctgagcggaagtcgctttttcagttctttgccagggttgctggttggattgggcgtgttagccacattcgtaggcctaaccatcggtttatcgaagttgaaactagatagcactgcaggcgtggatcagttgcgggagggtatctccgttatgatccaaggggcggcggttgccttcatggcatcggtgtggggggtaggtttcagcctaatactaaatctaattgagaagattgctgagcgctgggcgcttgggcgcgtgcaggatttacaacatcgcattgacacgctgtatccactgatccctgctgagcagtcgctggttcacattgctgactacagtcgggaaagcaaggaagcactgcaagagctccacgaacgcataggtgaccgccttcaggaaagcttggtaggcatgaacgaggctatgcaggcggcccttacggatgctttgaacaacattatggctccggccatccagacactcgtcagcacgaccagccagcaatctacacaagtgctagagcggctggtaagcaatttcactgatggcctcacgtcggcagggcgtgagcagggcagtctgatgcagcaagccgctgccgatgtgaatgctgcagtcggtggaatgaccgaccgcttgaatcagctgttccagactctgagcgatcagcaagggcgacagcaggaggcggccagacagcaaagcggcgagtttcaggcccagatggagcggatttcttcttcagcagatcagcgccaacaacaattggagtcacgtttcagtgagctgttgagcggattgactggccagctggatacgcagcttggctccgcgcagcggcgggatgaagagcgtcaggcgctttttgagcgcactttggttgaggcaggggcgagccaatctgcgttgttagagaagttcgccagcgcaagcagtgaacagcttcaggctatggcagaggctggaaacgagcggcatggcaatctggagaaagtcttctcccggttaatgatgacactgaactcccaactggattcgcagatgggggctgctgagaaaagagaacaagatcgagccttgcgccatgatcagcagcaggctgcggtattggcgcagcaacagcagttaattggcagccttgggcagaccagccagcagcagatcggtgcaattgctgaagcggcggctgcacagcaacgtgctttggaggagtcagttagcaagctgctcggtaacttcaatgagcagatgtcgggccatggccagcaagctgagcagcgtgaacattctcgccagcaacgcttcaacgagcagctggaaagcatggcggcgcagcagcatgctctgctggaaggcatcgccacagctgtacaagcaacccagcagcaaagtcgccaaatggctgagcagcatcagcaactgatggggcgtttgcagcaagccagcgatgcggccgctactagtagccggcacatggacagcagtgccaaccagctcggattgctctcaaccaatgttcgtcaggcagcagagcttcttggtcagcggttagaaagcgtgacgcagcgtattgagtctgctggtgagcagaatgctgagctcgcaggccaactgcggcaacaagctaccgctttggcgcaacttcaaggtgcgttgttggacggcgctcagcgcttcgagcaggccgccgcggaagcgcgcagcggatttggcgagatgagatctcatcagcaagagttcctaaccggagtgcgtggtgagttcactgcgctgggagaggcgctgcgcagtcaagtgcagggggtcgagcagcaagctgagcaatggctgcgtagctactccaccgaagtacgcgaccaggtgcatgagcgcatggaccagtggaacaaggaaaccctgagctttgctggccagatgcatgccgcagtgcaggcgatcagtaacgtggtcgacgagctggaggcgcgctaa

SEQ ID NO: 6736 - DNA, 744 bp, Pseudomonas aeruginosa BWH033
atgcgttggcgaaaatcccatgacgtaccaatggaagatgaggatccgtactggaagtctttcgtggacattatgtcggcgctgctggtgctcttcatcttggcgtcggtggtactgatccttcagttgatggagaaaagcgctgattttgatcagcaggtcgagcagctgaagaaagcagaaaccgtacggcagcagattctcgatgaggcggtggagaagctccgccagcgcggaattaaggttgaggttagcgagaaccatacggtcctgcgtatacccaacgaattgcttggctttgacacgggcgcctttgaaattcaaccacgctaccagccgacggccttggagatcggggaggtcatcaaccaggtaatcagtcgtgaagatcgggtcaactacctcgataccatcttcatcgaaggacacacagacaaccgccccttccaaggctttatggggaagggaaactggggattatcgacgtttcgtgcaatctcactctggcagttctggagcaccgagatgcctgaagcggagcgtctgaatcgactgagcaatcaggatggtgagcctttgttctcggttagtggctacgccgagactcgcccggtaagtaagcggcaggacggggaggaggactatcggttgaatcgtcgtatcgacattcgcttcaccattcgccggccgcagagttctgagtacgaagcggttaagtcattgcttgggaactcaactaaatga

SEQ ID NO: 6737 - DNA, 2172 bp, Pseudomonas aeruginosa BWH033
atgaagctgccgccgatcgataaccgtcctggtgagtggtcgcctacggtcatcgagggctggtcgcgcttggtggaaaaggccagccgcatgaaggcgaaggtcggtagcggcgatgctttcgagcgagctatagcccggttgcgcagcatggctactagtgggcgattcgacggactagttgagttgctcagccgacgtctaggtgctagagcgcttacttggctgtggttgcatgatgattttgctggtgctcggctgttcaacggacgaatgctagaggccttattggagaaccagcagccccgcttgagccgactgacgttgattcagttgctccaactgtatttcatcgtttttgatcgccttgacgagagagacaagcaggccgagaccagcttacgaggaaggttggagtggcatttactggatcagctcaaacgtttgccggagagagctcggccccaatcattcgttgctgatccattaacaacgctcaagacggaaggagattggctgctggcactggacggcccacttcgtctcgcacaggcagtgcgacaacgtggcaaggagctagcacagactttcgaagagatgggcctgagcggatttgatgtcggacgttatggggatatctgtcgcgcacacttctatttggaaaggctgcgccagctgcgaccaggtgagtgggatgaggtgctcgaagagctgctcaaaccatctgtgagtaaggcgccgtatgaggcggatagacgcattggtcatgctgcactggagatcatgatcgatcgcgctggagatgatccaggcgacgcctggcaaaacttcattctcagcttggcgggtgatccacgtattgcgagctcagctccgaatttccgcgagtggtggaaacctctgggtgaggagcgcattggtagggtgcgcgggtggctgtccaaggaagacctgcgtttattcctgcaggctgttgaacagtacggcgtggagtcaggcaaagaagacctccagcgtatgttcccggcacgtaagctgtttttggagggcttgttcaagcttggtctcatccgatacacgaggctgatgcttggcaacagcgccaagctgtcggttaagcgcattctaggaggggaggtaaaaacgagcttcgccagcctggactcagcgatgaacgacaaggcggtgatctatctcgactgcggtgatttccacttggttgagggctctcatagcttcaaaatctgggcttatctcggtcagcccagtcattgggtcaagtcgtatgagcgaaatcacttctctcactacgacctgactacttcattgcccagccagtacaaggcagcctacccagctcttccctacgaggcagtggtccacaatggcccctggcagtacaaggtatttgagttcttggcgaagaatggcatcgctctggatatcgagaagctgctcagccgatctgactacaaagcgtacctcagcaggtacggcatgccggttgttgggcagaagaaagcaagagttgaacccttagtacaggcgtccactgatttaggggctggtaaagggcgaggtccagagaccatgagctcggccgagtcgaacccggtcaagcttgaggctgcacggagagttgcaccctctgcgggagcacctaatccctctcagatcgagctcaacaagactcagcgttcaatcttgacctacttagcctcgaatccagatcgttccatgggcgaaatccggcgagcgatggatggggatgaggctttgctttatgaaatacaggagagtctcaggggtaggcttgcagcctacgttcaacaaaatgacgtcttccaatggtccctgtcagaagcagggcgaaatcttctcggagacgtgccttcccctgctcgaaccaagagccctagcacgggcagctctaatagcgcagctcagctgaagcggcttggcgcgtttgagttgcaggtgctttggtacttcaaatcaaacccaggcgacagggtgagatctgcggccaacgttcttgatgttgaggcgcgagagattaatcgggtgctctacggagcccttaaaaatatgtgtgagcaaggcagaaactttggctgggcagtaaaggccgacatatctgacgccttggagcaactgccaacagaatcgtga

SEQ ID NO: 6738 - DNA, 3030 bp, Pseudomonas aeruginosa BWH033
atgggattggctgacatctttaaaagcctgcttggcgaggggcgagcaacgctgagcacgcagcagggattcgcctacgcagcggactcggacggcgtgaatttctacttggacaagacggtgtacgcggcgctggccaccggccaagggaatgccttgcagaaggtccagctgatcgttttgcgtatgctgcaggagcagggcttagctgagccacttgctaatggattccatgtggctgctgaagacgtcgccggcatggatgatgagcaggctgagattcttcgtttgccccgccggctcagcatgagctttgtcagcagaatcagcggtcgaactgggcatagcggtttttgtgtcgatctggcaattcaatccaaggcaggtgaagtgcccttcacgcggaaggggccactgctctacctgacgtccacagaatgctatcgcctgacgcctgctgagttgatggggctaatggcgtgggaataccaccaaaacctgccagcacagcaacgaggagaagcctccaatttgcggatgatggctgagctgcagaccgctgcgcgtagcgggatgcgtgtcgacctcagccattttgaaaggctggatgtggtggtgccggagaacattggcgtcattgctacgcgtctggcggatggcagcctcatgctcagccccagcttgggagatggctctacaccggatcagttagagaagcgctggtcccaactggatatgggagcagatggcggagtattgcgcatcgacaaccgtgtggtgctgcttgagccgcagaagatggctgcgattaaggaagtgttgggcagtaaacgcattcctgctgaccgggtcgcggagttcatcgccacaccaagcgcgttcctggatgcggcgttggtcaatcttgaccttggtttttctgtccgggtcgcaggcattggcaagcttcaacacatggagtttggcgacctagacaatcagaagaatgattggtttgcactggattcacgccccgctcccgctgagatcattccgaagttagtgcaatccgaagaggacctacagcacttcaacgagctctacaaagcggccattgagcagggcgcgaccagcatgacctttgggggagagatgattgatatctccgatcccgcccttgttgagcaacagctgaagaggattgaggcgtctctgagggacccggcactcgacgaagtgcccggggactcattgtcagtagagcccaaagagcgagtgagtgtgctgctacgtgatgctgatgagatcagcagcacgttgttgcgcaaagcaagcgaggctaagcccgcgcacgagcctgagtggagtgcgtacgcacgccaacccttcccgcaccaacgggagggggttgagtggatgcttgggctgctggagtcggcagtttgcgatgatcatgatgatctgtatcggctgcagggcggactgctcgctgacgatatggggttgggtaagacctacatgtcgctggtgaccgtaggtgagtatctagcacagcaaaaggcctctgggcgtgcacaaaaaccagtgcttgtggtggctcccttgagcctgctggagaactgggaagatgaggtcgcgcagacctttagaagcatcccattccgggacatcgtagtgctgcagtctggaagggacttgagccgcttcagagtcaaaggggccgagcgagagtccgcgcaattggcttcgctgataaatgacgatggagaaatggacgatgattccattcgctatgcgctcaccatcggtccagaggtgggtgtccaccgcctggatatggatcgtcgcttggttctgactacttatcagaccctaagggactaccagttctctctgtgcagaattgactgggggctggtgatttttgatgaggcacagaacatcaagaatcctaatgcggcgcaaacgcgagcggcgaagggtttgaaagcggacttcaaactgttggctaccggtacgccagtcgagaacagcttgggggacttctggtgtctcatggacacagctcagccaggaatcctcggaggctggagccagtttcgtgacaattggatcaagccgatcctggctgcggcagatgacgaaaaggatgaggttcggcgaagggttggggctgatctgcgagaggctgtaggcagattcatactccgtcgtatcaaggaagaccagttaaaagggcttccaagcaagaccatccatagcggcgtggcgcagcctcaaggggggcttcagcttcatgcagctcatcttgcggtttccatgaagggcctgcagcttcaagcttacgacgccgtgctcgagggcttccgggcaaggcgtgcgactgaggacatgcgcggtgctgcgcttgcagctctttctcagcttcgagagatctctctgcatcctcgtcttcgtgaagaggcagcgttgatggctggcagcgctagtgaggcgcgcgcccatatggctcagtcagggaagctggtggtgctgctggacttgctcgatggaattcgtcagggcgaggaaaaggtcattctgttcatggtcaccaaacggcttcagaggatcttgaagctgtggctcgaccagatctacgggttggacgtagcgatcattaatggtgagaccgcggcagttgcgaagaaatcagatgagctgactcgcagaaagctgatcggtgttttcgagtccaagcccggcttcaacatcatgatcatgtccccggttgctgcaggggttggattgactgtggtcggagccaatcacgttgtgcatctggagcgacattggaaccccgcgaaggaggcgcaggcgtccgaccgtgtgtatcggatcggccagaagaaagacgtgcatatacacctgcctgcggtgctccatccgcaattcgactcttttgacgttcaccttgatcgcttgcttagaggcaagctgatgctcaaggatgccgtagtgacacctgaggtggtgagcgagggggagataattcgctcaatgggattgtga

SEQ ID NO: 6739 - DNA, 2127 bp, Pseudomonas aeruginosa 3575
atgatggatctgctgaaacacctgatccccgattttgctcatatgttcagtgccaatcccaacggcatcagtgcctggttttggtctgcgacggcactgattttcggcttgtcgctttactttctgttcgtgcacttccgccgttttcgtacccggctgcgtgccctgcgttctttgcttgaagggcaaagcaaggaaaccctggcactgagcaggcgcgaaaccatgcaaaaggcgcagggcttggacgcgcccaatgtcggcatgctgtggcgtgagttcgacgaaagcctggtgctgtcgaccgatcagaagcatctgttcaatacgctggatgccgagcatttcttcaatgccagaaccttggctcccggcctgacagctagccgcttgctggctgctgcaccgagcttcctggtggccatcggtgtgctcggcacattcgtgggcctgacggtgggcctggaaggattggtcggcacctcggatgagatcgagtcgctcaagggcggcatcaacaagctgatttccggtgctgccgtagccttcatgacgtcggtatggggggtgttcttcagcctgttgctgaactttgtcgaaaagatgttcgagcgttcagcgctgggccagatccagcagctgcagcacgacatcgatttcctctatccccgtattcccgccgagcagtcgctggtgcatatcgccgagtacggcaaggagagcaaggaagcgctgcaggagctgcacgagcgtattggcgatcgtctgcaggaaacgctcaatggcatgagcgaagcgatgcagacggcgctgaccgatgccctgaacaacatcatggcgccagccattcagactctggtcagcaccaccagccagcagtccacgcaggtgctggaaaagctggtgggtaatttcatggacggcatgacctctgtgggccgtgagcagggcttgcagatgcagcaggcggcggctgacgtaaacgctgccgtcagtggcatgagtgagcgcttgaaccaactgttcagcagccttaatgaacagcagggtcgacagatggaagtggctcagcaacagagtgcggccttcgagacgcagctgcagcgcatcactggttctgccgaagagcgccaggcgcagatggagcaacgctttgccgagttgatgtcagggctgacgaaccagttgcaaacccagttgggtaccgcccagcagcgcgacgaggagcgccaggtgctgttcgagcgcctgcttggccaggccagcagcagccagacggcgatgttggagcaattttccagctcaacccgcgagcagatgcaagcgatggctgaggcgggcaacgagcgccacagcaatctggagaaggtgttctctcgtttgatgatgaacctcaacacccagctcgattcgcaaatgggcgcggcagagcagcgtgagcaggcacgccaacaacgcttccaggagcagcttgatcaggtgtcgacccatcaacaggaactgctctcaggtctggccagcgctgtacaggcgacccagcagcaaagccgcctaatggcggatcagcatcagcagttgctgggccagctcaagcaggtctcggacgcaactgcgcagagcagcaaacatctggacagcagtgcgaatcagcttgggcttctatccgcaaatctgcgccaggccgccgataccttggggcagcgactggaggccgttactcatggtgtcgagaaagccggccagcagaacgccgaattggcagctcagttgcaaagccaggccgctaccctggcgcagctgcaggccacgttgctggagggggcgcagcgcttcgagcaagcagcaggtgaggcgcgtaacggctttggcgagatgaaatccgctcagcaggagtttctctctggcgtacgccacgaattcaccgcgttgggagaaaaactgcgtgagcaggtcgaggcggtagagaagcaagccgaggaatggctgcgcagctatgccggcgaagtccggacgcaaatcgatgatcgcatgaacaagtggaacgaggtgtcgctcagctacgccgaccagatgcatcgaacggtgcaagccatgagcagcattctggatgagctggaggcacgctga

SEQ ID NO: 6740 - DNA, 765 bp, Pseudomonas aeruginosa 3575
atgcgcctgggtaaatccaaggaagtgagcgtcgacgaagagaacccttattggatgtccttctcggacatcatgtcggcgttgctggtgatcttcattctggcctctgtaattctgatcctgcagttgatggaaattcagaaggagctgaaagagcgccaggtgcagttcgagcaggaactggtcgagctgaaaaaagcagagcaggtgcgccgcaccattcttgatgaggccgtggaggctctgcgcgagcgcggcatcaaggtcgaggtgagcgagaaccatacggtcctgagtattcccaacgatttgctgggtttcgacaccggcgcatatgacatacatgccgcctatcaggcgcgtgctctggagattggtaaggtcatcaatgaggtgatctcgcgagaggatcgagtcgagttcctcgatacgatcttcatcgaggggcatacggacaatcgtccgctccagggctttatgggcaaaggcaactgggggctatcgacctttcgtgccatttctctctggcagttctgggggagcgcgctgtccgccgatgagcaactggcacggctgaagaacaaggatggcaagccactgttctcggtcagcggttacggcgaaacccggcctgttttggttgaccagcagactgaggatgacttcaagcgcaatcgacgcatcgatatccgcttcactattcgtcgtcccgacagcgctcagtacgagcaggtgcgtgagcgtctggaggaggtcaagccgtga

SEQ ID NO: 6741 - DNA, 1923 bp, Pseudomonas aeruginosa 3575
gtgaagctgcctcctgttcacatgccggtcgctgaatgggcgccagtggtgcgggagcgctgggcagtgctggtcgaaaaggtcgcccgaatgaaagctgcaagtggcaagagcgacgcctttgacgccatgttggcgcgattgcgcgacatggcgagtacggggcgttttgacggcctgcctgagctgctaaaacgccgtcttactgcgcgtgcgttgacttggctatggctaaacgatgaggtgatggccagccgcttgctcaatccgcgcatgctctcggtattgctggaggcgcagcagcctcgcttgacgcgtatcaccttgcagcagttggcccagctttatttccgccgctttgaccttctggatgcgcgggaggggctgcgcgaactgctcgaacacagcctgctgcagcaacttgagaaaatgccctcacccaggatagttgggccttggcctgacccactggtaacgctccagcgagaagggcattggctgctgaccctggacggcccgggacagctggttgaaaaagtacgtagcgagggccgtgaactgggcgcgactttcagcgagatgggattgcagggtttcgatgatggtcgctatgcggatctctgcagggcgcatttctatctcgagacgcttcggcatttgccgcttgacgcgtctgacccggttctggatgagctgttgaagccttctgtcgccaaggcgcccttcgagggcgagcggcggatagggcacgttgcgctggagatactgatcgaccgcgcagggcaggagccgggggaggtctggcagaacttcatcctcaatttggccggcgatccgcgtatcgctcgcaatgcgccgaattatcgcgagtggtggcagcctctgggcgaggcgcgtatccagaaagtccgcgggtggctatccaaggaagacttgcgcctgttcctgcaggctgttgagcagttcggcatcgaaacgcagaacagtgaactgcagcggatgttccccgcgcgcaagcggttcctggaggggctgttcaagctcaagctgattcgcaatacccggctgttgctgggcggcaaggcgcaacaatccgtaaagcgtattcttggcgaggaggttaagaccagctttgcccgtatggatgggcagatgaacgacaaggctgtgatctaccttgattgtggagatttccatctagttgaggggtcgcacaattttaaaatttgggtgtatttggccgctcctggtgagctactgcgctcttacgagcgcagtagcttcagccagcgcgatttgaatgtgaccattcctcagacctacaagaagctttatccaatgcttccttgcgatgctttcactcactaccctccgctcgcttggcagaataaggtattcacatttcttgcaagcaatggggttggcttggatatcgagaagttgttgagtccagaggactaccagttgcaacttcgaaagtatggtattcctgttgtgaatgtgcatcgaacaatggtgccttctcctgctgatatctctgtcgccccagtggaagcagaggttgtgccaccaggtagccctgctgcaagcggccgaactccggctaatcgagtagttacagccggtgcagatatcgcagacaggagtagtgaccagcatcccactggtgccagcgctgcggccggccggctggcctcattgaaaccctctgcactcaagctgttgcgctatttcagagacaaccctggggatcgggttcgctacgctgccaacgtgtttggcgttgaaacgcgggagataaaccagattctgtacggcccgttgaaaggcatgctgacccaggatgggaatttcggttggcgcctgactgatgccatcagtcgagaactcgatgccctagatgaacaagagcgagactcatag

SEQ ID NO: 6742 - DNA, 3045 bp, Pseudomonas aeruginosa 3575
atgcgtctgatgaatatcctgcgttcgctgattggtgagcctgataccgaactcgcttctctggaaggattccgtgcgacagcagactccagcggggtgaatttctatctgccacagccggtattcaatgcgctgcaggctggcaccggtaatgcgctacagaagatccagcttattgcactcaacatgctgttggagcagggaatcgctgagcccaccgccaacggcttccatgtaagcgccgaggatgtctccggaatggatctggagcaggcggatattctgcggctaccccggcgcttcaacggtcgtttcattacgcaaatcagcggccgcacaggccacagcagttttcaggttgggctgatggtgcaaatgccgggtgatagctcgccagtgccgtttcagcgaaaggggccctatctgtatctgacggggttagaacattacaggctggcgccagccgagctaatgggattgcaggcttgcgagactcatcagtctttgacgcctgaattgcgaggagaggctgctaacttgcggttgatggccgaactgcagacggccgcgcgcagcggaatggcggtggacttgagtcacttcgagcgcttggacgttgtgatcccggagaatatcggggtgacggcgacacgtttgcccgatggcagcctgttgctgtgcccgagtctgggagatggctcatccgccgatcagcttgaaaagcgctggtctcagctggagatgtccgccgatggcggtgtcatgcgcatcgacaatcgggttgtcttgctggataaggaaaagatggagggcattcgcaacgtcctttctaacaaacgcatccccgtcgataaagtagcggagttcatcgcgacgcctaccgcttttttggatgcggcgctggttaacctcgatgttggtttttcggtgcgcgtagcggggatcggcaagctgcagcacatggacttcggtacgctggacgcgacccgaaatgattggttcgctctggataagcgtcctgcgccgccggaaatcattccaaagctcgtgcagtctcccgaggagctgcagcgatttgaggagatgttgaaagctgcgaatgagcagggcgccagcagtcttgctttcgggggtgaggtgatcgatatcgccgatgctcagaaggtgcaggagcagctggggatagctaaggctgtgttttctgaggaaaaggaagcagatgccagtacaccggccgagtccggcggcgaggagaccaaagaaaaggttgcggtgattctgaaagaggctgaggcaatcaataacgccttgctcagaaaagccggttccgcatgtcttgcagttgagcctgactgggctgcatacgcgcgccagccttttatccatcaacgcgaaggtatcgagtggatgctgcggttgatcggtgcggctttaaaagaggatcctgccgacctttatcgcctccagggtggtctgcttgctgatgatatggggctgggtaagacctacatgtcactggtcgcagtgggtgagtacctgaagggccagaggcttgtcgggcagtcccagaaaccgattctggtggttgcgcccctaagccttctggagaattgggaagatgaggtggagaaaaccttcgccagcatacccttccgcgatgtcgtggtactgcagtccggccgtgatctgagccgcttccgggtcaagggggcggatcgtgagtctgtgcagctgacatccctggctgatgaggaggggctgatggatgagcagagcatccgctatgccttgtccgttggtccggaggcgggcgtccaccggctggatatggatcgtcgtctggtgctgaccacttatcagacgctacgtgattaccagttttcactatgccggatcgattggggcatggtgattttcgatgaagcgcagaacatcaagaaccctaatgcgctgcaaacccgcgcagccaaaggattgaaggcagatttcaagttactggccacagggacaccggtagaaaatagtctcggtgacttctggtgtctggtggacacggcacagcccggacttctggggggatgggaagcgtatcgggatacctggatcaaacccatcctcgcggcagctgacgatgagcgtgacgttgtgcgcactgagttgggtaggaggctgcgtgatgcggttggtatcttcatgctgcgtcgcgtgaaggaggatcaactcaaaggcttaccgaaaaagaccatccgcagtggcgtggagcaggccagtcaaggcatacaagagcatgcctctgaattgggggcttgtatgcgtgggccgcaattacaggcctacgacgatgtgttgagcgactatcgatcacgccgtgctatcgctgaggatatgcgcggcgccgcgctctctgccctgactcaactgaggactatttcgctgcaccccaggctagacgacgaggcggcgctctacagccatgacgcgcagcacgctcgtaaattgatgatggagtctggcaagttatcggtcacgctggcgttgctcgatgaaattcggagtaagggcgaaaaggtcattctgtttatgatgaccaagcgcctgcagagagctctaaaactgtggcttgatcagatttatgggctggatgtcgcgatcatcaatggcgataccaaggcagtagctaccaaggcagaggatatgactcgcaagaggctgatcggcgcttttgaagcccggccggggttccacatactgatcatgtcgccagttgccgcgggcgtcggcttgactgtggtgggggccaaccatgtcattcatctcgaacgacattggaacccagccaaagaagctcaggcgtcagatcgtgtttaccggattggccagcagaaagacgtttacatccatcttccggttgtcactcacccccagtatgactcgtttgacgtgcacctggatcggctgctgcgtggaaagctgatgttgaaggacgccgttgtcacgccagaggcagttgctgagagcgagatgattcaatcgatgggcctctga

SEQ ID NO: 6743 - DNA, 2127 bp, Pseudomonas aeruginosa BWH054
atgatggatctgctgaaacacctgatccccgacttcgcccatatgttcagtgccaatcccaatggcatcagtgcctggttttggtctgcgacggcagtaattttcgtcttgtcgctttacttcctgtttgtgcatttccgccgttttcgtacccggctgcgtgccctgcgttctttgcttgaagggcaaagcaaggaaaccctggcactgagcaggcgcgaaaccatgcaaaaggcgcagggcttggacgcgcccaatgtcggcatgctgtggcgcgagttcgacgaaagcctggtgctgtcgtccgatcagaagcatctgttcaatacgctggatgccgagcatttcttcaatgccagaaccttggctcccggtctgactgccagccgcttgctggctgctgcaccgagcttcctggtggccatcggtgtgctcggcacattcgtgggcctgacggtgggcctggaaggattggtcggcacttcggatgagatcgagtcgctcaagggcggcatcaacaagctgatttccggtgctgccgtagccttcatgacgtcggtatggggggtgttcttcagcctgttgctgaactttgtcgaaaagatgttcgagcgttcagcgctgggccagatccagcagctgcagcacgatatcgatttcctctatccgcgtattcccgccgagcagtcgctggtgcatatcgccgagtacggcaaggagagcaaggaagcgctgcaggagctgcacgagcgtattggtgatcgtctacaggaaacgctcaatggcatgagcgaagcgatgcagacggcgctgaccgatgccctgaacaacatcatggcgccagccatccagactttggtcagcaccaccagccagcagtccacgcaggtgctggaaaagctggtaggtaatttcatggacggcatgacctctgtgggccgtgagcagggcttgcagatgcagcaggcggcggctgacgtgaacgctgcagtcagtggcatgagtgagcgcctgaaccaattgttcagcagcctgaatgaacagcagggtcgacagatggaagtggctcagcaacagagtgaggccttcgagacgcagttgcagcgcatcagtggttctgccgaagagcgccaggcacagatggagcaacgctttgctgagttgatgtcggggctgacgaaccagttgcaaacccagttgggtgctgcccagcagcgcgacgaggagcgccaggtgttgttcgagcgcctgcttggccaggctaacagcagccagacggcgatgttggagcaattttccagctcaacccgcgagcagatgcaagcgatggctgaggcgggcaacgagcgccacagcaatctggagaaggtgttctctcgtttgatgatgaacctcaacacccagctcgattcgcaaatgggcgcggcagagcagcgtgagcaggcacgccaacagcgcttccaggagcagctcgaccaggtgtcgacgcaccagcaggaattgctcaccagcctggccactgcggtgcaggcgacccagcagcagagccgcttgatggcggatcagcatcagcagttgctgggccagctcaagcaggtatctgaagcgactgcacaaagcagcaaacacctggacagcagtgcgaatcagcttggcttgctgtccgcgaatctgcgccaggctgccgataccttggggcagcgactggaggctgttactcatggtgtcgagaaagctggccagcagaacgccgagctcgcggcgcagttacaaagccaggccgctaccctggcgcagctgcaggccacgttgctggagggggcgcagcgtttcgagcaagcagcaggtgaggcgcgtaatgggtttggagagatgaaatccgctcagcaggagtttctctctggcgtacgccacgaattcaccgcgctgggtgaaaagttgcgtgagcaggttgaggcagtagagaagcaagccgaggaatggctgcgcagctatgccggcgaagtccggacgcaaatcgatgatcgcatgaacaagtggaacgaggtgtcgctcagctacgccgaccagatgcatcgaacggtgcaagccatgagcagcattctggatgagctggaggcacgctga

SEQ ID NO: 6744 - DNA, 765 bp, Pseudomonas aeruginosa BWH054
atgcgcctgggtaaatccaaggaagtgagcgtcgacgaagagaacccttattggatgtccttctcggacatcatgtcggcgttgctggtgatcttcattctggcctctgtaattctgatcctgcagttgatggaaattcagaaagagctgaaagagcgtcaggtgcaattcgagcaggaactggtcgagctgaaaaaagcagagcaggtgcgccgcaccattctggatgaggccgtggaggctctgcgcgagcgcggcatcaaggtcgaggtgagcgagaaccatacggtcctgagtattcccaacgatctgctgggcttcgacaccggtgcctatgacattcatgccgcctatcaggcgcgcgctctggagatcggcaaggtcatcaatgaggtgatctcgcgagaggatcgagtcgagttcctcgatacgatcttcatcgaggggcatacggacaatcgcccgctccagggcttcatgggcaaaggcaactgggggctatcgacctttcgtgccatttctctctggcagttctgggggagcgcgctgtcccctgatgagcaattggcaaggttgaagaacaaggatggcaagccactgttctcggtcagcggttacggcgaaacccgccccgtgttggttgaccagcagactgaggatgacttcaagcgcaatcgacgcatcgatatccgtttcaccattcgtcgtcccgacagcgctcagtacgagcaggttcgtgagcgtctggaggaggtcaagccgtga

SEQ ID NO: 6745 - DNA, 1923 bp, Pseudomonas aeruginosa BWH054
gtgaagctgcctcctgttcacatgccggtcgctgaatgggcgcccgtggtgcgggagcgatggacggtgctggtcgaaaaggtcgctcgaatgaaggccgcaagtggcaagagcaacgcctttgacgccatgttggcacgattgcgtgacatggcgagtacagggcgttttgacggcctgcctgagctgctaaaacgtcgtctcactgcgcgtgcgttgacttggctatggctaaacgatgaggtgatggccagccgcttgctcaatccgcgcatgctctcggcattgctggaggcgcagcagcctcgcttgacgcgtatcaccttgcagcagttggcccagctttatttccgccgctttgaccttctggatgcgcgggaggggctgcgcgaactgctcgaacacagcctgctgcagcaacttgagaaaatgccctcacccaggatagttgggccttggcctgacccactggtaacgctccagcgagaagggcattggctgctgaccctggacggcccgggacagctggttgaaaaagtacgtagcgagggccgtgaactgggcgcgactttcagcgagatgggattgcagggtttcgatgatggtcgctatgcggatctctgcagggcgcatttctatctcgagacgcttcggcatttgccgcttgacgcgtctgacccggttctggatgagctgttgaagccttctgtcgccaaggcgcccttcgagggcgagcggcggatagggcacgttgcgctggagatactgatcgaccgcacagggcaggagccgggggaggtttggcagaacttcatcctcaatttggccggcgatccgcgtatcgctcgcaatgcgccgaattatcgcgagtggtggcagcctctgggcgaggcgcgtatccagaaagtccgcgggtggctatccaaggaagacttgcgcctgttcctgcaggctgttgagcagttcggcatcgaaacgcagaacagtgaactgcagcggatgttccccgcgcgcaagcggttcctggaggggctgttcaagctcaagctgattcgcaatacccggctgttgctgggcggcaaggcgcaacaatccgtaaagcgtattcttggcgaggaggttaaaaccagctttgcccgtatggatggacagatgaacgacaaggctgtgatctaccttgattgtggagatttccatctagttgagggatcgcacaattttaaaatttgggtgtatttggccgctcctggtgaactactgcgctcttacgagcgcagtagcttcagccagcgcgatttgaatgtgaccattcctcagacctacaagaaactttatccaatgcttccttgcgatgctttcactcactaccctccgctcacttggcagaataaggtattcacatttcttgcaagcaatggggttggcttggatatcgagaagttgttgagtccagaggactaccagttgcaacttcgaaagtatggtattcctgttgtgaatgtgcatcgaacgatggtgccttctcctgctgatatctctgtcgccccagtggaagcagaggttgtgccaccaggtagccctgctgcaagcggccgaactccggctagtcgagtagttacagccggtgcagatatcgcagacaggagtagtgaccagcatcccactggtgccagcgctgcggccggccggctggcctcattgaagccctctgcactcaagctgttgcgctatttcagagacaaccctggggatcgggttcgctacgctgccaacgtgtttggtgttgaaacgcgggagataaaccagattctgtacggcccgttgaaaggcatgctgacccaggatgggaatttcggttggcgcctgactgatgccatcagtcgagaactcgatgccctagatgaacaagagcgagactcatag

SEQ ID NO: 6746 - DNA, 3045 bp, Pseudomonas aeruginosa BWH054
atgcgtctgatgaatatcctgcgttcgctgattggtgagcctgataccgaactcgcttctctggaaggattccgtgcgacagcagactccagcggggtgaatttctatctgccacagccggtatttaaggcgctgcaggctggcaccggtaatgcgctacagaagatccagcttattgcactcaacatgctgttggagcagggaatcgctgagtccaccgccaacggcttccatgtaagcgccgaggatgtctccggaatggatctggagcaggcggatattctgcggctaccccggcgcttcaacggtcgtttcattacgcaaatcagcggccgcacaggccacagcagttttcaggttgggctgatggtgcaaatgccgggtgatagctcgccggtgccgtttcagcgaaaggggccctatctttatctgacggcttcagagcattacaggcttacaccggccgagctaatgggattgcaggcatgcgagagccatcagtctcttactccagagttgcgaggtgaagctgccaatttacggctgatggccgaactgcagacggccgcgcgcagcggaatggcggtggacttgagtcacttcgagcgcctggacgttgtgatcccggagaatatcggggtgacggcgacacgtttgcccgacggcagtctgttgttgtgcccgagtctgggagatggctcatccgtcgatcagctggaaaagcgttggtctcagctggagatgtccgccgatggcggtgtcatgcgcatcgacaatcgggttgtcttgctggacaaggaaaagatggcgggcattcgcaacgtcctcgctaataaacgcatacccgccgacaaagtggtggagttcatcgcgacgcctaccgcgtttttggatgcggcgctggttaacctcgatgttggtttttcggtgcgcgtagcggggattggcaagctgcagcacatggacttcggtgcgctggacgcgacccgaaatgattggttcgctctggataagcgtcctgcgccgccggaaatcattccaaagctcgtgcagtctgccgaggagttgcagcgatttgaggagatgttgaaagctgcgaacgagcagggcgccagcagtcttgctttcgggggtgaggtgatcgatatcgccgatgctccgaaggtgcaggagcagttggggatagctaaggctgtgttttctgaggaaaaggaagcagatgccagcacaccggccgagtccggcggcgaggagaccaaagaaaaggttgcggtgattctgaaagaggctgaggcaatcaataacgccttgctcagaaaagccggttccgcatgtcttgcagttgagcctgactgggctgcatacctgcgccagccttttacccatcaacgcgaaggtatcgagtggatgctgcggttgatcggtgcggctttaaaggaggatcctgccgacctttatcgcctccagggtggtctgcttgctgacgatatggggctgggtaagacctacatgtcactggtcgcagtgggtgagtacctgaagggccagaggcttgccgggcagtcccagaaaccgattctggtggttgcgcctctaagccttctggagaactgggaagacgaggtggagaaaaccttcgccagcatacccttccgcgatgtcgtggtattgcagtccggccgtgatctgagccgcttccgggtcaagggggcggatcgtgagtctgtgcagctgacatccctggctgatgaggaggggctgatggatgagcagagcatccgctatgccttgtccgttggtccggaggcgggcgtccaccggctggatatggatcgtcgtctggtgctgaccacttatcagacgctacgtgattaccagttttcactatgccggatcgattggggcatggtgattttcgatgaagcgcagaacatcaagaaccctaatgcgctgcaaacccgcgcagccaaaggattgaaggcagatttcaagttactggccacagggacaccggtagaaaatagtctcggtgacttctggtgtctggtggacacggcacagcccggacttctggggggatgggaagcgtatcgggatacctggatcaaacccatcctcgcggcagctgacgatgagcgtgacgttgtgcgcactgagttgggtaggaggctgcgtgatgcggttggtatcttcatgctgcgtcgcgtgaaggaggatcaactcaaaggcttaccgaaaaagaccatccgcagtggcgtggagcaggccagtcaagacatacaagagcatgcctctgaattgggggcttgtatgcgtgggccgcaattacaggcctacgacgatgtgttgagcgactatcgatcacgccgtgctatcgctgaggatatgcgcggcgccgcgctctctgccctgactcaactgaggactatttcgctgcaccccaggctagacgacgaggcggcactctacagccatgacgcgcagcacgctcgtaaattgatgatggagtctggcaagttatcggtcacgctggcgttgctcgatgaaattcggagtaagggcgaaaaggtcattctgtttatgatgaccaagcgcctgcagagagttctaaaactgtggcttgatcagatttatgggctggatgtcgcgatcatcaatggcgataccaaggcagtagctaccaaggcagaggatatgactcgcaagaggctgatcggcgcttttgaagcccggccggggttccacatactgatcatgtcgccagttgccgcgggcgtcggcttgactgtggtgggggccaaccatgtcatccatctcgagcgacattggaacccagccaaagaagctcaggcgtcagatcgtgtttaccggattggccagcagaaagacgtttacatccatctaccggttgtcactcacccccagtacgactcgtttgacgtgcacctggatcggctgctgcgtggaaagctgatgttgaaggacgccgttgtcacgccagaggcagttgctgagagcgagatgattcaatcgatgggcctctga

SEQ ID NO: 6747 - DNA, 2127 bp, Pseudomonas aeruginosa MH38; identical to SEQ ID NO: 6656

SEQ ID NO: 6748 - DNA, 765 bp, Pseudomonas aeruginosa MH38; identical to SEQ ID NO: 6657

SEQ ID NO: 6749 - DNA, 2013 bp, Pseudomonas aeruginosa MH38; identical to SEQ ID NO: 6689

SEQ ID NO: 6750 - DNA, 3087 bp, Pseudomonas aeruginosa MH38; identical to SEQ ID NO: 6722

SEQ ID NO: 6751 - DNA, 2196 bp, Pseudomonas aeruginosa MH38; identical to SEQ ID NO: 6723

SEQ ID NO: 6752 - DNA, 738 bp, Pseudomonas aeruginosa MH38; identical to SEQ ID NO: 6673

SEQ ID NO: 6753 - DNA, 1644 bp, Pseudomonas aeruginosa MH38; identical to SEQ ID NO: 6674

SEQ ID NO: 6754 - DNA, 3252 bp, Pseudomonas aeruginosa MH38; identical to SEQ ID NO: 6675

SEQ ID NO: 6755 - DNA, 2127 bp, Pseudomonas aeruginosa C2773C; identical to SEQ ID NO: 6656

SEQ ID NO: 6756 - DNA, 765 bp, Pseudomonas aeruginosa C2773C; identical to SEQ ID NO: 6657

SEQ ID NO: 6757 - DNA, 2013 bp, Pseudomonas aeruginosa C2773C; identical to SEQ ID NO: 6689

SEQ ID NO: 6758 - DNA, 3042 bp, Pseudomonas aeruginosa C2773C; identical to SEQ ID NO: 6718

SEQ ID NO: 6759 - DNA, 2196 bp, Pseudomonas aeruginosa; identical to SEQ ID NO: 6723

SEQ ID NO: 6760 - DNA, 738 bp, Pseudomonas aeruginosa; identical to SEQ ID NO: 6673

SEQ ID NO: 6761 - DNA, 1644 bp, Pseudomonas aeruginosa; identical to SEQ ID NO: 6674

SEQ ID NO: 6762 - DNA, 3252 bp, Pseudomonas aeruginosa; identical to SEQ ID NO: 6675

SEQ ID NO: 6763 - DNA, 2196 bp, Pseudomonas aeruginosa; identical to SEQ ID NO: 6723

SEQ ID NO: 6764 - DNA, 738 bp, Pseudomonas aeruginosa; identical to SEQ ID NO: 6673

SEQ ID NO: 6765 - DNA, 1644 bp, Pseudomonas aeruginosa; identical to SEQ ID NO: 6674

SEQ ID NO: 6766 - DNA, 3252 bp, Pseudomonas aeruginosa; identical to SEQ ID NO: 6675

SEQ ID NO: 6767 - DNA, 2127 bp, Pseudomonas aeruginosa; identical to SEQ ID NO: 6656

SEQ ID NO: 6768 - DNA, 765 bp, Pseudomonas aeruginosa; identical to SEQ ID NO: 6657

SEQ ID NO: 6769 - DNA, 2013 bp, Pseudomonas aeruginosa; identical to SEQ ID NO: 6689

SEQ ID NO: 6770 - DNA, 3087 bp, Pseudomonas aeruginosa; identical to SEQ ID NO: 6722

SEQ ID NO: 6771 - DNA, 2127 bp, Pseudomonas aeruginosa; identical to SEQ ID NO: 6656

SEQ ID NO: 6772 - DNA, 765 bp, Pseudomonas aeruginosa; identical to SEQ ID NO: 6657

SEQ ID NO: 6773 - DNA, 2013 bp, Pseudomonas aeruginosa; identical to SEQ ID NO: 6689

SEQ ID NO: 6774 - DNA, 3087 bp, Pseudomonas aeruginosa; identical to SEQ ID NO: 6722

SEQ ID NO: 6775 - DNA, 2196 bp, Pseudomonas aeruginosa; identical to SEQ ID NO: 6723

SEQ ID NO: 6776 - DNA, 738 bp, Pseudomonas aeruginosa; identical to SEQ ID NO: 6673

SEQ ID NO: 6777 - DNA, 1644 bp, Pseudomonas aeruginosa; identical to SEQ ID NO: 6674

SEQ ID NO: 6778 - DNA, 3252 bp, Pseudomonas aeruginosa; identical to SEQ ID NO: 6675

SEQ ID NO: 6779 - DNA, 2127 bp, Pseudomonas aeruginosa; identical to SEQ ID NO: 6656

SEQ ID NO: 6780 - DNA, 765 bp, Pseudomonas aeruginosa; identical to SEQ ID NO: 6657

SEQ ID NO: 6781 - DNA, 2013 bp, Pseudomonas aeruginosa; identical to SEQ ID NO: 6689

SEQ ID NO: 6782 - DNA, 3087 bp, Pseudomonas aeruginosa; identical to SEQ ID NO: 6722

SEQ ID NO: 6783 - DNA, 2196 bp, Pseudomonas aeruginosa; identical to SEQ ID NO: 6723

SEQ ID NO: 6784 - DNA, 738 bp, Pseudomonas aeruginosa; identical to SEQ ID NO: 6673

SEQ ID NO: 6785 - DNA, 1644 bp, Pseudomonas aeruginosa; identical to SEQ ID NO: 6674

SEQ ID NO: 6786 - DNA, 3252 bp, Pseudomonas aeruginosa; identical to SEQ ID NO: 6675

SEQ ID NO: 6787 - DNA, 2196 bp, Pseudomonas aeruginosa; identical to SEQ ID NO: 6723

SEQ ID NO: 6788 - DNA, 738 bp, Pseudomonas aeruginosa; identical to SEQ ID NO: 6673

SEQ ID NO: 6789 - DNA, 1644 bp, Pseudomonas aeruginosa; identical to SEQ ID NO: 6674

SEQ ID NO: 6790 - DNA, 3252 bp, Pseudomonas aeruginosa; identical to SEQ ID NO: 6675

SEQ ID NO: 6791 - DNA, 2127 bp, Pseudomonas aeruginosa; identical to SEQ ID NO: 6656

SEQ ID NO: 6792 - DNA, 765 bp, Pseudomonas aeruginosa; identical to SEQ ID NO: 6657

SEQ ID NO: 6793 - DNA, 2013 bp, Pseudomonas aeruginosa; identical to SEQ ID NO: 6689

SEQ ID NO: 6794 - DNA, 3087 bp, Pseudomonas aeruginosa; identical to SEQ ID NO: 6722

SEQ ID NO: 6795 - DNA, 2127 bp, Pseudomonas aeruginosa; identical to SEQ ID NO: 6656

SEQ ID NO: 6796 - DNA, 765 bp, Pseudomonas aeruginosa; identical to SEQ ID NO: 6657

SEQ ID NO: 6797 - DNA, 2013 bp, Pseudomonas aeruginosa; identical to SEQ ID NO: 6689

SEQ ID NO: 6798 - DNA, 3087 bp, Pseudomonas aeruginosa; identical to SEQ ID NO: 6722

SEQ ID NO: 6799 - DNA, 2196 bp, Pseudomonas aeruginosa; identical to SEQ ID NO: 6723

SEQ ID NO: 6800 - DNA, 738 bp, Pseudomonas aeruginosa; identical to SEQ ID NO: 6673

SEQ ID NO: 6801 - DNA, 1644 bp, Pseudomonas aeruginosa; identical to SEQ ID NO: 6674

SEQ ID NO: 6802 - DNA, 3252 bp, Pseudomonas aeruginosa; identical to SEQ ID NO: 6675

SEQ ID NO: 6803 - DNA, 2127 bp, Pseudomonas aeruginosa; identical to SEQ ID NO: 6656

SEQ ID NO: 6804 - DNA, 765 bp, Pseudomonas aeruginosa; identical to SEQ ID NO: 6657

SEQ ID NO: 6805 - DNA, 2013 bp, Pseudomonas aeruginosa; identical to SEQ ID NO: 6689

SEQ ID NO: 6806 - DNA, 3087 bp, Pseudomonas aeruginosa; identical to SEQ ID NO: 6722

SEQ ID NO: 6807 - DNA, 2127 bp, Pseudomonas aeruginosa; identical to SEQ ID NO: 6656

SEQ ID NO: 6808 - DNA, 765 bp, Pseudomonas aeruginosa; identical to SEQ ID NO: 6657

SEQ ID NO: 6809 - DNA, 2013 bp, Pseudomonas aeruginosa; identical to SEQ ID NO: 6689

SEQ ID NO: 6810 - DNA, 3087 bp, Pseudomonas aeruginosa; identical to SEQ ID NO: 6722

SEQ ID NO: 6811 - DNA, 2196 bp, Pseudomonas aeruginosa; identical to SEQ ID NO: 6723

SEQ ID NO: 6812 - DNA, 738 bp, Pseudomonas aeruginosa; identical to SEQ ID NO: 6673

SEQ ID NO: 6813 - DNA, 1644 bp, Pseudomonas aeruginosa; identical to SEQ ID NO: 6674

SEQ ID NO: 6814 - DNA, 3252 bp, Pseudomonas aeruginosa; identical to SEQ ID NO: 6675

SEQ ID NO: 6815 - DNA, 2196 bp, Pseudomonas aeruginosa; identical to SEQ ID NO: 6723

SEQ ID NO: 6816 - DNA, 738 bp, Pseudomonas aeruginosa; identical to SEQ ID NO: 6673

SEQ ID NO: 6817 - DNA, 1644 bp, Pseudomonas aeruginosa; identical to SEQ ID NO: 6674

SEQ ID NO: 6818 - DNA, 3252 bp, Pseudomonas aeruginosa; identical to SEQ ID NO: 6675

SEQ ID NO: 6819 - DNA, 2196 bp, Pseudomonas aeruginosa; identical to SEQ ID NO: 6723

SEQ ID NO: 6820 - DNA, 738 bp, Pseudomonas aeruginosa; identical to SEQ ID NO: 6673

SEQ ID NO: 6821 - DNA, 1644 bp, Pseudomonas aeruginosa; identical to SEQ ID NO: 6674

SEQ ID NO: 6822 - DNA, 3252 bp, Pseudomonas aeruginosa; identical to SEQ ID NO: 6675

SEQ ID NO: 6823 - DNA, 2127 bp, Pseudomonas aeruginosa; identical to SEQ ID NO: 6656

SEQ ID NO: 6824 - DNA, 765 bp, Pseudomonas aeruginosa; identical to SEQ ID NO: 6657

SEQ ID NO: 6825 - DNA, 2013 bp, Pseudomonas aeruginosa; identical to SEQ ID NO: 6689

SEQ ID NO: 6826 - DNA, 3087 bp, Pseudomonas aeruginosa; identical to SEQ ID NO: 6722

SEQ ID NO: 6827 - DNA, 2127 bp, Pseudomonas aeruginosa; identical to SEQ ID NO: 6656

SEQ ID NO: 6828 - DNA, 765 bp, Pseudomonas aeruginosa; identical to SEQ ID NO: 6657

SEQ ID NO: 6829 - DNA, 2013 bp, Pseudomonas aeruginosa; identical to SEQ ID NO: 6689

SEQ ID NO: 6830 - DNA, 3087 bp, Pseudomonas aeruginosa; identical to SEQ ID NO: 6722

SEQ ID NO: 6831 - DNA, 2196 bp, Pseudomonas aeruginosa; identical to SEQ ID NO: 6723

SEQ ID NO: 6832 - DNA, 738 bp, Pseudomonas aeruginosa; identical to SEQ ID NO: 6673

SEQ ID NO: 6833 - DNA, 1644 bp, Pseudomonas aeruginosa; identical to SEQ ID NO: 6674

SEQ ID NO: 6834 - DNA, 3252 bp, Pseudomonas aeruginosa; identical to SEQ ID NO: 6675

SEQ ID NO: 6835 - DNA, 2127 bp, Pseudomonas aeruginosa; identical to SEQ ID NO: 6656

SEQ ID NO: 6836 - DNA, 765 bp, Pseudomonas aeruginosa; identical to SEQ ID NO: 6657

SEQ ID NO: 6837 - DNA, 2013 bp, Pseudomonas aeruginosa; identical to SEQ ID NO: 6689

SEQ ID NO: 6838 - DNA, 3087 bp, Pseudomonas aeruginosa; identical to SEQ ID NO: 6722

SEQ ID NO: 6839 - DNA, 2196 bp, Pseudomonas aeruginosa; identical to SEQ ID NO: 6723

SEQ ID NO: 6840 - DNA, 738 bp, Pseudomonas aeruginosa; identical to SEQ ID NO: 6673

SEQ ID NO: 6841 - DNA, 1644 bp, Pseudomonas aeruginosa; identical to SEQ ID NO: 6674

SEQ ID NO: 6842 - DNA, 3252 bp, Pseudomonas aeruginosa; identical to SEQ ID NO: 6675

SEQ ID NO: 6843 - DNA, 2196 bp, Pseudomonas aeruginosa; identical to SEQ ID NO: 6723

SEQ ID NO: 6844 - DNA, 738 bp, Pseudomonas aeruginosa; identical to SEQ ID NO: 6673

SEQ ID NO: 6845 - DNA, 1644 bp, Pseudomonas aeruginosa; identical to SEQ ID NO: 6674

SEQ ID NO: 6846 - DNA, 3252 bp, Pseudomonas aeruginosa; identical to SEQ ID NO: 6675

SEQ ID NO: 6847 - DNA, 2127 bp, Pseudomonas aeruginosa; identical to SEQ ID NO: 6656

SEQ ID NO: 6848 - DNA, 765 bp, Pseudomonas aeruginosa; identical to SEQ ID NO: 6657

SEQ ID NO: 6849 - DNA, 2013 bp, Pseudomonas aeruginosa; identical to SEQ ID NO: 6689

SEQ ID NO: 6850 - DNA, 3087 bp, Pseudomonas aeruginosa; identical to SEQ ID NO: 6722

SEQ ID NO: 6851 - DNA, 2196 bp, Pseudomonas aeruginosa; identical to SEQ ID NO: 6723

SEQ ID NO: 6852 - DNA, 738 bp, Pseudomonas aeruginosa; identical to SEQ ID NO: 6673

SEQ ID NO: 6853 - DNA, 1644 bp, Pseudomonas aeruginosa; identical to SEQ ID NO: 6674

SEQ ID NO: 6854 - DNA, 3252 bp, Pseudomonas aeruginosa; identical to SEQ ID NO: 6675

SEQ ID NO: 6855 - DNA, 2127 bp, Pseudomonas aeruginosa; identical to SEQ ID NO: 6656

SEQ ID NO: 6856 - DNA, 765 bp, Pseudomonas aeruginosa; identical to SEQ ID NO: 6657

SEQ ID NO: 6857 - DNA, 2013 bp, Pseudomonas aeruginosa; identical to SEQ ID NO: 6689

SEQ ID NO: 6858 - DNA, 3087 bp, Pseudomonas aeruginosa; identical to SEQ ID NO: 6722

SEQ ID NO: 6859 - DNA, 2196 bp, Pseudomonas aeruginosa; identical to SEQ ID NO: 6723

SEQ ID NO: 6860 - DNA, 738 bp, Pseudomonas aeruginosa; identical to SEQ ID NO: 6673

SEQ ID NO: 6861 - DNA, 1644 bp, Pseudomonas aeruginosa; identical to SEQ ID NO: 6674

SEQ ID NO: 6862 - DNA, 3252 bp, Pseudomonas aeruginosa; identical to SEQ ID NO: 6675

SEQ ID NO: 6863 - DNA, 2127 bp, Pseudomonas aeruginosa; identical to SEQ ID NO: 6656

SEQ ID NO: 6864 - DNA, 765 bp, Pseudomonas aeruginosa; identical to SEQ ID NO: 6657

SEQ ID NO: 6865 - DNA, 2013 bp, Pseudomonas aeruginosa; identical to SEQ ID NO: 6689

SEQ ID NO: 6866 - DNA, 3087 bp, Pseudomonas aeruginosa; identical to SEQ ID NO: 6722

SEQ ID NO: 6867 - DNA, 2127 bp, Pseudomonas aeruginosa; identical to SEQ ID NO: 6656

SEQ ID NO: 6868 - DNA, 765 bp, Pseudomonas aeruginosa; identical to SEQ ID NO: 6657

SEQ ID NO: 6869 - DNA, 2013 bp, Pseudomonas aeruginosa; identical to SEQ ID NO: 6689

SEQ ID NO: 6870 - DNA, 3087 bp, Pseudomonas aeruginosa; identical to SEQ ID NO: 6722

SEQ ID NO: 6871 - DNA, 2196 bp, Pseudomonas aeruginosa; identical to SEQ ID NO: 6723

SEQ ID NO: 6872 - DNA, 738 bp, Pseudomonas aeruginosa; identical to SEQ ID NO: 6673

SEQ ID NO: 6873 - DNA, 1644 bp, Pseudomonas aeruginosa; identical to SEQ ID NO: 6674

SEQ ID NO: 6874 - DNA, 3252 bp, Pseudomonas aeruginosa; identical to SEQ ID NO: 6675

SEQ ID NO: 6875 - DNA, 2127 bp, Pseudomonas aeruginosa; identical to SEQ ID NO: 6656

SEQ ID NO: 6876 - DNA, 765 bp, Pseudomonas aeruginosa; identical to SEQ ID NO: 6657

SEQ ID NO: 6877 - DNA, 2013 bp, Pseudomonas aeruginosa; identical to SEQ ID NO: 6689

SEQ ID NO: 6878 - DNA, 3087 bp, Pseudomonas aeruginosa; identical to SEQ ID NO: 6722

SEQ ID NO: 6879 - DNA, 2196 bp, Pseudomonas aeruginosa; identical to SEQ ID NO: 6723

SEQ ID NO: 6880 - DNA, 738 bp, Pseudomonas aeruginosa; identical to SEQ ID NO: 6673

SEQ ID NO: 6881 - DNA, 1644 bp, Pseudomonas aeruginosa; identical to SEQ ID NO: 6674

SEQ ID NO: 6882 - DNA, 3252 bp, Pseudomonas aeruginosa; identical to SEQ ID NO: 6675

SEQ ID NO: 6883 - DNA, 2196 bp, Pseudomonas aeruginosa; identical to SEQ ID NO: 6723

SEQ ID NO: 6884 - DNA, 738 bp, Pseudomonas aeruginosa; identical to SEQ ID NO: 6673

SEQ ID NO: 6885 - DNA, 1644 bp, Pseudomonas aeruginosa; identical to SEQ ID NO: 6674

SEQ ID NO: 6886 - DNA, 3252 bp, Pseudomonas aeruginosa; identical to SEQ ID NO: 6675

SEQ ID NO: 6887 - DNA, 2127 bp, Pseudomonas aeruginosa; identical to SEQ ID NO: 6656

SEQ ID NO: 6888 - DNA, 765 bp, Pseudomonas aeruginosa; identical to SEQ ID NO: 6657

SEQ ID NO: 6889 - DNA, 2013 bp, Pseudomonas aeruginosa; identical to SEQ ID NO: 6689

SEQ ID NO: 6890 - DNA, 3087 bp, Pseudomonas aeruginosa; identical to SEQ ID NO: 6722

SEQ ID NO: 6891 - DNA, 2196 bp, Pseudomonas aeruginosa; identical to SEQ ID NO: 6723

SEQ ID NO: 6892 - DNA, 738 bp, Pseudomonas aeruginosa; identical to SEQ ID NO: 6673

SEQ ID NO: 6893 - DNA, 1644 bp, Pseudomonas aeruginosa; identical to SEQ ID NO: 6674

SEQ ID NO: 6894 - DNA, 3252 bp, Pseudomonas aeruginosa; identical to SEQ ID NO: 6675

SEQ ID NO: 6895 - DNA, 2127 bp, Pseudomonas aeruginosa; identical to SEQ ID NO: 6656

SEQ ID NO: 6896 - DNA, 765 bp, Pseudomonas aeruginosa; identical to SEQ ID NO: 6657

SEQ ID NO: 6897 - DNA, 2013 bp, Pseudomonas aeruginosa; identical to SEQ ID NO: 6689

SEQ ID NO: 6898 - DNA, 3087 bp, Pseudomonas aeruginosa; identical to SEQ ID NO: 6722

SEQ ID NO: 6899 - DNA, 2127 bp, Pseudomonas aeruginosa; identical to SEQ ID NO: 6656

SEQ ID NO: 6900 - DNA, 765 bp, Pseudomonas aeruginosa; identical to SEQ ID NO: 6657

SEQ ID NO: 6901 - DNA, 2013 bp, Pseudomonas aeruginosa; identical to SEQ ID NO: 6689

SEQ ID NO: 6902 - DNA, 3087 bp, Pseudomonas aeruginosa; identical to SEQ ID NO: 6722

SEQ ID NO: 6903 - DNA, 2196 bp, Pseudomonas aeruginosa; identical to SEQ ID NO: 6723

SEQ ID NO: 6904 - DNA, 738 bp, Pseudomonas aeruginosa; identical to SEQ ID NO: 6673

SEQ ID NO: 6905 - DNA, 1644 bp, Pseudomonas aeruginosa; identical to SEQ ID NO: 6674

SEQ ID NO: 6906 - DNA, 3252 bp, Pseudomonas aeruginosa; identical to SEQ ID NO: 6675

SEQ ID NO: 6907 - DNA, 2127 bp, Pseudomonas aeruginosa; identical to SEQ ID NO: 6656

SEQ ID NO: 6908 - DNA, 765 bp, Pseudomonas aeruginosa; identical to SEQ ID NO: 6657

SEQ ID NO: 6909 - DNA, 2013 bp, Pseudomonas aeruginosa; identical to SEQ ID NO: 6689

SEQ ID NO: 6910 - DNA, 3087 bp, Pseudomonas aeruginosa; identical to SEQ ID NO: 6722

SEQ ID NO: 6911 - DNA, 2196 bp, Pseudomonas aeruginosa; identical to SEQ ID NO: 6723

SEQ ID NO: 6912 - DNA, 738 bp, Pseudomonas aeruginosa; identical to SEQ ID NO: 6673

SEQ ID NO: 6913 - DNA, 1644 bp, Pseudomonas aeruginosa
atgagtcgggcgttgtcgtcactctccgatgccatagcacgtagcttgcagcgccagcaggaacgcacggcggataccgggctgaatagatttgtcgatttgcaacgtgcaaacgatgagcttactcggcgcttcaatcaagtcgagaaggctctgcctccgcctcaagagaagcggagggaagcactgcgcaagtttaggcgtgataagcaattaagctctacgccctcggaatacagaccggtgtttgctggcttggcagataaagatgacggcggcctgccggtgcttgaggatgacgtcctatttgaattggtgcatcgagaggtctctattcgaagtgaccaacaaaagctgagccgaaaggattggttggcactttgctacagctattttttctacgatcacgccaagccggcagataactccaattggcgggtcctgcgcagcgatatcgatcagggccttgatgcggtcaagcggcgcatcggtcgcgagaaagagtggatgcggattgtccagcagcaccgtgagctgttcggtgatcaggcgggaaaacagctcgcggaggaaatctttgcggggcgcgccaaggacctgtccgctctgcagaccatcgcacaggtgccggatagcagctggttgtggaagcgcatctttgatgtgttgctgtcgtgcatcgatgatctggatgacgacaccttcgtgcagcgcctgccggagctgactgagttggggcagttgaataatcggtacatggataaggtgctcagcgcctgcctgacccgctattaccgctcgcgttttcgcgaacagtcttcttctctgctcaagcaagccgcgcttgagcactggggcagtccgcaacttcgctcagaccaaaaccgctggctaaaccatgtggagcagcccgtttgcgccatggtgatggcctggttcgccaaggaggacctggagcacttcttcaggttgctcaagggcgaggcggaggttgatcattcgcgtctgttctattggctgcgctttgccaatcaaatgagctatacgcggatcgtgatgggtaatgatgcctggaatgaccgtggtagtgacttcgtggccttccgcgagaaaaacaaggggcgtttgagtcagttgacaggggcctcacgtcacgtcagcgccgtagtcatgcagatcggccaattcttttttgttgagttctccggaacagggcatgcctgctatgtctacaaagcagatcaagcacctttcaacccggatcggataaaactcgacctaaccactgagctgaagcagcaggggcgtgagctaaagcgcatgtctcactcgccggcaccgagacgccctaacctcgttgaaggttggctagaaaagttcgacaccgagctccgggagttgggcatagttcctcagtcccctagtggccacaacgagccccggaaagctggaagccagtcgtccattgagatccaggtggcagccaaactgcggcacgttaactaccagctgatggacaaccgcagcaagggtggcgccttgatggtcaagcttgcacgtgatgatgcgcgggccagagttgcgctagcgcggttgggatttaaagagatgaacaagaacccgctgacattctggagaagctaa

SEQ ID NO: 6914 - DNA, 3252 bp, Pseudomonas aeruginosa; identical to SEQ ID NO: 6675

SEQ ID NO: 6915 - DNA, 2196 bp, Pseudomonas aeruginosa; identical to SEQ ID NO: 6723

SEQ ID NO: 6916 - DNA, 738 bp, Pseudomonas aeruginosa; identical to SEQ ID NO: 6673

SEQ ID NO: 6917 - DNA, 1644 bp, Pseudomonas aeruginosa; identical to SEQ ID NO: 6674

SEQ ID NO: 6918 - DNA, 3252 bp, Pseudomonas aeruginosa; identical to SEQ ID NO: 6675

SEQ ID NO: 6919 - DNA, 2127 bp, Pseudomonas aeruginosa; identical to SEQ ID NO: 6656

SEQ ID NO: 6920 - DNA, 765 bp, Pseudomonas aeruginosa; identical to SEQ ID NO: 6657

SEQ ID NO: 6921 - DNA, 2013 bp, Pseudomonas aeruginosa; identical to SEQ ID NO: 6689

SEQ ID NO: 6922 - DNA, 3087 bp, Pseudomonas aeruginosa; identical to SEQ ID NO: 6722

SEQ ID NO: 6923 - DNA, 2196 bp, Pseudomonas aeruginosa; identical to SEQ ID NO: 6723

SEQ ID NO: 6924 - DNA, 738 bp, Pseudomonas aeruginosa; identical to SEQ ID NO: 6673

SEQ ID NO: 6925 - DNA, 1644 bp, Pseudomonas aeruginosa; identical to SEQ ID NO: 6674

SEQ ID NO: 6926 - DNA, 3252 bp, Pseudomonas aeruginosa; identical to SEQ ID NO: 6675

SEQ ID NO: 6927 - DNA, 2127 bp, Pseudomonas aeruginosa; identical to SEQ ID NO: 6656

SEQ ID NO: 6928 - DNA, 765 bp, Pseudomonas aeruginosa; identical to SEQ ID NO: 6657

SEQ ID NO: 6929 - DNA, 2013 bp, Pseudomonas aeruginosa; identical to SEQ ID NO: 6689

SEQ ID NO: 6930 - DNA, 3087 bp, Pseudomonas aeruginosa; identical to SEQ ID NO: 6722

SEQ ID NO: 6931 - DNA, 2196 bp, Pseudomonas aeruginosa; identical to SEQ ID NO: 6723

SEQ ID NO: 6932 - DNA, 738 bp, Pseudomonas aeruginosa; identical to SEQ ID NO: 6673

SEQ ID NO: 6933 - DNA, 1644 bp, Pseudomonas aeruginosa; identical to SEQ ID NO: 6674

SEQ ID NO: 6934 - DNA, 2127 bp, Pseudomonas aeruginosa; identical to SEQ ID NO: 6656

SEQ ID NO: 6935 - DNA, 765 bp, Pseudomonas aeruginosa; identical to SEQ ID NO: 6657

SEQ ID NO: 6936 - DNA, 2013 bp, Pseudomonas aeruginosa; identical to SEQ ID NO: 6689

SEQ ID NO: 6937 - DNA, 3087 bp, Pseudomonas aeruginosa; identical to SEQ ID NO: 6722

SEQ ID NO: 6938 - DNA, 2127 bp, Pseudomonas aeruginosa; identical to SEQ ID NO: 6656

SEQ ID NO: 6939 - DNA, 765 bp, Pseudomonas aeruginosa; identical to SEQ ID NO: 6657

SEQ ID NO: 6940 - DNA, 2013 bp, Pseudomonas aeruginosa; identical to SEQ ID NO: 6689

SEQ ID NO: 6941 - DNA, 3087 bp, Pseudomonas aeruginosa; identical to SEQ ID NO: 6722

SEQ ID NO: 6942 - DNA, 2196 bp, Pseudomonas aeruginosa; identical to SEQ ID NO: 6723

SEQ ID NO: 6943 - DNA, 738 bp, Pseudomonas aeruginosa; identical to SEQ ID NO: 6673

SEQ ID NO: 6944 - DNA, 1644 bp, Pseudomonas aeruginosa; identical to SEQ ID NO: 6674

SEQ ID NO: 6945 - DNA, 3252 bp, Pseudomonas aeruginosa; identical to SEQ ID NO: 6675

SEQ ID NO: 6946 - DNA, 2127 bp, Pseudomonas aeruginosa; identical to SEQ ID NO: 6656

SEQ ID NO: 6947 - DNA, 765 bp, Pseudomonas aeruginosa; identical to SEQ ID NO: 6657

SEQ ID NO: 6948 - DNA, 2013 bp, Pseudomonas aeruginosa; identical to SEQ ID NO: 6689

SEQ ID NO: 6949 - DNA, 3087 bp, Pseudomonas aeruginosa; identical to SEQ ID NO: 6722

SEQ ID NO: 6950 - DNA, 2196 bp, Pseudomonas aeruginosa; identical to SEQ ID NO: 6723

SEQ ID NO: 6951 - DNA, 738 bp, Pseudomonas aeruginosa; identical to SEQ ID NO: 6673

SEQ ID NO: 6952 - DNA, 1644 bp, Pseudomonas aeruginosa; identical to SEQ ID NO: 6674

SEQ ID NO: 6953 - DNA, 3252 bp, Pseudomonas aeruginosa; identical to SEQ ID NO: 6675

SEQ ID NO: 6954 - DNA, 2196 bp, Pseudomonas aeruginosa; identical to SEQ ID NO: 6723

SEQ ID NO: 6955 - DNA, 738 bp, Pseudomonas aeruginosa; identical to SEQ ID NO: 6673

SEQ ID NO: 6956 - DNA, 1644 bp, Pseudomonas aeruginosa; identical to SEQ ID NO: 6674

SEQ ID NO: 6957 - DNA, 3252 bp, Pseudomonas aeruginosa; identical to SEQ ID NO: 6675

SEQ ID NO: 6958 - DNA, 2127 bp, Pseudomonas aeruginosa; identical to SEQ ID NO: 6656

SEQ ID NO: 6959 - DNA, 765 bp, Pseudomonas aeruginosa; identical to SEQ ID NO: 6657

SEQ ID NO: 6960 - DNA, 2013 bp, Pseudomonas aeruginosa; identical to SEQ ID NO: 6689

SEQ ID NO: 6961 - DNA, 3087 bp, Pseudomonas aeruginosa; identical to SEQ ID NO: 6722

SEQ ID NO: 6962 - DNA, 2127 bp, Pseudomonas aeruginosa; identical to SEQ ID NO: 6656

SEQ ID NO: 6963 - DNA, 765 bp, Pseudomonas aeruginosa; identical to SEQ ID NO: 6657

SEQ ID NO: 6964 - DNA, 2013 bp, Pseudomonas aeruginosa; identical to SEQ ID NO: 6689

SEQ ID NO: 6965 - DNA, 3087 bp, Pseudomonas aeruginosa; identical to SEQ ID NO: 6722

SEQ ID NO: 6966 - DNA, 2196 bp, Pseudomonas aeruginosa; identical to SEQ ID NO: 6723

SEQ ID NO: 6967 - DNA, 738 bp, Pseudomonas aeruginosa; identical to SEQ ID NO: 6673

SEQ ID NO: 6968 - DNA, 1644 bp, Pseudomonas aeruginosa; identical to SEQ ID NO: 6674

SEQ ID NO: 6969 - DNA, 3252 bp, Pseudomonas aeruginosa; identical to SEQ ID NO: 6675

SEQ ID NO: 6970 - DNA, 2127 bp, Pseudomonas aeruginosa; identical to SEQ ID NO: 6656

SEQ ID NO: 6971 - DNA, 765 bp, Pseudomonas aeruginosa; identical to SEQ ID NO: 6657

SEQ ID NO: 6972 - DNA, 2013 bp, Pseudomonas aeruginosa; identical to SEQ ID NO: 6689

SEQ ID NO: 6973 - DNA, 3087 bp, Pseudomonas aeruginosa; identical to SEQ ID NO: 6722

SEQ ID NO: 6974 - DNA, 2196 bp, Pseudomonas aeruginosa; identical to SEQ ID NO: 6723

SEQ ID NO: 6975 - DNA, 738 bp, Pseudomonas aeruginosa; identical to SEQ ID NO: 6673

SEQ ID NO: 6976 - DNA, 1644 bp, Pseudomonas aeruginosa; identical to SEQ ID NO: 6674

SEQ ID NO: 6977 - DNA, 3252 bp, Pseudomonas aeruginosa; identical to SEQ ID NO: 6675

SEQ ID NO: 6978 - DNA, 2196 bp, Pseudomonas aeruginosa; identical to SEQ ID NO: 6723

SEQ ID NO: 6979 - DNA, 738 bp, Pseudomonas aeruginosa; identical to SEQ ID NO: 6673

SEQ ID NO: 6980 - DNA, 1644 bp, Pseudomonas aeruginosa; identical to SEQ ID NO: 6674

SEQ ID NO: 6981 - DNA, 3252 bp, Pseudomonas aeruginosa; identical to SEQ ID NO: 6675

SEQ ID NO: 6982 - DNA, 2127 bp, Pseudomonas aeruginosa; identical to SEQ ID NO: 6656

SEQ ID NO: 6983 - DNA, 765 bp, Pseudomonas aeruginosa; identical to SEQ ID NO: 6657

SEQ ID NO: 6984 - DNA, 2013 bp, Pseudomonas aeruginosa; identical to SEQ ID NO: 6689

SEQ ID NO: 6985 - DNA, 3087 bp, Pseudomonas aeruginosa; identical to SEQ ID NO: 6722

SEQ ID NO: 6986 - DNA, 2196 bp, Pseudomonas aeruginosa; identical to SEQ ID NO: 6723

SEQ ID NO: 6987 - DNA, 738 bp, Pseudomonas aeruginosa; identical to SEQ ID NO: 6673

SEQ ID NO: 6988 - DNA, 1644 bp, Pseudomonas aeruginosa; identical to SEQ ID NO: 6674

SEQ ID NO: 6989 - DNA, 3252 bp, Pseudomonas aeruginosa; identical to SEQ ID NO: 6675

SEQ ID NO: 6990 - DNA, 2127 bp, Pseudomonas aeruginosa; identical to SEQ ID NO: 6656

SEQ ID NO: 6991 - DNA, 765 bp, Pseudomonas aeruginosa; identical to SEQ ID NO: 6657

SEQ ID NO: 6992 - DNA, 2013 bp, Pseudomonas aeruginosa; identical to SEQ ID NO: 6689

SEQ ID NO: 6993 - DNA, 3087 bp, Pseudomonas aeruginosa; identical to SEQ ID NO: 6722

SEQ ID NO: 6994 - DNA, 2196 bp, Pseudomonas aeruginosa; identical to SEQ ID NO: 6723

SEQ ID NO: 6995 - DNA, 738 bp, Pseudomonas aeruginosa; identical to SEQ ID NO: 6673

SEQ ID NO: 6996 - DNA, 1644 bp, Pseudomonas aeruginosa; identical to SEQ ID NO: 6674

SEQ ID NO: 6997 - DNA, 3252 bp, Pseudomonas aeruginosa; identical to SEQ ID NO: 6675

SEQ ID NO: 6998 - DNA, 2127 bp, Pseudomonas aeruginosa; identical to SEQ ID NO: 6656

SEQ ID NO: 6999 - DNA, 765 bp, Pseudomonas aeruginosa; identical to SEQ ID NO: 6657

SEQ ID NO: 7000 - DNA, 2013 bp, Pseudomonas aeruginosa; identical to SEQ ID NO: 6689

SEQ ID NO: 7001 - DNA, 3087 bp, Pseudomonas aeruginosa; identical to SEQ ID NO: 6722

SEQ ID NO: 7002 - DNA, 2127 bp, Pseudomonas aeruginosa; identical to SEQ ID NO: 6656

SEQ ID NO: 7003 - DNA, 765 bp, Pseudomonas aeruginosa; identical to SEQ ID NO: 6657

SEQ ID NO: 7004 - DNA, 2013 bp, Pseudomonas aeruginosa; identical to SEQ ID NO: 6689

SEQ ID NO: 7005 - DNA, 3087 bp, Pseudomonas aeruginosa; identical to SEQ ID NO: 6722

SEQ ID NO: 7006 - DNA, 2196 bp, Pseudomonas aeruginosa; identical to SEQ ID NO: 6723

SEQ ID NO: 7007 - DNA, 738 bp, Pseudomonas aeruginosa; identical to SEQ ID NO: 6673

SEQ ID NO: 7008 - DNA, 1644 bp, Pseudomonas aeruginosa; identical to SEQ ID NO: 6674

SEQ ID NO: 7009 - DNA, 3252 bp, Pseudomonas aeruginosa; identical to SEQ ID NO: 6675

SEQ ID NO: 7010 - DNA, 2196 bp, Pseudomonas aeruginosa; identical to SEQ ID NO: 6723

SEQ ID NO: 7011 - DNA, 738 bp, Pseudomonas aeruginosa; identical to SEQ ID NO: 6673

SEQ ID NO: 7012 - DNA, 1644 bp, Pseudomonas aeruginosa; identical to SEQ ID NO: 6674

SEQ ID NO: 7013 - DNA, 3252 bp, Pseudomonas aeruginosa; identical to SEQ ID NO: 6675

SEQ ID NO: 7014 - DNA, 2127 bp, Pseudomonas aeruginosa; identical to SEQ ID NO: 6656

SEQ ID NO: 7015 - DNA, 765 bp, Pseudomonas aeruginosa; identical to SEQ ID NO: 6657

SEQ ID NO: 7016 - DNA, 2013 bp, Pseudomonas aeruginosa; identical to SEQ ID NO: 6689

SEQ ID NO: 7017 - DNA, 3087 bp, Pseudomonas aeruginosa; identical to SEQ ID NO: 6722

SEQ ID NO: 7018 - DNA, 2196 bp, Pseudomonas aeruginosa; identical to SEQ ID NO: 6723

SEQ ID NO: 7019 - DNA, 738 bp, Pseudomonas aeruginosa; identical to SEQ ID NO: 6673

SEQ ID NO: 7020 - DNA, 1644 bp, Pseudomonas aeruginosa; identical to SEQ ID NO: 6674

SEQ ID NO: 7021 - DNA, 3252 bp, Pseudomonas aeruginosa; identical to SEQ ID NO: 6675

SEQ ID NO: 7022 - DNA, 2127 bp, Pseudomonas aeruginosa; identical to SEQ ID NO: 6656

SEQ ID NO: 7023 - DNA, 765 bp, Pseudomonas aeruginosa; identical to SEQ ID NO: 6657

SEQ ID NO: 7024 - DNA, 2013 bp, Pseudomonas aeruginosa; identical to SEQ ID NO: 6689

SEQ ID NO: 7025 - DNA, 3087 bp, Pseudomonas aeruginosa; identical to SEQ ID NO: 6722

SEQ ID NO: 7026 - DNA, 2127 bp, Pseudomonas aeruginosa; identical to SEQ ID NO: 6656

SEQ ID NO: 7027 - DNA, 765 bp, Pseudomonas aeruginosa; identical to SEQ ID NO: 6657

SEQ ID NO: 7028 - DNA, 2013 bp, Pseudomonas aeruginosa; identical to SEQ ID NO: 6689

SEQ ID NO: 7029 - DNA, 3087 bp, Pseudomonas aeruginosa; identical to SEQ ID NO: 6722

SEQ ID NO: 7030 - DNA, 2196 bp, Pseudomonas aeruginosa; identical to SEQ ID NO: 6723

SEQ ID NO: 7031 - DNA, 738 bp, Pseudomonas aeruginosa; identical to SEQ ID NO: 6673

SEQ ID NO: 7032 - DNA, 1644 bp, Pseudomonas aeruginosa; identical to SEQ ID NO: 6674

SEQ ID NO: 7033 - DNA, 3252 bp, Pseudomonas aeruginosa; identical to SEQ ID NO: 6675

SEQ ID NO: 7034 - DNA, 2127 bp, Pseudomonas aeruginosa; identical to SEQ ID NO: 6656

SEQ ID NO: 7035 - DNA, 765 bp, Pseudomonas aeruginosa; identical to SEQ ID NO: 6657

SEQ ID NO: 7036 - DNA, 2013 bp, Pseudomonas aeruginosa; identical to SEQ ID NO: 6689

SEQ ID NO: 7037 - DNA, 3087 bp, Pseudomonas aeruginosa; identical to SEQ ID NO: 6722

SEQ ID NO: 7038 - DNA, 2196 bp, Pseudomonas aeruginosa; identical to SEQ ID NO: 6723

SEQ ID NO: 7039 - DNA, 738 bp, Pseudomonas aeruginosa; identical to SEQ ID NO: 6673

SEQ ID NO: 7040 - DNA, 1644 bp, Pseudomonas aeruginosa; identical to SEQ ID NO: 6674

SEQ ID NO: 7041 - DNA, 3252 bp, Pseudomonas aeruginosa; identical to SEQ ID NO: 6675

SEQ ID NO: 7042 - DNA, 2196 bp, Pseudomonas aeruginosa; identical to SEQ ID NO: 6723

SEQ ID NO: 7043 - DNA, 738 bp, Pseudomonas aeruginosa; identical to SEQ ID NO: 6673

SEQ ID NO: 7044 - DNA, 1644 bp, Pseudomonas aeruginosa; identical to SEQ ID NO: 6674

SEQ ID NO: 7045 - DNA, 3252 bp, Pseudomonas aeruginosa; identical to SEQ ID NO: 6675

SEQ ID NO: 7046 - DNA, 2127 bp, Pseudomonas aeruginosa; identical to SEQ ID NO: 6656

SEQ ID NO: 7047 - DNA, 765 bp, Pseudomonas aeruginosa; identical to SEQ ID NO: 6657

SEQ ID NO: 7048 - DNA, 2013 bp, Pseudomonas aeruginosa; identical to SEQ ID NO: 6689

SEQ ID NO: 7049 - DNA, 3087 bp, Pseudomonas aeruginosa; identical to SEQ ID NO: 6722

SEQ ID NO: 7050 - DNA, 2127 bp, Pseudomonas aeruginosa; identical to SEQ ID NO: 6656

SEQ ID NO: 7051 - DNA, 765 bp, Pseudomonas aeruginosa; identical to SEQ ID NO: 6657

SEQ ID NO: 7052 - DNA, 2013 bp, Pseudomonas aeruginosa; identical to SEQ ID NO: 6689

SEQ ID NO: 7053 - DNA, 3087 bp, Pseudomonas aeruginosa; identical to SEQ ID NO: 6722

SEQ ID NO: 7054 - DNA, 2196 bp, Pseudomonas aeruginosa; identical to SEQ ID NO: 6723

SEQ ID NO: 7055 - DNA, 738 bp, Pseudomonas aeruginosa; identical to SEQ ID NO: 6673

SEQ ID NO: 7056 - DNA, 1644 bp, Pseudomonas aeruginosa; identical to SEQ ID NO: 6674

SEQ ID NO: 7057 - DNA, 3252 bp, Pseudomonas aeruginosa; identical to SEQ ID NO: 6675

SEQ ID NO: 7058 - DNA, 2196 bp, Pseudomonas aeruginosa; identical to SEQ ID NO: 6723

SEQ ID NO: 7059 - DNA, 738 bp, Pseudomonas aeruginosa; identical to SEQ ID NO: 6673

SEQ ID NO: 7060 - DNA, 1644 bp, Pseudomonas aeruginosa; identical to SEQ ID NO: 6674

SEQ ID NO: 7061 - DNA, 3252 bp, Pseudomonas aeruginosa; identical to SEQ ID NO: 6675

SEQ ID NO: 7062 - DNA, 2127 bp, Pseudomonas aeruginosa; identical to SEQ ID NO: 6656

SEQ ID NO: 7063 - DNA, 765 bp, Pseudomonas aeruginosa; identical to SEQ ID NO: 6657

SEQ ID NO: 7064 - DNA, 2013 bp, Pseudomonas aeruginosa; identical to SEQ ID NO: 6689

SEQ ID NO: 7065 - DNA, 3087 bp, Pseudomonas aeruginosa; identical to SEQ ID NO: 6722

SEQ ID NO: 7066 - DNA, 2196 bp, Pseudomonas aeruginosa; identical to SEQ ID NO: 6723

SEQ ID NO: 7067 - DNA, 738 bp, Pseudomonas aeruginosa; identical to SEQ ID NO: 6673

SEQ ID NO: 7068 - DNA, 1644 bp, Pseudomonas aeruginosa; identical to SEQ ID NO: 6674

SEQ ID NO: 7069 - DNA, 3252 bp, Pseudomonas aeruginosa; identical to SEQ ID NO: 6675

SEQ ID NO: 7070 - DNA, 2127 bp, Pseudomonas aeruginosa; identical to SEQ ID NO: 6656

SEQ ID NO: 7071 - DNA, 765 bp, Pseudomonas aeruginosa; identical to SEQ ID NO: 6657

SEQ ID NO: 7072 - DNA, 2013 bp, Pseudomonas aeruginosa; identical to SEQ ID NO: 6689

SEQ ID NO: 7073 - DNA, 3087 bp, Pseudomonas aeruginosa; identical to SEQ ID NO: 6722

SEQ ID NO: 7074 - DNA, 2127 bp, Pseudomonas aeruginosa; identical to SEQ ID NO: 6656

SEQ ID NO: 7075 - DNA, 765 bp, Pseudomonas aeruginosa; identical to SEQ ID NO: 6657

SEQ ID NO: 7076 - DNA, 2013 bp, Pseudomonas aeruginosa; identical to SEQ ID NO: 6689

SEQ ID NO: 7077 - DNA, 3087 bp, Pseudomonas aeruginosa; identical to SEQ ID NO: 6722

SEQ ID NO: 7078 - DNA, 2196 bp, Pseudomonas aeruginosa; identical to SEQ ID NO: 6723

SEQ ID NO: 7079 - DNA, 738 bp, Pseudomonas aeruginosa; identical to SEQ ID NO: 6673

SEQ ID NO: 7080 - DNA, 1644 bp, Pseudomonas aeruginosa; identical to SEQ ID NO: 6674

SEQ ID NO: 7081 - DNA, 3252 bp, Pseudomonas aeruginosa; identical to SEQ ID NO: 6675

SEQ ID NO: 7082 - DNA, 2127 bp, Pseudomonas aeruginosa; identical to SEQ ID NO: 6656

SEQ ID NO: 7083 - DNA, 765 bp, Pseudomonas aeruginosa; identical to SEQ ID NO: 6657

SEQ ID NO: 7084 - DNA, 2013 bp, Pseudomonas aeruginosa; identical to SEQ ID NO: 6689

SEQ ID NO: 7085 - DNA, 3087 bp, Pseudomonas aeruginosa; identical to SEQ ID NO: 6722

SEQ ID NO: 7086 - DNA, 2196 bp, Pseudomonas aeruginosa; identical to SEQ ID NO: 6723

SEQ ID NO: 7087 - DNA, 738 bp, Pseudomonas aeruginosa; identical to SEQ ID NO: 6673

SEQ ID NO: 7088 - DNA, 1644 bp, Pseudomonas aeruginosa; identical to SEQ ID NO: 6674

SEQ ID NO: 7089 - DNA, 3252 bp, Pseudomonas aeruginosa; identical to SEQ ID NO: 6675

SEQ ID NO: 7090 - DNA, 2196 bp, Pseudomonas aeruginosa; identical to SEQ ID NO: 6723

SEQ ID NO: 7091 - DNA, 738 bp, Pseudomonas aeruginosa; identical to SEQ ID NO: 6673

SEQ ID NO: 7092 - DNA, 1644 bp, Pseudomonas aeruginosa; identical to SEQ ID NO: 6674

SEQ ID NO: 7093 - DNA, 3252 bp, Pseudomonas aeruginosa; identical to SEQ ID NO: 6675

SEQ ID NO: 7094 - DNA, 2127 bp, Pseudomonas aeruginosa; identical to SEQ ID NO: 6656

SEQ ID NO: 7095 - DNA, 765 bp, Pseudomonas aeruginosa; identical to SEQ ID NO: 6657

SEQ ID NO: 7096 - DNA, 2013 bp, Pseudomonas aeruginosa; identical to SEQ ID NO: 6689

SEQ ID NO: 7097 - DNA, 3087 bp, Pseudomonas aeruginosa; identical to SEQ ID NO: 6722

SEQ ID NO: 7098 - DNA, 2127 bp, Pseudomonas aeruginosa; identical to SEQ ID NO: 6656

SEQ ID NO: 7099 - DNA, 765 bp, Pseudomonas aeruginosa; identical to SEQ ID NO: 6657

SEQ ID NO: 7100 - DNA, 2013 bp, Pseudomonas aeruginosa; identical to SEQ ID NO: 6689

SEQ ID NO: 7101 - DNA, 3087 bp, Pseudomonas aeruginosa; identical to SEQ ID NO: 6722

SEQ ID NO: 7102 - DNA, 2196 bp, Pseudomonas aeruginosa; identical to SEQ ID NO: 6723

SEQ ID NO: 7103 - DNA, 738 bp, Pseudomonas aeruginosa; identical to SEQ ID NO: 6673

SEQ ID NO: 7104 - DNA, 1644 bp, Pseudomonas aeruginosa; identical to SEQ ID NO: 6674

SEQ ID NO: 7105 - DNA, 3252 bp, Pseudomonas aeruginosa; identical to SEQ ID NO: 6675

SEQ ID NO: 7106 - DNA, 2196 bp, Pseudomonas aeruginosa; identical to SEQ ID NO: 6723

SEQ ID NO: 7107 - DNA, 738 bp, Pseudomonas aeruginosa; identical to SEQ ID NO: 6673

SEQ ID NO: 7108 - DNA, 1644 bp, Pseudomonas aeruginosa; identical to SEQ ID NO: 6674

SEQ ID NO: 7109 - DNA, 3252 bp, Pseudomonas aeruginosa; identical to SEQ ID NO: 6675

SEQ ID NO: 7110 - DNA, 2127 bp, Pseudomonas aeruginosa; identical to SEQ ID NO: 6656

SEQ ID NO: 7111 - DNA, 765 bp, Pseudomonas aeruginosa; identical to SEQ ID NO: 6657

SEQ ID NO: 7112 - DNA, 2013 bp, Pseudomonas aeruginosa; identical to SEQ ID NO: 6689

SEQ ID NO: 7113 - DNA, 3087 bp, Pseudomonas aeruginosa; identical to SEQ ID NO: 6722

SEQ ID NO: 7114 - DNA, 2196 bp, Pseudomonas aeruginosa; identical to SEQ ID NO: 6723

SEQ ID NO: 7115 - DNA, 738 bp, Pseudomonas aeruginosa; identical to SEQ ID NO: 6673

SEQ ID NO: 7116 - DNA, 1644 bp, Pseudomonas aeruginosa; identical to SEQ ID NO: 6674

SEQ ID NO: 7117 - DNA, 3252 bp, Pseudomonas aeruginosa; identical to SEQ ID NO: 6675

SEQ ID NO: 7118 - DNA, 2127 bp, Pseudomonas aeruginosa; identical to SEQ ID NO: 6656

SEQ ID NO: 7119 - DNA, 765 bp, Pseudomonas aeruginosa; identical to SEQ ID NO: 6657

SEQ ID NO: 7120 - DNA, 2013 bp, Pseudomonas aeruginosa; identical to SEQ ID NO: 6689

SEQ ID NO: 7121 - DNA, 3087 bp, Pseudomonas aeruginosa; identical to SEQ ID NO: 6722

SEQ ID NO: 7122 - DNA, 2196 bp, Pseudomonas aeruginosa; identical to SEQ ID NO: 6723

SEQ ID NO: 7123 - DNA, 738 bp, Pseudomonas aeruginosa; identical to SEQ ID NO: 6673

SEQ ID NO: 7124 - DNA, 1644 bp, Pseudomonas aeruginosa; identical to SEQ ID NO: 6674

SEQ ID NO: 7125 - DNA, 3252 bp, Pseudomonas aeruginosa; identical to SEQ ID NO: 6675

SEQ ID NO: 7126 - DNA, 2127 bp, Pseudomonas aeruginosa; identical to SEQ ID NO: 6656

SEQ ID NO: 7127 - DNA, 765 bp, Pseudomonas aeruginosa; identical to SEQ ID NO: 6657

SEQ ID NO: 7128 - DNA, 2013 bp, Pseudomonas aeruginosa; identical to SEQ ID NO: 6689

SEQ ID NO: 7129 - DNA, 3087 bp, Pseudomonas aeruginosa; identical to SEQ ID NO: 6722

SEQ ID NO: 7130 - DNA, 2196 bp, Pseudomonas aeruginosa; identical to SEQ ID NO: 6723

SEQ ID NO: 7131 - DNA, 738 bp, Pseudomonas aeruginosa; identical to SEQ ID NO: 6673

SEQ ID NO: 7132 - DNA, 1644 bp, Pseudomonas aeruginosa; identical to SEQ ID NO: 6674

SEQ ID NO: 7133 - DNA, 3252 bp, Pseudomonas aeruginosa; identical to SEQ ID NO: 6675

SEQ ID NO: 7134 - DNA, 2127 bp, Pseudomonas aeruginosa; identical to SEQ ID NO: 6656

SEQ ID NO: 7135 - DNA, 765 bp, Pseudomonas aeruginosa; identical to SEQ ID NO: 6657

SEQ ID NO: 7136 - DNA, 2013 bp, Pseudomonas aeruginosa; identical to SEQ ID NO: 6689

SEQ ID NO: 7137 - DNA, 3087 bp, Pseudomonas aeruginosa; identical to SEQ ID NO: 6722

SEQ ID NO: 7138 - DNA, 2196 bp, Pseudomonas aeruginosa; identical to SEQ ID NO: 6723

SEQ ID NO: 7139 - DNA, 738 bp, Pseudomonas aeruginosa; identical to SEQ ID NO: 6673

SEQ ID NO: 7140 - DNA, 1644 bp, Pseudomonas aeruginosa; identical to SEQ ID NO: 6674

SEQ ID NO: 7141 - DNA, 3252 bp, Pseudomonas aeruginosa; identical to SEQ ID NO: 6675

SEQ ID NO: 7142 - DNA, 2127 bp, Pseudomonas aeruginosa; identical to SEQ ID NO: 6656

SEQ ID NO: 7143 - DNA, 765 bp, Pseudomonas aeruginosa; identical to SEQ ID NO: 6657

SEQ ID NO: 7144 - DNA, 2013 bp, Pseudomonas aeruginosa; identical to SEQ ID NO: 6689

SEQ ID NO: 7145 - DNA, 3087 bp, Pseudomonas aeruginosa; identical to SEQ ID NO: 6722

SEQ ID NO: 7146 - DNA, 2196 bp, Pseudomonas aeruginosa; identical to SEQ ID NO: 6723

SEQ ID NO: 7147 - DNA, 738 bp, Pseudomonas aeruginosa; identical to SEQ ID NO: 6673

SEQ ID NO: 7148 - DNA, 1644 bp, Pseudomonas aeruginosa; identical to SEQ ID NO: 6674

SEQ ID NO: 7149 - DNA, 3252 bp, Pseudomonas aeruginosa; identical to SEQ ID NO: 6675

SEQ ID NO: 7150 - DNA, 2127 bp, Pseudomonas aeruginosa; identical to SEQ ID NO: 6656

SEQ ID NO: 7151 - DNA, 765 bp, Pseudomonas aeruginosa; identical to SEQ ID NO: 6657

SEQ ID NO: 7152 - DNA, 2013 bp, Pseudomonas aeruginosa; identical to SEQ ID NO: 6689

SEQ ID NO: 7153 - DNA, 3087 bp, Pseudomonas aeruginosa; identical to SEQ ID NO: 6722

SEQ ID NO: 7154 - DNA, 2127 bp, Pseudomonas aeruginosa; identical to SEQ ID NO: 6656

SEQ ID NO: 7155 - DNA, 765 bp, Pseudomonas aeruginosa; identical to SEQ ID NO: 6657

SEQ ID NO: 7156 - DNA, 2013 bp, Pseudomonas aeruginosa; identical to SEQ ID NO: 6689

SEQ ID NO: 7157 - DNA, 3087 bp, Pseudomonas aeruginosa; identical to SEQ ID NO: 6722

SEQ ID NO: 7158 - DNA, 2196 bp, Pseudomonas aeruginosa; identical to SEQ ID NO: 6723

SEQ ID NO: 7159 - DNA, 1644 bp, Pseudomonas aeruginosa; identical to SEQ ID NO: 6674

SEQ ID NO: 7160 - DNA, 3252 bp, Pseudomonas aeruginosa; identical to SEQ ID NO: 6675

SEQ ID NO: 7161 - DNA, 2196 bp, Pseudomonas aeruginosa; identical to SEQ ID NO: 6723

SEQ ID NO: 7162 - DNA, 738 bp, Pseudomonas aeruginosa; identical to SEQ ID NO: 6673

SEQ ID NO: 7163 - DNA, 1644 bp, Pseudomonas aeruginosa; identical to SEQ ID NO: 6674

SEQ ID NO: 7164 - DNA, 3252 bp, Pseudomonas aeruginosa; identical to SEQ ID NO: 6675

SEQ ID NO: 7165 - DNA, 2127 bp, Pseudomonas aeruginosa; identical to SEQ ID NO: 6656

SEQ ID NO: 7166 - DNA, 765 bp, Pseudomonas aeruginosa; identical to SEQ ID NO: 6657

SEQ ID NO: 7167 - DNA, 2013 bp, Pseudomonas aeruginosa; identical to SEQ ID NO: 6689

SEQ ID NO: 7168 - DNA, 3087 bp, Pseudomonas aeruginosa; identical to SEQ ID NO: 6722

SEQ ID NO: 7169 - DNA, 2196 bp, Pseudomonas aeruginosa; identical to SEQ ID NO: 6723

SEQ ID NO: 7170 - DNA, 738 bp, Pseudomonas aeruginosa; identical to SEQ ID NO: 6673

SEQ ID NO: 7171 - DNA, 1644 bp, Pseudomonas aeruginosa; identical to SEQ ID NO: 6674

SEQ ID NO: 7172 - DNA, 3252 bp, Pseudomonas aeruginosa; identical to SEQ ID NO: 6675

SEQ ID NO: 7173 - DNA, 2127 bp, Pseudomonas aeruginosa; identical to SEQ ID NO: 6656

SEQ ID NO: 7174 - DNA, 765 bp, Pseudomonas aeruginosa; identical to SEQ ID NO: 6657

SEQ ID NO: 7175 - DNA, 2013 bp, Pseudomonas aeruginosa; identical to SEQ ID NO: 6689

SEQ ID NO: 7176 - DNA, 3087 bp, Pseudomonas aeruginosa; identical to SEQ ID NO: 6722

SEQ ID NO: 7177 - DNA, 2196 bp, Pseudomonas aeruginosa; identical to SEQ ID NO: 6723

SEQ ID NO: 7178 - DNA, 738 bp, Pseudomonas aeruginosa; identical to SEQ ID NO: 6673

SEQ ID NO: 7179 - DNA, 1644 bp, Pseudomonas aeruginosa; identical to SEQ ID NO: 6674

SEQ ID NO: 7180 - DNA, 3252 bp, Pseudomonas aeruginosa; identical to SEQ ID NO: 6675

SEQ ID NO: 7181 - DNA, 2127 bp, Pseudomonas aeruginosa; identical to SEQ ID NO: 6656

SEQ ID NO: 7182 - DNA, 765 bp, Pseudomonas aeruginosa; identical to SEQ ID NO: 6657

SEQ ID NO: 7183 - DNA, 2013 bp, Pseudomonas aeruginosa; identical to SEQ ID NO: 6689

SEQ ID NO: 7184 - DNA, 3087 bp, Pseudomonas aeruginosa; identical to SEQ ID NO: 6722

SEQ ID NO: 7185 - DNA, 2127 bp, Pseudomonas aeruginosa; identical to SEQ ID NO: 6656

SEQ ID NO: 7186 - DNA, 765 bp, Pseudomonas aeruginosa; identical to SEQ ID NO: 6657

SEQ ID NO: 7187 - DNA, 2013 bp, Pseudomonas aeruginosa; identical to SEQ ID NO: 6689

SEQ ID NO: 7188 - DNA, 3087 bp, Pseudomonas aeruginosa; identical to SEQ ID NO: 6722

SEQ ID NO: 7189 - DNA, 2196 bp, Pseudomonas aeruginosa; identical to SEQ ID NO: 6723

SEQ ID NO: 7190 - DNA, 738 bp, Pseudomonas aeruginosa; identical to SEQ ID NO: 6673

SEQ ID NO: 7191 - DNA, 1644 bp, Pseudomonas aeruginosa; identical to SEQ ID NO: 6674

SEQ ID NO: 7192 - DNA, 3252 bp, Pseudomonas aeruginosa; identical to SEQ ID NO: 6675

SEQ ID NO: 7193 - DNA, 2196 bp, Pseudomonas aeruginosa; identical to SEQ ID NO: 6723

SEQ ID NO: 7194 - DNA, 738 bp, Pseudomonas aeruginosa; identical to SEQ ID NO: 6673

SEQ ID NO: 7195 - DNA, 1644 bp, Pseudomonas aeruginosa; identical to SEQ ID NO: 6674

SEQ ID NO: 7196 - DNA, 3252 bp, Pseudomonas aeruginosa; identical to SEQ ID NO: 6675

SEQ ID NO: 7197 - DNA, 2127 bp, Pseudomonas aeruginosa; identical to SEQ ID NO: 6656

SEQ ID NO: 7198 - DNA, 765 bp, Pseudomonas aeruginosa; identical to SEQ ID NO: 6657

SEQ ID NO: 7199 - DNA, 2013 bp, Pseudomonas aeruginosa; identical to SEQ ID NO: 6689

SEQ ID NO: 7200 - DNA, 3087 bp, Pseudomonas aeruginosa; identical to SEQ ID NO: 6722

SEQ ID NO: 7201 - DNA, 2196 bp, Pseudomonas aeruginosa; identical to SEQ ID NO: 6723

SEQ ID NO: 7202 - DNA, 738 bp, Pseudomonas aeruginosa; identical to SEQ ID NO: 6673

SEQ ID NO: 7203 - DNA, 1644 bp, Pseudomonas aeruginosa; identical to SEQ ID NO: 6674

SEQ ID NO: 7204 - DNA, 3252 bp, Pseudomonas aeruginosa; identical to SEQ ID NO: 6675

SEQ ID NO: 7205 - DNA, 2127 bp, Pseudomonas aeruginosa; identical to SEQ ID NO: 6656

SEQ ID NO: 7206 - DNA, 765 bp, Pseudomonas aeruginosa; identical to SEQ ID NO: 6657

SEQ ID NO: 7207 - DNA, 2013 bp, Pseudomonas aeruginosa; identical to SEQ ID NO: 6689

SEQ ID NO: 7208 - DNA, 3087 bp, Pseudomonas aeruginosa; identical to SEQ ID NO: 6722

SEQ ID NO: 7209 - DNA, 2196 bp, Pseudomonas aeruginosa; identical to SEQ ID NO: 6723

SEQ ID NO: 7210 - DNA, 738 bp, Pseudomonas aeruginosa; identical to SEQ ID NO: 6673

SEQ ID NO: 7211 - DNA, 1644 bp, Pseudomonas aeruginosa; identical to SEQ ID NO: 6674

SEQ ID NO: 7212 - DNA, 3252 bp, Pseudomonas aeruginosa; identical to SEQ ID NO: 6675

SEQ ID NO: 7213 - DNA, 2127 bp, Pseudomonas aeruginosa; identical to SEQ ID NO: 6656

SEQ ID NO: 7214 - DNA, 765 bp, Pseudomonas aeruginosa; identical to SEQ ID NO: 6657

SEQ ID NO: 7215 - DNA, 2013 bp, Pseudomonas aeruginosa; identical to SEQ ID NO: 6689

SEQ ID NO: 7216 - DNA, 3087 bp, Pseudomonas aeruginosa; identical to SEQ ID NO: 6722

SEQ ID NO: 7217 - DNA, 2196 bp, Pseudomonas aeruginosa; identical to SEQ ID NO: 6723

SEQ ID NO: 7218 - DNA, 738 bp, Pseudomonas aeruginosa; identical to SEQ ID NO: 6673

SEQ ID NO: 7219 - DNA, 1644 bp, Pseudomonas aeruginosa; identical to SEQ ID NO: 6674

SEQ ID NO: 7220 - DNA, 3252 bp, Pseudomonas aeruginosa; identical to SEQ ID NO: 6675

SEQ ID NO: 7221 - DNA, 2127 bp, Pseudomonas aeruginosa; identical to SEQ ID NO: 6656

SEQ ID NO: 7222 - DNA, 765 bp, Pseudomonas aeruginosa; identical to SEQ ID NO: 6657

SEQ ID NO: 7223 - DNA, 2013 bp, Pseudomonas aeruginosa; identical to SEQ ID NO: 6689

SEQ ID NO: 7224 - DNA, 3087 bp, Pseudomonas aeruginosa; identical to SEQ ID NO: 6722

SEQ ID NO: 7225 - DNA, 2196 bp, Pseudomonas aeruginosa; identical to SEQ ID NO: 6723

SEQ ID NO: 7226 - DNA, 738 bp, Pseudomonas aeruginosa; identical to SEQ ID NO: 6673

SEQ ID NO: 7227 - DNA, 1644 bp, Pseudomonas aeruginosa; identical to SEQ ID NO: 6674

SEQ ID NO: 7228 - DNA, 2127 bp, Pseudomonas aeruginosa; identical to SEQ ID NO: 6656

SEQ ID NO: 7229 - DNA, 765 bp, Pseudomonas aeruginosa; identical to SEQ ID NO: 6657

SEQ ID NO: 7230 - DNA, 2013 bp, Pseudomonas aeruginosa; identical to SEQ ID NO: 6689

SEQ ID NO: 7231 - DNA, 3087 bp, Pseudomonas aeruginosa; identical to SEQ ID NO: 6722

SEQ ID NO: 7232 - DNA, 2127 bp, Pseudomonas aeruginosa; identical to SEQ ID NO: 6656

SEQ ID NO: 7233 - DNA, 765 bp, Pseudomonas aeruginosa; identical to SEQ ID NO: 6657

SEQ ID NO: 7234 - DNA, 2013 bp, Pseudomonas aeruginosa; identical to SEQ ID NO: 6689

SEQ ID NO: 7235 - DNA, 3087 bp, Pseudomonas aeruginosa; identical to SEQ ID NO: 6722

SEQ ID NO: 7236 - DNA, 2196 bp, Pseudomonas aeruginosa; identical to SEQ ID NO: 6723

SEQ ID NO: 7237 - DNA, 738 bp, Pseudomonas aeruginosa; identical to SEQ ID NO: 6673

SEQ ID NO: 7238 - DNA, 1644 bp, Pseudomonas aeruginosa; identical to SEQ ID NO: 6674

SEQ ID NO: 7239 - DNA, 3252 bp, Pseudomonas aeruginosa; identical to SEQ ID NO: 6675

SEQ ID NO: 7240 - DNA, 2127 bp, Pseudomonas aeruginosa; identical to SEQ ID NO: 6656

SEQ ID NO: 7241 - DNA, 765 bp, Pseudomonas aeruginosa; identical to SEQ ID NO: 6657

SEQ ID NO: 7242 - DNA, 2013 bp, Pseudomonas aeruginosa; identical to SEQ ID NO: 6689

SEQ ID NO: 7243 - DNA, 3087 bp, Pseudomonas aeruginosa; identical to SEQ ID NO: 6722

SEQ ID NO: 7244 - DNA, 2196 bp, Pseudomonas aeruginosa; identical to SEQ ID NO: 6723

SEQ ID NO: 7245 - DNA, 738 bp, Pseudomonas aeruginosa; identical to SEQ ID NO: 6673

SEQ ID NO: 7246 - DNA, 1644 bp, Pseudomonas aeruginosa; identical to SEQ ID NO: 6674

SEQ ID NO: 7247 - DNA, 3252 bp, Pseudomonas aeruginosa; identical to SEQ ID NO: 6675

SEQ ID NO: 7248 - DNA, 2127 bp, Pseudomonas aeruginosa; identical to SEQ ID NO: 6656

SEQ ID NO: 7249 - DNA, 765 bp, Pseudomonas aeruginosa; identical to SEQ ID NO: 6657

SEQ ID NO: 7250 - DNA, 2013 bp, Pseudomonas aeruginosa; identical to SEQ ID NO: 6689

SEQ ID NO: 7251 - DNA, 3087 bp, Pseudomonas aeruginosa; identical to SEQ ID NO: 6722

SEQ ID NO: 7252 - DNA, 2196 bp, Pseudomonas aeruginosa; identical to SEQ ID NO: 6723

SEQ ID NO: 7253 - DNA, 738 bp, Pseudomonas aeruginosa; identical to SEQ ID NO: 6673

SEQ ID NO: 7254 - DNA, 1644 bp, Pseudomonas aeruginosa; identical to SEQ ID NO: 6674

SEQ ID NO: 7255 - DNA, 3252 bp, Pseudomonas aeruginosa; identical to SEQ ID NO: 6675

SEQ ID NO: 7256 - DNA, 2196 bp, Pseudomonas aeruginosa; identical to SEQ ID NO: 6723

SEQ ID NO: 7257 - DNA, 738 bp, Pseudomonas aeruginosa; identical to SEQ ID NO: 6673

SEQ ID NO: 7258 - DNA, 1644 bp, Pseudomonas aeruginosa; identical to SEQ ID NO: 6674

SEQ ID NO: 7259 - DNA, 3252 bp, Pseudomonas aeruginosa; identical to SEQ ID NO: 6675

SEQ ID NO: 7260 - DNA, 2127 bp, Pseudomonas aeruginosa; identical to SEQ ID NO: 6656

SEQ ID NO: 7261 - DNA, 765 bp, Pseudomonas aeruginosa; identical to SEQ ID NO: 6657

SEQ ID NO: 7262 - DNA, 2013 bp, Pseudomonas aeruginosa; identical to SEQ ID NO: 6689

SEQ ID NO: 7263 - DNA, 3087 bp, Pseudomonas aeruginosa; identical to SEQ ID NO: 6722

SEQ ID NO: 7264 - DNA, 2127 bp, Pseudomonas aeruginosa; identical to SEQ ID NO: 6656

SEQ ID NO: 7265 - DNA, 765 bp, Pseudomonas aeruginosa; identical to SEQ ID NO: 6657

SEQ ID NO: 7266 - DNA, 2013 bp, Pseudomonas aeruginosa; identical to SEQ ID NO: 6689

SEQ ID NO: 7267 - DNA, 3087 bp, Pseudomonas aeruginosa; identical to SEQ ID NO: 6722

SEQ ID NO: 7268 - DNA, 2196 bp, Pseudomonas aeruginosa; identical to SEQ ID NO: 6723

SEQ ID NO: 7269 - DNA, 738 bp, Pseudomonas aeruginosa; identical to SEQ ID NO: 6673

SEQ ID NO: 7270 - DNA, 1644 bp, Pseudomonas aeruginosa; identical to SEQ ID NO: 6674

SEQ ID NO: 7271 - DNA, 2127 bp, Pseudomonas aeruginosa; identical to SEQ ID NO: 6656

SEQ ID NO: 7272 - DNA, 765 bp, Pseudomonas aeruginosa; identical to SEQ ID NO: 6657

SEQ ID NO: 7273 - DNA, 2013 bp, Pseudomonas aeruginosa; identical to SEQ ID NO: 6689

SEQ ID NO: 7274 - DNA, 3087 bp, Pseudomonas aeruginosa; identical to SEQ ID NO: 6722

SEQ ID NO: 7275 - DNA, 2196 bp, Pseudomonas aeruginosa; identical to SEQ ID NO: 6723

SEQ ID NO: 7276 - DNA, 738 bp, Pseudomonas aeruginosa; identical to SEQ ID NO: 6673

SEQ ID NO: 7277 - DNA, 1644 bp, Pseudomonas aeruginosa; identical to SEQ ID NO: 6674

SEQ ID NO: 7278 - DNA, 3252 bp, Pseudomonas aeruginosa; identical to SEQ ID NO: 6675

SEQ ID NO: 7279 - DNA, 2127 bp, Pseudomonas aeruginosa; identical to SEQ ID NO: 6656

SEQ ID NO: 7280 - DNA, 765 bp, Pseudomonas aeruginosa; identical to SEQ ID NO: 6657

SEQ ID NO: 7281 - DNA, 2013 bp, Pseudomonas aeruginosa; identical to SEQ ID NO: 6689

SEQ ID NO: 7282 - DNA, 3087 bp, Pseudomonas aeruginosa; identical to SEQ ID NO: 6722

SEQ ID NO: 7283 - DNA, 2196 bp, Pseudomonas aeruginosa; identical to SEQ ID NO: 6723

SEQ ID NO: 7284 - DNA, 738 bp, Pseudomonas aeruginosa; identical to SEQ ID NO: 6673

SEQ ID NO: 7285 - DNA, 1644 bp, Pseudomonas aeruginosa; identical to SEQ ID NO: 6674

SEQ ID NO: 7286 - DNA, 3252 bp, Pseudomonas aeruginosa; identical to SEQ ID NO: 6675

SEQ ID NO: 7287 - DNA, 2127 bp, Pseudomonas aeruginosa; identical to SEQ ID NO: 6656

SEQ ID NO: 7288 - DNA, 765 bp, Pseudomonas aeruginosa; identical to SEQ ID NO: 6657

SEQ ID NO: 7289 - DNA, 2013 bp, Pseudomonas aeruginosa; identical to SEQ ID NO: 6689

SEQ ID NO: 7290 - DNA, 3087 bp, Pseudomonas aeruginosa; identical to SEQ ID NO: 6722

SEQ ID NO: 7291 - DNA, 2196 bp, Pseudomonas aeruginosa; identical to SEQ ID NO: 6723

SEQ ID NO: 7292 - DNA, 738 bp, Pseudomonas aeruginosa; identical to SEQ ID NO: 6673

SEQ ID NO: 7293 - DNA, 1644 bp, Pseudomonas aeruginosa; identical to SEQ ID NO: 6674

SEQ ID NO: 7294 - DNA, 3252 bp, Pseudomonas aeruginosa; identical to SEQ ID NO: 6675

SEQ ID NO: 7295 - DNA, 2127 bp, Pseudomonas aeruginosa; identical to SEQ ID NO: 6656

SEQ ID NO: 7296 - DNA, 765 bp, Pseudomonas aeruginosa; identical to SEQ ID NO: 6657

SEQ ID NO: 7297 - DNA, 2013 bp, Pseudomonas aeruginosa; identical to SEQ ID NO: 6689

SEQ ID NO: 7298 - DNA, 3087 bp, Pseudomonas aeruginosa; identical to SEQ ID NO: 6722

SEQ ID NO: 7299 - DNA, 2196 bp, Pseudomonas aeruginosa; identical to SEQ ID NO: 6723

SEQ ID NO: 7300 - DNA, 738 bp, Pseudomonas aeruginosa; identical to SEQ ID NO: 6673

SEQ ID NO: 7301 - DNA, 1644 bp, Pseudomonas aeruginosa; identical to SEQ ID NO: 6674

SEQ ID NO: 7302 - DNA, 3252 bp, Pseudomonas aeruginosa; identical to SEQ ID NO: 6675

SEQ ID NO: 7303 - DNA, 2127 bp, Pseudomonas aeruginosa; identical to SEQ ID NO: 6656

SEQ ID NO: 7304 - DNA, 765 bp, Pseudomonas aeruginosa; identical to SEQ ID NO: 6657

SEQ ID NO: 7305 - DNA, 2013 bp, Pseudomonas aeruginosa; identical to SEQ ID NO: 6689

SEQ ID NO: 7306 - DNA, 3087 bp, Pseudomonas aeruginosa; identical to SEQ ID NO: 6722

SEQ ID NO: 7307 - DNA, 2196 bp, Pseudomonas aeruginosa; identical to SEQ ID NO: 6723

SEQ ID NO: 7308 - DNA, 738 bp, Pseudomonas aeruginosa; identical to SEQ ID NO: 6673

SEQ ID NO: 7309 - DNA, 1644 bp, Pseudomonas aeruginosa; identical to SEQ ID NO: 6674

SEQ ID NO: 7310 - DNA, 3252 bp, Pseudomonas aeruginosa; identical to SEQ ID NO: 6675

SEQ ID NO: 7311 - DNA, 2127 bp, Pseudomonas aeruginosa; identical to SEQ ID NO: 6656

SEQ ID NO: 7312 - DNA, 765 bp, Pseudomonas aeruginosa; identical to SEQ ID NO: 6657

SEQ ID NO: 7313 - DNA, 2013 bp, Pseudomonas aeruginosa; identical to SEQ ID NO: 6689

SEQ ID NO: 7314 - DNA, 3087 bp, Pseudomonas aeruginosa; identical to SEQ ID NO: 6722

SEQ ID NO: 7315 - DNA, 2196 bp, Pseudomonas aeruginosa; identical to SEQ ID NO: 6723

SEQ ID NO: 7316 - DNA, 738 bp, Pseudomonas aeruginosa; identical to SEQ ID NO: 6673

SEQ ID NO: 7317 - DNA, 1644 bp, Pseudomonas aeruginosa; identical to SEQ ID NO: 6674

SEQ ID NO: 7318 - DNA, 3252 bp, Pseudomonas aeruginosa; identical to SEQ ID NO: 6675

SEQ ID NO: 7319 - DNA, 2196 bp, Pseudomonas aeruginosa; identical to SEQ ID NO: 6723

SEQ ID NO: 7320 - DNA, 738 bp, Pseudomonas aeruginosa; identical to SEQ ID NO: 6673

SEQ ID NO: 7321 - DNA, 1644 bp, Pseudomonas aeruginosa; identical to SEQ ID NO: 6674

SEQ ID NO: 7322 - DNA, 3252 bp, Pseudomonas aeruginosa; identical to SEQ ID NO: 6675

SEQ ID NO: 7323 - DNA, 2127 bp, Pseudomonas aeruginosa; identical to SEQ ID NO: 6656

SEQ ID NO: 7324 - DNA, 765 bp, Pseudomonas aeruginosa; identical to SEQ ID NO: 6657

SEQ ID NO: 7325 - DNA, 2013 bp, Pseudomonas aeruginosa; identical to SEQ ID NO: 6689

SEQ ID NO: 7326 - DNA, 3087 bp, Pseudomonas aeruginosa; identical to SEQ ID NO: 6722

SEQ ID NO: 7327 - DNA, 2196 bp, Pseudomonas aeruginosa; identical to SEQ ID NO: 6723

SEQ ID NO: 7328 - DNA, 738 bp, Pseudomonas aeruginosa; identical to SEQ ID NO: 6673

SEQ ID NO: 7329 - DNA, 1644 bp, Pseudomonas aeruginosa; identical to SEQ ID NO: 6674

SEQ ID NO: 7330 - DNA, 3252 bp, Pseudomonas aeruginosa; identical to SEQ ID NO: 6675

SEQ ID NO: 7331 - DNA, 2127 bp, Pseudomonas aeruginosa; identical to SEQ ID NO: 6656

SEQ ID NO: 7332 - DNA, 765 bp, Pseudomonas aeruginosa; identical to SEQ ID NO: 6657

SEQ ID NO: 7333 - DNA, 2013 bp, Pseudomonas aeruginosa; identical to SEQ ID NO: 6689

SEQ ID NO: 7334 - DNA, 3087 bp, Pseudomonas aeruginosa; identical to SEQ ID NO: 6722

SEQ ID NO: 7335 - DNA, 2127 bp, Pseudomonas aeruginosa; identical to SEQ ID NO: 6656

SEQ ID NO: 7336 - DNA, 765 bp, Pseudomonas aeruginosa; identical to SEQ ID NO: 6657

SEQ ID NO: 7337 - DNA, 2013 bp, Pseudomonas aeruginosa; identical to SEQ ID NO: 6689

SEQ ID NO: 7338 - DNA, 3087 bp, Pseudomonas aeruginosa; identical to SEQ ID NO: 6722

SEQ ID NO: 7339 - DNA, 2196 bp, Pseudomonas aeruginosa; identical to SEQ ID NO: 6723

SEQ ID NO: 7340 - DNA, 738 bp, Pseudomonas aeruginosa; identical to SEQ ID NO: 6673

SEQ ID NO: 7341 - DNA, 1644 bp, Pseudomonas aeruginosa; identical to SEQ ID NO: 6674

SEQ ID NO: 7342 - DNA, 3252 bp, Pseudomonas aeruginosa; identical to SEQ ID NO: 6675

SEQ ID NO: 7343 - DNA, 2127 bp, Pseudomonas aeruginosa; identical to SEQ ID NO: 6656

SEQ ID NO: 7344 - DNA, 765 bp, Pseudomonas aeruginosa; identical to SEQ ID NO: 6657

SEQ ID NO: 7345 - DNA, 2013 bp, Pseudomonas aeruginosa; identical to SEQ ID NO: 6689

SEQ ID NO: 7346 - DNA, 3087 bp, Pseudomonas aeruginosa; identical to SEQ ID NO: 6722

SEQ ID NO: 7347 - DNA, 2196 bp, Pseudomonas aeruginosa; identical to SEQ ID NO: 6723

SEQ ID NO: 7348 - DNA, 738 bp, Pseudomonas aeruginosa; identical to SEQ ID NO: 6673

SEQ ID NO: 7349 - DNA, 1644 bp, Pseudomonas aeruginosa; identical to SEQ ID NO: 6674

SEQ ID NO: 7350 - DNA, 3252 bp, Pseudomonas aeruginosa; identical to SEQ ID NO: 6675

SEQ ID NO: 7351 - DNA, 2196 bp, Pseudomonas aeruginosa; identical to SEQ ID NO: 6723

SEQ ID NO: 7352 - DNA, 738 bp, Pseudomonas aeruginosa; identical to SEQ ID NO: 6673

SEQ ID NO: 7353 - DNA, 1644 bp, Pseudomonas aeruginosa; identical to SEQ ID NO: 6674

SEQ ID NO: 7354 - DNA, 3252 bp, Pseudomonas aeruginosa; identical to SEQ ID NO: 6675

SEQ ID NO: 7355 - DNA, 2127 bp, Pseudomonas aeruginosa; identical to SEQ ID NO: 6656

SEQ ID NO: 7356 - DNA, 765 bp, Pseudomonas aeruginosa; identical to SEQ ID NO: 6657

SEQ ID NO: 7357 - DNA, 2013 bp, Pseudomonas aeruginosa; identical to SEQ ID NO: 6689

SEQ ID NO: 7358 - DNA, 3087 bp, Pseudomonas aeruginosa; identical to SEQ ID NO: 6722

SEQ ID NO: 7359 - DNA, 2127 bp, Pseudomonas aeruginosa; identical to SEQ ID NO: 6656

SEQ ID NO: 7360 - DNA, 765 bp, Pseudomonas aeruginosa; identical to SEQ ID NO: 6657

SEQ ID NO: 7361 - DNA, 2013 bp, Pseudomonas aeruginosa; identical to SEQ ID NO: 6689

SEQ ID NO: 7362 - DNA, 3087 bp, Pseudomonas aeruginosa; identical to SEQ ID NO: 6722

SEQ ID NO: 7363 - DNA, 2196 bp, Pseudomonas aeruginosa; identical to SEQ ID NO: 6723

SEQ ID NO: 7364 - DNA, 738 bp, Pseudomonas aeruginosa; identical to SEQ ID NO: 6673

SEQ ID NO: 7365 - DNA, 1644 bp, Pseudomonas aeruginosa; identical to SEQ ID NO: 6674

SEQ ID NO: 7366 - DNA, 3252 bp, Pseudomonas aeruginosa; identical to SEQ ID NO: 6675

SEQ ID NO: 7367 - DNA, 2127 bp, Pseudomonas aeruginosa; identical to SEQ ID NO: 6656

SEQ ID NO: 7368 - DNA, 765 bp, Pseudomonas aeruginosa; identical to SEQ ID NO: 6657

SEQ ID NO: 7369 - DNA, 2013 bp, Pseudomonas aeruginosa; identical to SEQ ID NO: 6689

SEQ ID NO: 7370 - DNA, 3087 bp, Pseudomonas aeruginosa; identical to SEQ ID NO: 6722

SEQ ID NO: 7371 - DNA, 2196 bp, Pseudomonas aeruginosa; identical to SEQ ID NO: 6723

SEQ ID NO: 7372 - DNA, 738 bp, Pseudomonas aeruginosa; identical to SEQ ID NO: 6673

SEQ ID NO: 7373 - DNA, 1644 bp, Pseudomonas aeruginosa; identical to SEQ ID NO: 6674

SEQ ID NO: 7374 - DNA, 3252 bp, Pseudomonas aeruginosa; identical to SEQ ID NO: 6675

SEQ ID NO: 7375 - DNA, 2196 bp, Pseudomonas aeruginosa; identical to SEQ ID NO: 6723

SEQ ID NO: 7376 - DNA, 738 bp, Pseudomonas aeruginosa; identical to SEQ ID NO: 6673

SEQ ID NO: 7377 - DNA, 1644 bp, Pseudomonas aeruginosa; identical to SEQ ID NO: 6674

SEQ ID NO: 7378 - DNA, 3252 bp, Pseudomonas aeruginosa; identical to SEQ ID NO: 6675

SEQ ID NO: 7379 - DNA, 2127 bp, Pseudomonas aeruginosa; identical to SEQ ID NO: 6656

SEQ ID NO: 7380 - DNA, 765 bp, Pseudomonas aeruginosa; identical to SEQ ID NO: 6657

SEQ ID NO: 7381 - DNA, 2013 bp, Pseudomonas aeruginosa; identical to SEQ ID NO: 6689

SEQ ID NO: 7382 - DNA, 3087 bp, Pseudomonas aeruginosa; identical to SEQ ID NO: 6722

SEQ ID NO: 7383 - DNA, 2196 bp, Pseudomonas aeruginosa; identical to SEQ ID NO: 6723

SEQ ID NO: 7384 - DNA, 738 bp, Pseudomonas aeruginosa; identical to SEQ ID NO: 6673

SEQ ID NO: 7385 - DNA, 1644 bp, Pseudomonas aeruginosa; identical to SEQ ID NO: 6674

SEQ ID NO: 7386 - DNA, 3252 bp, Pseudomonas aeruginosa; identical to SEQ ID NO: 6675

SEQ ID NO: 7387 - DNA, 2127 bp, Pseudomonas aeruginosa; identical to SEQ ID NO: 6656

SEQ ID NO: 7388 - DNA, 765 bp, Pseudomonas aeruginosa; identical to SEQ ID NO: 6657

SEQ ID NO: 7389 - DNA, 2013 bp, Pseudomonas aeruginosa; identical to SEQ ID NO: 6689

SEQ ID NO: 7390 - DNA, 3087 bp, Pseudomonas aeruginosa; identical to SEQ ID NO: 6722

SEQ ID NO: 7391 - DNA, 2127 bp, Pseudomonas aeruginosa; identical to SEQ ID NO: 6656

SEQ ID NO: 7392 - DNA, 765 bp, Pseudomonas aeruginosa; identical to SEQ ID NO: 6657

SEQ ID NO: 7393 - DNA, 2013 bp, Pseudomonas aeruginosa; identical to SEQ ID NO: 6689

SEQ ID NO: 7394 - DNA, 3087 bp, Pseudomonas aeruginosa; identical to SEQ ID NO: 6722

SEQ ID NO: 7395 - DNA, 2196 bp, Pseudomonas aeruginosa; identical to SEQ ID NO: 6723

SEQ ID NO: 7396 - DNA, 738 bp, Pseudomonas aeruginosa; identical to SEQ ID NO: 6673

SEQ ID NO: 7397 - DNA, 1644 bp, Pseudomonas aeruginosa; identical to SEQ ID NO: 6674

SEQ ID NO: 7398 - DNA, 3252 bp, Pseudomonas aeruginosa; identical to SEQ ID NO: 6675

SEQ ID NO: 7399 - DNA, 2127 bp, Pseudomonas aeruginosa; identical to SEQ ID NO: 6656

SEQ ID NO: 7400 - DNA, 765 bp, Pseudomonas aeruginosa; identical to SEQ ID NO: 6657

SEQ ID NO: 7401 - DNA, 2013 bp, Pseudomonas aeruginosa; identical to SEQ ID NO: 6689

SEQ ID NO: 7402 - DNA, 1854 bp, Pseudomonas aeruginosa
atgagcttgatggatatttttcggtcgctgattggtgagcgagacggggcgctcagtactcagcaaggctttcagtctcagcctgattccaatggcttgaatttctacctgcccttgccggccttcaaggcgctgcaaaccgggcagggcagtgctttagaaaagattcagctgatcgtgctcaacatgctggttgagcaagggattgccgaaaacacggccaacggttttcacatcggtgccgaagatattgcggggatggatcttgagcaggcggaaatcttgcgtttgccgagacgcttgccagggcactttctaacctcaatcagtgggcgcacgggcaacagtggttttcgtgtggcgatcacgctggaaatgccagacggccctgccagcttcagtcgcaaaggcccctatctgtacctgaccagcagtgagtgctattggctgacgccggctgaaattatggggttgcaggcttgggaactgcatgagtctttaggcccagaacagcgaggagaggcggctaatctgcgcctgatggccgagctgcagaccgctgcgcgcagcgggatgcgtattgatcttagccactttgagcggctagatgtggtggtgcctcagaacatcggagttatcgctacgcgtttaccagatggcagcctccaactctgcccgagccttggggatggctccagtgctgaccagctggaaaaacgctggtcgcagttggatatgaccgccgatggtggtgtgctgcgcatcgacaatcgtgtgttgctgctggatcaggcgcggatggatggcatccgcaatgtgctggccaacaaacgtatcccggctgatcaggtcaacgagtttattgccacgccaacggcgtttctcgatgctgcgctggtcaatcttgaggtgggcttttctgcccgggttgcgggtataggcaaacttcagcacatggatttcggtgtcctggatgcaaccaagaatgactggtttgcgcttgataagcgcccggcacctgcagcgatcctgagcaagctgattcagtctcctgaggatttgcagcgcttcgaggaggtactgcaggcggctaatgaacagggcgcgacgagtctgtcgtttgctggcgaggtgatcgatatctctgacgcgccgactgttcagcaagagctggccagggctcgccagaacatggctcatgtgagcgatagcgagccgcacagcgaggagggtgttctccctggggaggacaaggagaaagtcggggtcattctgaaggatgccgacgagattaattctgcgctgttgcgtaaggctgctgctgcgaagccgctggtggtgccagattggtcggcctatgcccgggagccgttccctcatcagcgtgaggggatcgagtggatgctgaagctgatgggcgcagcgttgcaggatgaaactgatgatctctatcgcctgcagggtggtttgcttgcagatgacatgggtctcggcaagacatacatgtcgctggtcgcagtcggggagtatctggccagtcagcgcgcggctgacaagccgcagaagccggttctggtggtggcgccactgagtctgctggaaaactgggaggatgaagtcggtaagaccttcgccagcatcccgttccgcgatgtggtggtgctgcagtcggggcggagtctgcgtgactatcgcgtcaaaggtgctgagcgtgaatcggtgcagttggcgtcgatgattgatgacagcagcggcatgatggatgagcagagcattcgctatgcactgcatgtggggccggaagcaggcgtgcatcgtctggatgttgccgctgaccgaaaactgacccagtag

SEQ ID NO: 7403 - DNA, 2196 bp, Pseudomonas aeruginosa; identical to SEQ ID NO: 6723

SEQ ID NO: 7404 - DNA, 738 bp, Pseudomonas aeruginosa; identical to SEQ ID NO: 6673

SEQ ID NO: 7405 - DNA, 1644 bp, Pseudomonas aeruginosa; identical to SEQ ID NO: 6674

SEQ ID NO: 7406 - DNA, 3252 bp, Pseudomonas aeruginosa; identical to SEQ ID NO: 6675

SEQ ID NO: 7407 - DNA, 2196 bp, Pseudomonas aeruginosa; identical to SEQ ID NO: 6723

SEQ ID NO: 7408 - DNA, 738 bp, Pseudomonas aeruginosa; identical to SEQ ID NO: 6673

SEQ ID NO: 7409 - DNA, 1644 bp, Pseudomonas aeruginosa; identical to SEQ ID NO: 6674

SEQ ID NO: 7410 - DNA, 3252 bp, Pseudomonas aeruginosa; identical to SEQ ID NO: 6675

SEQ ID NO: 7411 - DNA, 2127 bp, Pseudomonas aeruginosa; identical to SEQ ID NO: 6656

SEQ ID NO: 7412 - DNA, 765 bp, Pseudomonas aeruginosa; identical to SEQ ID NO: 6657

SEQ ID NO: 7413 - DNA, 2013 bp, Pseudomonas aeruginosa; identical to SEQ ID NO: 6689

SEQ ID NO: 7414 - DNA, 3087 bp, Pseudomonas aeruginosa; identical to SEQ ID NO: 6722

SEQ ID NO: 7415 - DNA, 2196 bp, Pseudomonas aeruginosa; identical to SEQ ID NO: 6723

SEQ ID NO: 7416 - DNA, 738 bp, Pseudomonas aeruginosa; identical to SEQ ID NO: 6673

SEQ ID NO: 7417 - DNA, 1644 bp, Pseudomonas aeruginosa; identical to SEQ ID NO: 6674

SEQ ID NO: 7418 - DNA, 3252 bp, Pseudomonas aeruginosa; identical to SEQ ID NO: 6675

SEQ ID NO: 7419 - DNA, 2127 bp, Pseudomonas aeruginosa; identical to SEQ ID NO: 6656

SEQ ID NO: 7420 - DNA, 765 bp, Pseudomonas aeruginosa; identical to SEQ ID NO: 6657

SEQ ID NO: 7421 - DNA, 2013 bp, Pseudomonas aeruginosa; identical to SEQ ID NO: 6689

SEQ ID NO: 7422 - DNA, 3087 bp, Pseudomonas aeruginosa; identical to SEQ ID NO: 6722

SEQ ID NO: 7423 - DNA, 2196 bp, Pseudomonas aeruginosa; identical to SEQ ID NO: 6723

SEQ ID NO: 7424 - DNA, 738 bp, Pseudomonas aeruginosa; identical to SEQ ID NO: 6673

SEQ ID NO: 7425 - DNA, 1644 bp, Pseudomonas aeruginosa; identical to SEQ ID NO: 6674

SEQ ID NO: 7426 - DNA, 3252 bp, Pseudomonas aeruginosa; identical to SEQ ID NO: 6675

SEQ ID NO: 7427 - DNA, 2196 bp, Pseudomonas aeruginosa; identical to SEQ ID NO: 6723

SEQ ID NO: 7428 - DNA, 738 bp, Pseudomonas aeruginosa; identical to SEQ ID NO: 6673

SEQ ID NO: 7429 - DNA, 1644 bp, Pseudomonas aeruginosa; identical to SEQ ID NO: 6674

SEQ ID NO: 7430 - DNA, 3252 bp, Pseudomonas aeruginosa; identical to SEQ ID NO: 6675

SEQ ID NO: 7431 - DNA, 2127 bp, Pseudomonas aeruginosa; identical to SEQ ID NO: 6656

SEQ ID NO: 7432 - DNA, 765 bp, Pseudomonas aeruginosa; identical to SEQ ID NO: 6657

SEQ ID NO: 7433 - DNA, 2013 bp, Pseudomonas aeruginosa; identical to SEQ ID NO: 6689

SEQ ID NO: 7434 - DNA, 3087 bp, Pseudomonas aeruginosa; identical to SEQ ID NO: 6722

SEQ ID NO: 7435 - DNA, 2196 bp, Pseudomonas aeruginosa; identical to SEQ ID NO: 6723

SEQ ID NO: 7436 - DNA, 738 bp, Pseudomonas aeruginosa; identical to SEQ ID NO: 6673

SEQ ID NO: 7437 - DNA, 1644 bp, Pseudomonas aeruginosa; identical to SEQ ID NO: 6674

SEQ ID NO: 7438 - DNA, 3252 bp, Pseudomonas aeruginosa; identical to SEQ ID NO: 6675

SEQ ID NO: 7439 - DNA, 2127 bp, Pseudomonas aeruginosa; identical to SEQ ID NO: 6656

SEQ ID NO: 7440 - DNA, 765 bp, Pseudomonas aeruginosa; identical to SEQ ID NO: 6657

SEQ ID NO: 7441 - DNA, 2013 bp, Pseudomonas aeruginosa; identical to SEQ ID NO: 6689

SEQ ID NO: 7442 - DNA, 3087 bp, Pseudomonas aeruginosa; identical to SEQ ID NO: 6722

SEQ ID NO: 7443 - DNA, 2127 bp, Pseudomonas aeruginosa; identical to SEQ ID NO: 6656

SEQ ID NO: 7444 - DNA, 765 bp, Pseudomonas aeruginosa; identical to SEQ ID NO: 6657

SEQ ID NO: 7445 - DNA, 2013 bp, Pseudomonas aeruginosa
gtgaagctgcctcctgttcacatgccggtcgctgaatgggcgcccgtggtgcgggagcgatggacggtgctggtcgaaaaggtcgctcgaatgaaggccgcaagtggcaagagtgacgcctttgaagccatgttggcacgattgcgtgacatggcgagtacagggcgttttgacggcctgcctgagctgctaaaacgtcgtcttactgcgcgtgcgttgacctggttgtggctcaacgacgagaccatgggtaggcgtttgcttagttcgcgtctgctttcggtgctggtcgatgctcagcagccgaggctgacgcgtatcaccttacagcagttggctcagttctactttcgtcgcttcgacaagctggatgagcacgatgggctgcgtaagcagcttgagcagattttgctccagcaactgcatttactgcccgaacccaaagtaagtggcccccaggctgatccgctggtaacgctcaagcgtgatgctcattggttgttgccgcctgacgggccagtccaactggttgagcgggtacgcgacagtggccatgagctgggcgagacctttgaggtcatgggattgcagggctttgatgacgggcgttatggcgatatctgccgggcccacttctacctggaaaccctacgagggcttgcgcccggtgagtacgaccccgtgctggatgagctgcagaagcccgctgtgtccaaggctccgtacgagggcgagcgtcgtatcggccatgttgcgctggagattctgatcgatcgtgctggacaggagccgggtgaggtctggcagaactttattctgaatctggcgggggatccgcggatctcacgtaactcccccaattaccgcgagtggtggcagttcctcggtgaggagcgggtgcagaaggttcggggctggttgtccaaggaagatttgcggctgtttttgcaggcggtggaacagtttggaatcgaaacgcagaacgacgatctgcagcgcatgttccctgcacgcaagcagttcctagaggggctgtttaagctcaaactgatccgcaatacccgcttgctgcttggcgggcgggcacagcattcggtaaagcgcattctcggtaaagatgtgcaaaccagttttgccagcatggacgggcagatgaatgacaaggcggtcatctatctcgattgcggagactttcatctggtcgagggttcccacagttttaaaatctgggtctatctcgccgcgccgggagaggctttgcgttcctacgagcgctccagcttcagtcattccgatctgactgcggctgttcctaaggcctacaagcgactgtatcctgagttgccctatgatgccttcacgcatcacccccctctttcctggcagaaccgggtattcagcttcctggctgataacggcatcgctctagatatcgagcagttgctcaatcgcagtgactaccagccttaccttcgtaaatttggtatgcctgtggtcaatgccaagcgaacacccgtgccgcctccaagtcagacagattttcccgcagagccggcgcgttcacgtgttggcaagactggcgcgacaacgatgtcagcgcctcaggggcgtaagcctgcagagatgattgcgagggactccagagctattcctagagaagaggcggccacagtacggcgaagcaaccagcagcatgatccggtagtgtcgcactccgtcagttcacctgatgcggctgctcctgcaacggcacgtccgtctctggtaggtgaaggattattgacaggcttgaaaccctctgcactgaagatactgcgctacttcgtggacaaccccggtgacaaagtccgatatgcagcgaatgttttcggtgtggactcgcgtgaaatcaatcagattttgtatggcccgttgaaggacatgtgcacgcgtgatgagcagttcggctggacggtgaatgaggcggcacgtctcgcgcttgaggcgttggatgaacaggacagggctgaataa

SEQ ID NO: 7446 - DNA, 3039 bp, Pseudomonas aeruginosa
atgagcttgatggatatttttcggtcgctgattggtgagcgagacggggcgctcagtactcagcaaggctttcagtctcagcctgattccaatggcttgaatttctacctgcccttgccggccttcaaggcgctgcaaaccgggcagggcagtgctttagaaaagattcagctgatcgtgctcaacatgctggttgagcaagggattgccgaaaacacggccaacggttttcacatcggtgccgaagatattgcggggatggatcttgagcaggcggaaatcttgcgtttgccgagacgcttgccagggcactttctaacctcaatcagtgggcgcacgggcaacagtggttttcgtgtggcgatcacgctggaaatgccagacggccctgccagcttcagtcgcaaaggcccctatctgtacctgaccagcagtgagtgctattggctgacgccggctgaaattatggggttgcaggcttgggaactgcatgagtctttaggcccagaacagcgaggagaggcggctaatctgcgcctgatggccgagctgcagaccgctgcgcgcagcgggatgcgtattgatcttagccactttgagcggctagatgtggtggtgcctcagaacatcggagttatcgctacgcgtttaccagatggcagcctccaactctgcccgagccttggggatggctccagtgctgaccagctggaaaaacgctggtcgcagttggatatgaccgccgatggtggtgtgctgcgcatcgacaatcgtgtgttgctgctggatcaggcgcggatggatggcatccgcaatgtgctggccaacaaacgtatcccggctgatcaggtcaacgagtttattgccacgccaacggcgtttctcgatgctgcgctggtcaatcttgaggtgggcttttctgcccgggttgcgggtataggcaaacttcagcacatggatttcggtgtcctggatgcaaccaagaatgactggtttgcgcttgataagcgcccggcacctgcagcgatcctgagcaagctgattcagtctcctgaggatttgcagcgcttcgaggaggtactgcaggcggctaatgaacagggcgcgacgagtctgtcgtttgctggcgaggtgatcgatatctctgacgcgccgactgttcagcaagagctggccagggctcgccagaacatggctcatgtgagcgatagcgagccgcacagcgaggagggtgttctccctggggaggacaaggagaaagtcggggtcattctgaaggatgccgacgagattaattctgcgctgttgcgtaaggctgctgctgcgaagccgctggtggtgccagattggtcggcctatgcccgggagccgttccctcatcagcgtgaggggatcgagtggatgctgaagctgatgggcgcagcgttgcaggatgaaactgatgatctctatcgcctgcagggtggtttgcttgcagatgacatgggtctcggcaagacatacatgtcgctggtcgcagtcggggagtatctggccagtcagcgcgcggctgacaagccgcagaagccggttctggtggtggcgccactgagtctgctggaaaactgggaggatgaagtcggtaagaccttcgccagcatcccgttccgcgatgtggtggtgctgcagtcggggcggagtctgcgtgactatcgcgtcaaaggtgctgagcgtgaatcggtgcagttggcgtcgatgattgatgacagcagcggcatgatggatgagcagagcattcgctatgcactgcatgtggggccggaagcaggcgtgcatcgtctggacatggaccgtcgcttagtgctcacgacctatcagaccctgcgtgattatcagttctccctgtgccgaatcgactggggcatggtcatcttcgacgaggcgcagaacatcaagaatcccaatgcactgcagactattgccgctaaagggctcaaggcggatttcaaactgttggcgactggcacaccggtagaaaatagcctgggcgatttctggtgcctgatgcatacggtgcagcctggcttacttggtggctgggaaagcttccgcgatacctggatcaagccaattctggctgcaagcgatgaagagcgtgatgaggtacgggcgcgtttgggcgagcagctgcggcgtgctgtaggcatattcatgttgcggcgggttaaagaagatcagctcaaaggcctaccagccaagactattctcagtggtgtcgagcaagccgatcatggcctgcaacggtatgcagcgcagttgggtgtggtgatgaaaggcatccagttgcaggcctacgacgaagtcctcgacagctatcgggctcgtcgtgcaagcgctgaggatatgcgtggtaccgcactggcggctttgactcagcttcgctccatttccctgcacccacggctggagaatgagtcggcgctgtactgcgaggatggcaagcacgcgcgacaactgatgatggagtccggcaagctggcggtgctgctgcagttactcgatgagatccgtagcaagggtgaaaaggtcatcctgttcatgatgaccaagcgcctgcaacgagtcctcaagctctggctggatcagatctatgacctgaatgtagcggtgatcaatggtgacacccaggctgtggcgactcgcgccgaggatatgacgcgcaagaagctaattgccgagtttgaagcgaaaagtggcttcaacatcctgatcatgtcgccagtagccgctggtgtcggtttgacggtgattggggccaaccatgtggtgcatttagagcgtcattggaacccggctaaagaagcgcaagcgtctgatcgggtttaccggatcggccaaaccaagcccgtgttcatccatctgcctgccgtcactcacccccagtttgattccttcgatgtacaccttgaccgcttattgcgcggaaagctgatgcttaaagacgcggtagtgacaccagaggcggttagtgaaagtgagatgattcaatcgatggggtga

SEQ ID NO: 7447 - DNA, 2196 bp, Pseudomonas aeruginosa
atggactattcgaagtggttggacctttgggataaggcaacacctgagcaactgattgctcccgtgttcgtgtttagtctggtgacagtgctgtgtctttggtacttgctgcgttacttcctgcgctcatttgcgttgagccggcgcttgaagaagctcgcacggcaggtgcgtgcactcaaggaacagcagccggccaagcgccgtagcgagctggagcagctgttccaggagcatacgctggggcatgcctggcaggagtatgccgagacgctgcatgaccagttcgaggtgcgcgagggtgagcagcgcatgctgtgctcccgtgccacggcgggcgcgggacatttcttcaccgcgcaaacggtggtggagacgccgctggggaccgagttttacaagcacctgccgggcatcctgacggggatcgggattgtcggcaccttcttcggcttgatgctgggcctgcagcatttcgaccccagcactcccgagcaggtcagctccagcgtcgatcagttgctcaaggacgtgctgtttgccttcctcggctccttcttctcgatcttcgcttctattggcgtgactctgaccgaaaagtggcgcctaggccgctgctacaagcatctggaaaccctgactgagagtattgatgggctgttcgacagtggtgtgggcgaggaatacctggcggagctggtgaagtcgagcaacgaaagctcgatccagacccgtcagctcaaggacagcctggttaccgacctgcgtgagatgctgcagaacctggtagatacccaggtgcgtgagaacctcaagttggctgatacgctttcggcaagttaccgcgactctggtcaggtgctggccgagcagattggtggtgccatcgaaaacagcctgaagtctcccctggaggccatcgccggagccgtgaataccgctagtggcgaccagagcaaccaggtgcagagcctactcaccgatgtgctcacagcctttatgagcaagctggaaagcacctttggccagcagttcaatggtttgcacgagatgctggggcagtcggtagcggctatgcaatccatgcaacaaggcttcaatgagctggtcggcgacatgcgctcggccagcgaggcttcatcgcagaacagcgccaagatgatcgcgcagctgctggccgatatgcaggccgggcaaaacagcatgcaggccgggatgaacgagatgctggccaatctgcagacgtccatcgcacggatcggcagtgaaggtgagggggctggtgagcggatggccaagcagttggagaagctgtttgccgatagcgaagcgcgccagcaagccatggcggcgaatctgcaggcctttgtcgaatccatgcagcagagcattggtcaaggccaacaggaaaccatggccaagatcgccggctcggtggatgtgctgggcgagcagttgggcggcttgttcaagcagcttgagcaaaaccgcacgcagatggaccaggccagcaaggtcgcccaggtcgaactgcaccgtggtacgcgcgagatggtcggcgggctggaagagcaggtgaaaaccctgctggatgccgtcgccgatcagcaaggcgcgatgcaggacagcctcaaactgctgggagcgcaaaccgagcaacacttgcagagcatgcagcaaggtgccgagaaaatgcgcctggcagccgagcgcatcgacagcgccgggcagagcgtgagtaaagccggcgaggcgactgcgggcgtgctgggtgccctgcagggcactagcggcgatctggttggcgcttcccgcgagctgaccagtgtggtggccgactatcgcaataaccgtgaagcactgagtcagacgcttgcggtcattcaaggtgtggtcgccactactcagggtgagtccgctgggcgcagtcagtacctgcaggatctgaagcagcaaggcgagcggctgcaggcgcttaaccgtgaagtgaacgactacctggagcagatcagcgcagtgctgggcaagggcttcaacgagtttagcgagggggtagatcgtagcctgcggcagacgctgggtagtctggatgccgagctgcacaaggcgatgaccagcctggccggtggtgtcgaaggggtcaaggaaagcctggaagacttcagtgacatcatggagcgcgttcagcgccgctga

SEQ ID NO: 7448 - DNA, 738 bp, Pseudomonas aeruginosa
atgttcggcaaatcagccgctcccgctcgggcgcgtgacgagggcgagaagcctttctggatttcattcgccgacctgatgacggcgatgatgatcttgtttctggtggtgatggtggcctcgctgagctcggtgacgcagcgcattcagcaggctgaacaaggtgagaaacagcgtggcaaggacatcgctaagctctgccaggagctcaaactgagggcgggggatcttaactccaccatcgtggtggactgccgggataaccgcattagcttcggtgaggctgggcgctttggccacaatcaatacttcctcaacagccaggggcagcaggccctgcaggatgttgtgccgttgatcttggatgccgctgacagcgaagagggacgcaagtggctcaagcaggtggtgatcgagggcttcaccgatacggacggctcttacctgtacaacctgcacctctcgctgcagcgctcggaatgggtgatgtgcagtctgctcgatagccgcagcccggtgcagaaagggctttcagctgagcgtcaacagcagattcgctccatgttcctggctggcggtgtgtcgttcaacaatgccaaggagagcaaggaggagagccggcgggttgagctgcgtatgcagttcttcgggctcaaggaccaggggcatgaaggtcaggaaccggcgcttgagtttgcttacgcggcaaacgagaaatgccagttggagatgcgctag

SEQ ID NO: 7449 - DNA, 1677 bp, Pseudomonas aeruginosa
atgagccgggctctgtcgtctctgtcggcggccatcgcttccggcttgcagcgccagaatgagcgcagcggcgatgttgggctcagtggcttggtggcgctgaagcgcgccagcagtgagctttctcggcgctttgatcaggtcgaaaaagccctggcaccgccccgtgagaagcgtttgctggcacttggcaagttcaagcgcgagcaggcgctgacttcatcggagtggcgcctggttttcgccgggctggccgatgacgatgaggtcagtgttccggtgctggaagacgatcagctgtttgaccgtgttcatcgggaggtggctggccgtatcgagcagcggtcacttagccgccgcgactggctggcgctgtgcttcagctactttgcttacgatgagcacaagcccgatgacaacgcgaactggcgggtgctgcgtgacgatattgatcgcggcttcgatgctgtcaggcagcgtattggtcgcgagaaagagtggatgcgcattgtagctgagcatcgcgaactgttcggcgctcaggctggaacccgtctggcggaggagatattcgagggcagggtgcgcgacctttcctctctgcaggccattgcccaggtgccggatggtagttggttgtggcagcggatttttgcggttctgctttcgcgcattttcctgctggatgacgaaaccttcctaaagcgcctgccggagttggtagctttggggcagttgaatacgcgctatctcaatcaggtgctaagtgcctgcctgactcgttatcaccgttcgcgatatcgcgagcagtcgtcctcgctactcaagcaggctgcgttagagcactggggcagcccacagatgcgctccaagcagaacgcctggttgcagtatgtggagcagcctgtctgcgccatggtggtggcctggttcgccaaggaagatctggagcacttcttcaccttgctcaagggcgaggcggaggttgaccagtcgcgcttgttctactggctgcgattcaccaatcaaatgagctacacgcggattgtgatgggcagcgatgcctggcatgaccggagtagtgatttcgtggccttccgcgagaagaacaaagggcgcttgagtcagctaaccggagggtcaagccacatcaatgcggttgtgatgcagatcggtagctacttctttgttgaattttcaggtacgggccatgcctgctacgtctatcgggcggataggttgccgtttaacccggatcagcaagtgcttggcctgaatacagagctaaagcagaagggccataagcccgcgcctatgcggcactcgcctgcgcccaggcgtcccaatgtggtcgaagggtggctggagaagtttgatgacgagctccgggcgctgggaatcatcgcgcagcgtccagcttcatatacgcaaccccgcggttccgaagacaaacccgccgcccatagtgctgcgtctgcacccgtcgcgggtgattcgctggatgtgcaggttaagtcgatgttgggcaatgtgccctataagacgttcgatcaccgctcgaccagcggagtctaccaggttttgcttgccagggatgatgcggctgccaaaacagcgctgctgcgcctcggcttcaaggctgtgaaaaacaatgcactcatgttctggaggctttga

SEQ ID NO: 7450 - DNA, 3252 bp, Pseudomonas aeruginosa
atgctcggccgattttttcccaggaaggatcgttctcagcccgccaagggggcagcgcctggtgcttaccagatcgaagaacaaggtctttgttatgccttgagtctggccggcgacgatgcaagctggcccgtcgctgcctacctggaccagctctttgaagaggactatgccagccagctgagtgatcgctggttgttgccttgggagtcgatctaccagcttttggatgatccggagcacgctagcagccttcctttactcggcttgcccgcgattgccaatctgcaaccgcagttggccagtaccggtggattgtcggatcaggatttcaaggtatttgtccagtcttggcgcaatttggagacgggcagcccagttactttcgaacgcgttggtgctgtggcgcgccattccggcaccactgagttgttgccgcgagcggtctgggaattgttgaaggccattcgagatttgcatgccactcagcagcaggctccgggagaagtcgccaaccagatcggctgggccaatatccgtaagttggccaagcgcgctggtgcgggattggacgggttcctcgacaaaactgtggtggtcaagcctgagtacttgaagctgaagccgcgtaaggccgttgtcgccggtacgccgattatcgagttggatgtcgcgtttgatgggcagcctgacaattggttggccagcttcgatggttacaagcaggtgcaggataagtacagggtgccgggtgccgatggaacggtgacgcacgtgctgattgagccggatgtaaaggcggtgcttgaatctgttcgcgcgttaccggggcggcgggtagccggtgatgaagcgctgtcgctggtgcgcaacccctacagcgtgatcggggatgcggccgagaaggttgttgatgcggacgagtatgaggagcaactggccgacgcgggcatctacttccatcgttttcgcctggaaccttgtataggcgaagacggcaagcatattcggtcgattggtctgttccttgagcctatctcgtccaagccgctacccgaagttgagctgcgcttcgattttgcccatgagttcgcaccattcgtgaatgagctgcaggtgaagttggcagctggtatgcccgcgggattctggcagggctatgagctggagctgagtgacttcgatctcgcgcaattggcaggggtcaatgagcttttgcgccactggcagcgccaggaggccgggcagacattcgaggcggtgctggatttggcctcgtatggtgatcgcgtcgttggcattggtgaggcggagcgcattacatccccatttttggtgaaagaggcaacggaaaactggttgccgacggatgtgaaagagcttggggtggatagcgaactgctcagccagtgggatcctgccagccgcgaagattttgaagagtttgagcaccgcatcgaccaggcgcgtatggcgggtgatgaacaggtatgtctaccgggtactgaaatcccgctacctttccaggtcgcggagcagctttatgaagcctggtcgaagaagcttaatccggtcgagccaaaaccacctgttgtgactgagcccgtagctggtcgtgcggtgctgcatatcgagcacaacattgaggaagcaacctatgcccagcgccgtgaggcggctctgctggcggggcggcatgccaacgcggatattccagaactgcttcgccccgatgttcaactgcgcgatcatcaaatgaaaggtgtggcgtggatgcagcacctgtttggcttatcaccggatcatgtcgcgggttgcttgcttgccgatgacatgggcttgggtaagaccatccagctgctgaccttcgttgtttggtatttggagcagaatcctcagggtaaaccggtcctgattgttgcccccgtttccctgttggacaactgggagcgtgagctgcagcgattcttctatgcggatgcattgccggtattgaagctttatggcggcgcgctcagcgctgtgaagttcaagaaggacgagattcccggggatctgcaggccaaggggataaaaaatcttctgcggccgggttggatgggcgatgctcgtatcgtgctgaccacctatgaaaccttgcgtgatcaggaactctccttggcacggcagcagtgggccatcgtgatctgcgacgaggcgcagaagatcaagaacccggcggcgctgatcacgcaagcggcgaaagcaatcccctctcgattccgtatcgcctgcacgggtacgccggttgagaacacgctgatcgatttgtggtgtctgttcgactttatccagccgggcttcctgggggggctgaatcagttcggtcgtgagtatcaacgccccatcgaggccggcatggagcgggacacggcggcgcttgaacgcctgcgtgggcttatcgaaccccagacattgcggcgtaccaagcaggatgtggcgaaggatctcccggccaaaatcgaggaccaggggtgccgcaagctgctgatgcacacattgcagcgcaatctctatttgtccgaggtggcccagtacacacagaagcagcagatgcaggagcaattggagcagcgggagagcggcatgcttggcctattgcacaggctcaagttggtgtgcgcgcacccgttcagcgtgcagcctgatccacgcttgagggagcactcgccgaaacttcaatggctcttaagcacgctggataacattgcgcgttcgggcagcggcgataaggtcatccttttcaccgagttgcgggacatccaacgtgaattgcagcatgcaattcaggaacgcttcggcttcaaacccactgtaatcaatggtgataccagcaccagcagccagagtgcgcacagccggcagcgcttgattgatcgtttccaagagcagccgggtttctcggtgataatcctctccactgttgcggttgggtttggtgtgaacgtgcaggcggccaaccacgttatccatttcactcgctgctggaacccggccaaagaggatcaggcaaccgatcgcgcttaccggattggtcaggagaaggacgtgtacgtctactacccgaccgtgcgtgatgcggggatgcctacatttgaggcgacgctggatgagctgctacagaagcgacgcgcgttagcgcgggatatgctgcatggggcatctgagcttcaggtatctgagtttggggaactgttaagggcgcaaggatga

SEQ ID NO: 7451 - DNA, 2196 bp, Pseudomonas aeruginosa
atggactattcgaagtggttggacctttgggataaggcaacacccgagcaactgattgctcctgtgtttgtgtttagcctggtgacggtgctgtgcctttggtacttgctgcgttacttcctgcgctcatttgcactgagcctgcgattgaaaaagctcacgcggcaggtgcgtgcaatcaaggaactacagccggccaagcgccgtagcgagctggagcagttgttccaggagcacacgctggggcatgcctggcaggagtatgccgagacgctgcatgaccagttcgaggtgcgcgagggtgagcagcgtttgctgtgctcccgtgccacggcgggcgcgggacattttttcaccgcgcaaacggtggtggagacgccgctgggaaccgagttttacaagcacctgccgggcatcctgacggggatcgggattgtcggcaccttcttcggcttgatgctgggcctgcagcactttgaccccagcacacccgagcaggtcagctccagcgtcgatcagctgctcaaagatgtgctgtttgccttcctcggttccttcttctcgatcttcgcttcgattggcgtgaccttgactgagaagtggcgcctgggccgctgttacaagcacctggaggccctgacggaaagtatcgacggcctgttcggcagcggggtaggtgaggagtatctggcagaactggtgaagtctagcaacgagagctcgatccagacccgtcagctcaaggacagtctggttaccgacctgcgcgagatgctgcagaacctggtggatacccaggtgcgtgagaatctcaagttggcagataccctttcggcaagttaccgcgactctggtcaggtgctggccgagcagattggcggtgccatcgaaaacagcctgaagtctcccctggaggccatcgccggagccgtgaataccgccagtggcgaccagagcaaccaggtgcagagcctactcaccgatgtgctcacagcctttatgagcaagctggagagtacctttggccagcagttcaacggtttgcacgagatgctggggcagtcggtagcggccatgcaatccatgcaacagggcttcaatgaactggtcggcgacatgcgctcggccagcgaggcttcatcgcagaacagcgccaagatgatcacgcagctgctggccgatatgcaggccgggcaaaacagcatgcaggccgggatgaacgagatgctggccaatctgcagacgtccatcgcgcgtatcggcagtgaaggtgagggggctggtgagcggatggccaagcagttggagaagctgttcgccgatagcgaagcgcgtcagcaagccatggcggcaaatctgcaggcctttgtcgaatccatgcagcagagcatgggccagggccagcaggagaccatggccaagatcgccaactcggtggatgtgctgggcgagcagttgggcggcctgttcaagcagcttgagcataaccgtacgcagatggaccaggccagcaaggtcgcccaggtcgaactgcaccgtggtacgcgcgagatggttggcgggctggaagagcaggtgaaaaccctgctggatgccgtcgccgatcagcaaggcgcgatgcaggacagcctcaaactgctgggagcgcaaaccgagcaacacctgcagagcatgcaacaaggcgccgagaagatgcgcctggcagccgagcgcttcgacagcgccggacagagcgtgagtaaagccggcgaggcgactgcgggcgtgctgggtgcgctgcagggcacgagcggcgatctggtcggcgcttcccgcgagctgaccagtgtggtggccgactatcgcaataaccgtgaagctctgaatcagacgcttgctgtcattcaaggtgtggtcgccactactcagggtgagtccgcggggcgtagccaatacttgcaggatctgaagcagcaaggcgagcggctgcaggcgctcaatcgtgaagtgaacgactacctggagcagatcagcgcagtgctgggcaagggcttcaacgagtttagcgagggggtagatcgtagcctgcggcagacactgggtagcctggatgccgagctgcacaaggcgatgaccagcctggccggtggtgtcgaaggggttaaggaaagcctggaagacttcagtgacatcatggagcgcgttcagcgccgctga

SEQ ID NO: 7452 - DNA, 738 bp, Pseudomonas aeruginosa; identical to SEQ ID NO: 6669

SEQ ID NO: 7453 - DNA, 1677 bp, Pseudomonas aeruginosa; identical to SEQ ID NO: 6709

SEQ ID NO: 7454 - DNA, 3252 bp, Pseudomonas aeruginosa; identical to SEQ ID NO: 6671

SEQ ID NO: 7455 - DNA, 2196 bp, Pseudomonas aeruginosa
atggactattcgaagtggttggacctttgggataaggcaacacccgagcaactgattgctcccgtgttcgtatttagtctggtgacggtgctgtgcctttggtatttgctgcgttacttcgtgcgctcatttgcattgagtcggcgcttgaagaagctcacgcggcaggtgcgggcaatcaaggagctgcagccggccaagcgccgtagcgagctggagcagctgttccaggagcatacgctgtggcatgcctggcaggagtatgccgagacgctgcatgaccagttcgaggtgcgtgagggtgagcagcgtttgctgtgctcccgagccactgcaggggcggggcatttttttaccgcgcagactgtggtggaaacgccgctgggtaccgagttttacaagcacttgccgggcatcctgactgggatcggaattgtcggcaccttcttcggcttgatgctgggcctgcagcactttgatcccagcacccctgagcaggtcagctccagtgttgatcagttgctcaaggatgtgctgttcgccttcctcggttccttcttctcgattttcgcttcgattggcgtgaccttgaccgagaagtggcggctgggtcgctgctacaagcacttggaaactctgaccgaaagtatcgatggcctgttcggcagcggggtaggcgaggagtaccttgcagaattggtgaagtcgagcaatgaaagcgcgattcagacccgccagctcaaggacagcctggttaccgatttgcgtgaaatgctgcagaacctggtggatacccaggtacgggagagcctcaagttggccgatacgctctcggcaagttaccgcgactctggccaggcgctggccgagcagattggtggcgccatcgagaacagtctcaagtctcccctggaggtcatcgccggcgctgtgaatactgccagtggtgatcagagtaaccaggtgcagagcctgctgactgatgtactcaccgcctttatgagcaagctggagagcaccttcggccagcagttcaatggtttgcacgagatgctggggcagtcggtagcggccatgcaatccatgcaacagggcttcaatgaactggtcggcgacatgcgctcggccagcgaggcatcatcgcagaacagcgccaagatgatcgcgcagctgctggccgatatgcaggccgggcaaaacagcatgcaggccgggatgaacgagatgctggccaatctgcagacctccatcgcgcgtatcggcagtgaaggtgagggtgctggtgagcgaatggccaagcagttggagaagctgtttgccgatagcgaagcacgccagcaggccatggcggcgaatctgcaggcctttgtcgaatccatgcagcagagcatgggccagggccagcaggagaccatggccaagatcgccggctcggtagatgtgctgggcgagcagttgggcggtctgttcaagcagcttgagcataaccgcacgcagatggaccaggctagcaaggtcgcccaggtcgaactgcaccgtggtacgcgcgagatggttggcgggctggaagaacaggtgaaaaccctgctggatgccgtcgccgatcagcaaggcgcgatgcaggacagcctcaaactgctgggagcgcaaaccgagcaacacctgcagagcatgcagcaaggtgccgagaagatgcgcctggcagccgagcgcttcgacagcgccgggcagagcgtgagtaaagccggcgaggcgactgcgggcgtgctgggtgcgctgcagggcacgagcggcgatctgatcggcgcttcccgcgaactgaccagtgtggtggccgactatcgcaataaccgtgaggcgttgaatcagacgcttgcggtcattcaaggtgtggtcgccactactcagggcgagtccgcggggcgcagccaatacttgcaggatctgaagcagcaaggtgagcggctacaggcgctcaatcgtgaagtgaacgactacctggagcagatcagcgcagtgctgggcaagggcttcaacgagtttagcgagggggtagatcgtagcctgcggcagacgctgggtagtctggatgccgagctgcacaaggcgatgaccagcctggccggtggtgtcgaaggggtcaaggaaagcctggaagacttcagtgacatcatggagcgcgttcagcgccgctga

SEQ ID NO: 7456 - DNA, 738 bp, Pseudomonas aeruginosa; identical to SEQ ID NO: 7448

SEQ ID NO: 7457 - DNA, 1677 bp, Pseudomonas aeruginosa
atgaatcgggcactgtcgtctctgtcggcggccatcgcctcgggcctagagcgccagagtgagcgcagcggcgatgtcgggctcagtgctttgccatcgctgaagcgcgccagcagtgagctttctcggcgctttgatcaggtcgaaaaagccctggcaccgccccatgagaaacgcttgctggcacttggcaagttcaagcgcgagcaggcactgacttcatcggagtggcgcctggttttcgccgggctggccgatgacgatgaagtcagtgttccggtgctggaagacgatcagctgtttggtcgtgttcatcgggaggtggctggccgtatcgagcagcggtcacttagccgccgcgactggctggcgctgtgtttcagctactttgcctacgatgagcacaagcctgacgacaacgcgaactggcggatgctgcgtgacgatattgatcgcggcttcgatgctgtcaggcagcgtattggtcgtgagaaagagtggatgcgcatcgtagctgagcatcgcgaactgttcggcgttcaggctggggcccgtctggcggaggagatattcgagggcagggcgcgtgacctttcctctctgcaggccattgcccaggtgccggatggtagttggttgtggcagcggatatttgcggttctgctttcgcgcattttcctgctggatgacgaaaccttcctaaagcgcctgcgggagttggtagctctggggcaactgaatacgcgctatctcaatcaggtgctaagtgcctgccttactcgttatcaccgttcgcgatatcgcgagcagtcgtcctcgctactcaagcaggttgcgttggatcactggggcagcccacagatgcgttccaggcagaacgcctggttgcagtatgtggagcagcctgtctgcgccatggtggtggcctggttcgccaaggaagatctggaacacttcttcaccttgctcaagggcgaggcggaggttgatcagtcgcgcctgttctactggctgcgattcaccaatcaaatgagctacacgcggattgtgatgggcagcgatgcctggcatgaccggagtagcgatttcgtggccttccgtgagaagaacaaaggacgcttgagtcagctaaccggagggtcgagctacatcaatgcggttgtgatgcagatcggtgactacttctttgttgagttttcaggtacgggccatgcctgctacgtctaccgggcggataggttgccatttaaccctgatcagcaagtgcttggtctgaatacagagctaaagcagaagggccataagcccgcgcctatgcggcactcacctgcgcccaggcgtcctaatgtggtcgaagggtggctggagaagtttgatgacgagctccgggcgctgggaatcatcgcgcagcgtccagcttcatatacgcaaccccgcggttccgaagacaaacccgccgcccatagtgccgcgtctgcacccgtcgcgggtgattcgctggatgtgcaggttaagtcgatgttgggcagtgtgccctataagacgttcgatcaccgctcgaccagcggggtctaccaggttttgcttgccagggatgatgcggcagccaaaacagctctgctgcgcctcggcttcaaggctgtgaaaaacaatgcactcatgttctggaggctttga

SEQ ID NO: 7458 - DNA, 3252 bp, Pseudomonas aeruginosa
atgctcggccgatttttttccgggaaggatcgttctcagcccaccaagggggcggtgcctggtgcttaccagatcgaagaagaaggtttttgttatgccttgagtctggccgatgacgatgcaagctggcccgttgctgcctacctggaccagcttttcgaagaagactatgccagccagctgagtgatcgctggctgttgccttgggagtcgatctatcagctcttggatgatccagagcatgctagcagccttcctttacttggcttgcccgcgattgccaatctgcaaccgcagttggccagtaccggcggattgtcggatccagatttcaaggtatttatccggtcctggcgcaatccgcagacgggcaacccgattactttcgagcgtgttggcgccgtggcgcgccatgctggcaccactgagctgctgccgcgagcggtctgggagctgttgaaggcgattcgggatctgcatgccactcagcagcaggcccctggagaagtcgccaaccagatcggttgggccaatatccgtaaattggccaaacgggctggtgcggggctggacgggttcctcgacaagacggtggtggtcaaacctgagcacttgaggctgaagccgcgtaaggcagttgtcgccggtacgccgattatcgagttggatgtcgcgtttgttgggcagcctgacaattggttggccagtttcgatggttacaagcaggtgcaggataagtacagggtgctgggggccgatggaacggtgacgcacgtgctgattgagccggatgtaaaggcggtgcttgaatctgttcgcgcgttaccggggcggcgggtagccggtgatgaagcgctatcactggtgcgcaacccctacagcgtgatcggggatgcggccgagaaggttgttgatgcggacgagtacgaggagcagctggctgacgcgggcatctacttccatcgctttcgcctggaaccttttctaggcgaagacggcaaacatattcagtcgattagtctgttccttgagcctatctcgtccaaaccgctacccgaaattgagctgcgcttcgattttgcccatgagttcgcaccattcgtgaatgagctgcaggtgaagttggcagctggtatgcccgcgggattctggcagggctatgagctggagctgagtgacttcgatctcgcgcaattggcaggggtcaatgagcttttgcgccactggcagcgccaggaggccgggcagacattcgaggcggtgctcgatttggcctcgtatggtgatcgcgtcgtcggtatcggtgaggctgagcgcattacatctccgtttttggtgaaagaggcaacggaaaactggttgccagcggatgtgaaggcgcttggggtggacgccgagttgctcagccagtgggatcctgccagccgtgaagactttgaagagtttgagcaccgtctcgatcaggcgcgtgtcgcgggtgatgagcaggtatgtctaccgggtactgaaaccccgctacctttccaggtcgcggagcagctttatgaagcctggtcgaagaagcttaatccggtcgagccaaaaccacctgttgtgactgagcccgtagctggtcgtgcggtgctgcatatcgagcacaacattgaggaagcaacctatgcccagcgccgtgaggcggctctgctggcggggcggcatgccaacgcggatattccagaactgcttcgccccgaagttcaactgcgcgatcatcaaatgaaaggtgtggcgtggatgcagcacctgtttggcttatcacccgatcatgtcgcgggttgcttgcttgccgatgacatgggcttgggtaagaccattcaactgctgaccttcgtggtctggtatttggagcagaatcctcagggtaaaccggtcctgattgttgcccccgtttccctgttggataactgggagcgtgagctgcagcgattcttctatgcggatgcattgccggtattgaagctttatggcggcgcgctcagcgctgtgaagttcaagaaggacgagattcccggggatctgcaggccaaggggataaaaaatcttctgcggccgggttggatgggcgatgctcgcatcgtgctgaccacctatgaaaccttgcgtgatcaggaactctccttggcacggcagcagtgggccatcgtgatctgcgacgaggcgcagaagatcaagaacccggcggcgctgatcacgcaagcggcgaaagcaatcccctctcgattccgtatcgcctgcacgggtacgccggttgagaacacgctgatcgatttgtggtgtctgttcgactttatccagccgggctttctgggggggctgaatcagttcggtcgtgagtatcaacgccccatcgaggccggcatggagcgggacacggcgaggcttgaacgcctgcgtgggcttatcgaaccccagacattgcggcgcaccaagcaggatgtggcgaaggatctcccggccaaaatcgaggaccaggggtgccgcaagctgctgatgcacacattgcagcgcaatctctatttgtccgaggtggcccagtacacacagaagcagcagatgcaggagcaattggagcagcgggagagcggcatgcttggcctattgcacaggctcaagttggtgtgcgcgcacccgttcagcgtgcagcctgatccacgcttgagggagcactcgccgaaacttcaatggctcttaagcacgctggataacattgcgcgttcgggcagcggcgataaggtcatccttttcaccgagttgcgggacatccaacgtgaattgcagcatgcaattcaggaacgcttcggcttcaaacccactgtaatcaatggtgataccagcaccagcagccagagtgcgcacagccggcagcgcttgattgatcgtttccaagagcagccgggtttctcggtgataatcctctccactgttgcggttgggtttggtgtgaacgtgcaggcggccaaccacgttatccatttcactcgctgctggaacccggccaaagaggatcaggcaaccgatcgcgcttaccggattggtcaggagaaggacgtgtacgtctactacccgaccgtgcgtgatgcggggatgcctacatttgaggcgacgctggatgagctgctacagaagcgacgcgcgttagcgcgggatatgctgcatggggcatctgaacttcaggtatctgagtttggggaactgttaagggcgcaaggatga

SEQ ID NO: 7459 - DNA, 2196 bp, Pseudomonas aeruginosa; identical to SEQ ID NO: 7447

SEQ ID NO: 7460 - DNA, 738 bp, Pseudomonas aeruginosa; identical to SEQ ID NO: 7448

SEQ ID NO: 7461 - DNA, 1677 bp, Pseudomonas aeruginosa; identical to SEQ ID NO: 7449

SEQ ID NO: 7462 - DNA, 3252 bp, Pseudomonas aeruginosa; identical to SEQ ID NO: 7450

SEQ ID NO: 7463 - DNA, 2127 bp, Pseudomonas aeruginosa; identical to SEQ ID NO: 6656

SEQ ID NO: 7464 - DNA, 765 bp, Pseudomonas aeruginosa; identical to SEQ ID NO: 6657

SEQ ID NO: 7465 - DNA, 2013 bp, Pseudomonas aeruginosa; identical to SEQ ID NO: 6689

SEQ ID NO: 7466 - DNA, 3042 bp, Pseudomonas aeruginosa; identical to SEQ ID NO: 6718

SEQ ID NO: 7467 - DNA, 2127 bp, Pseudomonas aeruginosa
atgatggatctgctgaaacacctgatccccgacttcgcccacatgttcagtgccaatcccaatggcatcagtgcctggttttggtctgcgacggcactgattttcggcttgtcactttattttctgttcgtgcacttccgccgtttccgtacccggctgcgtgccctgcgttctttgcttgaagggcaaagcaaggaaaccctggcactgagccgacgtgaaaccatgcaaaaggcgcagggcttggatgcgcccaatgtcggcatgctgtggcgtgagttcgacgaaagcctggtgctgtcgtccgatcagaagcatttgttcaatacgctggatgctgagcatttcttcaatgcccgaaccttggctcccggcctgacagccagccgcttgctggctgctgcaccgagcttcctggtggccatcggtgtgctcggcacatttgtgggcctgacggtggggttggaaggattggtgggcacctccgatgagatcgagtcgctcaagggcggcatcaacaagctgatttccggtgctgccgtagccttcatgacgtcggtatggggtgtgttcttcagcctattgctgaactttgtcgaaaagatgttcgagcgttcagcgctgggccagatccagcagctgcagcacgatatcgacttcctctacccacgcatccccgccgagcagtcgctggtgcatatcgccgagtacggcaaggagagcaaggaagcgctgcaggagctgcacgagcgtattggcgatcgtctgcaggaaacgctcaacggcatgagcgaagcgatgcagacggcgctgaccgatgccctgaacaacatcatggcgccagccatccagactctggtcagcaccaccagccagcagtccacgcaagtgctggaaaagctggtgggtaatttcatggacggcatgacctctgtgggccgtgagcagggcttgcagatgcagcaggcggcggctgacgtgaacgctgcagtcagtggcatgagtgagcgcctgaaccaactgttcagcagcctgaatgaacagcagggtcgacagatggaggtggctcagcaacagagtgcggccttcgagacgcagttgcagcgcatcagtggttctgccgaagagcgccaggcacagatggagcaacgctttgctgagttgatgtcggggctgacgaaccagttgcaaacccagttgggtgctgcccagcagcgcgacgaggagcgccaggtgttgttcgagcgtgtgcttggccaggccagcagcagccagacggcgatgctggagcagttttccaactcaacccgtgagcagatgcaggcgatggccgaggcgggtaacgagcgccacaacaatctggagaaggttttctctcgtttgatgatgaacctcaacacccagctcgattcgcaaatgggggcggcggagcagcgtgagcaggcacgccagcagcgcttccaggagcagctcgatcaggtgtcgacccatcaacaggagctgctttcgggcctggccagcgctgtacaggcgacccagcagcaaagccgcctaatggcggatcagcatcaacagttgctaggccagctcaagcaggtatcggaagcgactgcacaaagcagcaagcatctggacagcagtgcgaatcagcttgggcttctatccgcgaatctgcgccaggccgccgataccttggggcagcgactggaggccgttactcatggtgtcgagaaagctggccagcagaacgccgagctcgcggcgcagttgcaaagccaggccgctaccctggcgcagctgcaggccacgttgcttgagggggcgcaacgcttcgagcaagcggccggtgaagcgcgcaacggttttggcgagatgaaatccgctcagcaggagtttctctcaggtgtgcgccacgaattcaccgcgctgggtgaaaagttgcgtgagcaggtcgaggcagtagagaagcaagccgaggaatggctgcgcagctatgccggcgaagtccggacgcaaatcgatgaccgcatgaacaagtggaacgaggtatcgctcagctacgccgaccagatgcatcgaacggtgcaagccatgagcagcattctggatgagctggaggcacgctga

SEQ ID NO: 7468 - DNA, 765 bp, Pseudomonas aeruginosa
atgcgcctgggtaaatccaaggaagtgagcgtcgacgaagagaacccttattggatgtccttctcggacatcatgtcggcgctattggtgatcttcatcctggcttcagtgattctgatcctgcagttgatggaaattcagaaggagctgcaagagcgccaggtgcagttcgagcaggaactggtcgagctgaaaaaagcagagcaggtgcgccgcaccattctggatgaggccgtggaggccctgcgcgagcgcggcatcaaggtcgaggtgagcgagaaccatacggttctgagtattcccaacgatctgctgggcttcgacaccggtgcctatgacattcatgccgcctatcaggcgcgcgctctggagatcggcaaggtcatcaatgaggtgatctcgcgagaggatcgagtcgagttcctcgatacgatcttcatcgaggggcatacggacaatcgtccgctccagggctttatgggcaaaggcaactgggggctctcaaccttccgtgccatttctctctggcagttctggggcagcgcgctgtccgccgatgagcaactggcaaggctgaagaataaggatggcaagccactgttctcggttagcggttacggcgaaacccgccccgttttggtcgaccagcagactgaggatgacttcaagcgcaaccgacgcatcgatatccgcttcaccattcgtcgtcccgacagcgctcagtacgagcaggtgcgtgagcgtctggaggaggtcaagccgtga

SEQ ID NO: 7469 - DNA, 2166 bp, Pseudomonas aeruginosa
gtgaagttgcctcctgttcacatgccggtcgctgaatgggcgcccgtggtgcgggagcgatggacggtgctggtcgaaaaggtcgctcgaatgaaggccgcaagtggcaagagcgatgcctttgacgccatgttggcacgattgcgcgacatggcgagtacggggcgtttcgacggcctgcctgagctgctaaaacgtcgtctcactgcgcgtgcgttgacctggttgtggctcaacgacgaggccatgggtaggcgtttgcttagttcgcgtctgctttcggtgctggtcgatgctcagcagccgaggctgacacgtatcaccttgcagcagttggctcagttttactttcgtcgcttcgacaagctggatgagcacgatgggctgcgtgagcagcttgagcagattttgctccagcaactgcatttaatgcccgagcccaaagtaagtggcccccagactgatccgctggtaaccctcaagcgtgatggtcattggttgttgccgcctgacgggccagtccaactggttgagcgggtacgcgacagcggccatgagctgggccagacctttgaggtcatgggattgcagggctttgatgacgggcgttatggcgatatctgccgggcccacttctacctggaaaccctacgagggcttgcgcccggtgaatacgaccccgtgctggatgagctgcagaagcccgctgtgtccaaggctccgtacgagggcgagcgtcgtatcggccatgttgcgctggagattctgatcgatcgtgccggacaggagccgggtgaggtctggcagaactttattctcaatctggcgggggatccgcggatcgcaagtaccgcagccaactaccgtgagtggtggcaaccacttggtgaggcgcgtatccagaaggtgcgtggttggttgtctaaggaagaccttcggttgttcctgcaggcggttgagcaatatggcttggagtcgggaaaggaagatctcaagcgtatgttcccggcgcgcaaactgttcttggagggattgtttgcgctcggcttgatccgacatacgaggttgatgcttggccgcaatgccaagctgtcggtgaagcgtattctcggaagtgaggtaaaaaccagcttcgcgggcatggattcagccatgagcgacaaggcggtgatctatctcgattgtggcgacttccatctggtcgagggctcccatagtttcaaaatttgggtttacctcggccagccagggcattgggtcaagtcgtatgagcgaaatcagttctcgcacttcgatctgacaacgtcgttgcctaatcaatacaaggcagcctacccaagccttccctacgaggcagtgacccataacggttcctggcagcgtaaggtgttcgatttcctggcggataacggtattgcgctggatatcgaaaaattgcttagccggtcggagtacaaggcatatttgagcaaatacggcctacccgtcgtgaggggcaagaaagcgcgcgttgagccactggttcagcaaagcgcgaagtctgattcggccccagtttctcagggtggagcaaccggctctgtgtccgcgcatcgtatggctgaaccgcgtcctcctgctgtggatgcttttgcctcagaagctccaagagcctccggcaccgaactgaccgacacgcaattatcgattttggcctacctgtccaagcacccggaaagcttgatgggtgatattcgtcaagccctagaaggcgatgaagcactcttttacgagatccaggacgctcttcgaggcagtatttcaagctacgtccaacagaacgaagtcttccaatggtccttatccagcaagggagaggcattgttgcgtaaagcggatttagatcctgcacccaacacctctgatgcagaccagcaacctttaaaggctactttgcagcatttggggacgtttgacttgcaggtgctgtggtacttcaaaaataacccaggcgacaaggtgcgccacgcagcgaacgttttcggcgtcgaggcgcgggtgattaatcaggtgctttacggttcgttgaagggcatgtgtgtgcaggacaagcagttcggctggtccgttaatgaaacgactcgcctctcacttgaagcgttggataaacaggacagggctgaataa

SEQ ID NO: 7470 - DNA, 3042 bp, Pseudomonas aeruginosa
atgggattgatggatattttccgctcgctgattggtgagcgggacggagcgctcagtacccagcaaggctttcagtctcagcctgattccaatggcttgaatttctatctgcccttgccggccttcaaggcactgcaagccgggcagggcagtgctttagaaaaaattcagctgatagtgctcaacatgctggttgagcaagggattgccgaaaacacggccaacggttttcacatcggtgccgaagatattgcggggatggatcttgagcaggcggaaatcttgcgtttgccgagacgcttgccagggcactttctaacctcaatcagtgggcgcacgggcaacagtggttttcgtgtggcgatcacgctggaaatgccggacggccctgccagcttcagtcgcaaaggcccctatctgtacctgaccagcagtgagtgctattggctgacgccggctgaaattatggggttgcaggcttgggaactgcatgagtcgttaggcccagaacagcgaggagaggcggctaatctgcgcctgatggccgagctgcagaccgctgcgcgcagcgggatgcgtattgatcttagccactttgagcggctggatgtggtggtgcctcagaacatcggagttatcgctacgcgtttaccagatggcagcctccaactctgcccgagccttggggatggctccagtgctgaccagctggaaaaacgctggtcgcagttggatatgaccgccgatggtggtgtgctgcgcatcgacaatcgtgtgttgctgctggatcaggcgcggatggatggcatccgtaatgtgctggccaacaaacgtatcccggctgatcaggtcaacgagtttattgccacgccaacggcgtttctcgatgctgcgctggtcaatcttgaggtgggcttttctgcccgggttgcgggtattggcaagcttcagcacatggatttcggtgtcctggatgcaaccaagaatgactggtttgcgcttgataagcgcccggcacctgcagcgatcctgagcaagctgattcagtctcctgaggatttgcagcgcttcgaggaggtactgcaggcggctaatgaacagggtgcgacgagtttgtcgttcgcgggtgaggtaatcgacatctctgacgcgccggctgttcagcaagagctggccagggctcgccagaacatgactgatgtgagcgatagcgagccgcacagcgaggagggtgttctcccgggggaggacaaggagaaagtcggggtcattctcaaggatgccgacgagatcaattctgcgctgttgcgtaaggctgctgctgcgacgccgctggtggtgccagattggtcggcctatgcccgggagccgttccctcatcagcgtgaggggatcgagtggatgctgaagctgatgggcgcagcgttgcaggatgaaactgatgatctctatcgcctgcagggtggtctgcttgcagatgacatgggcctcggcaagacatacatgtcgctggtcgcagtcggggagtatctggccagccagcgcgcggctggcaagccgcagaagccggttctggtggtggcgccactgagtctgctggaaaactgggaggatgaagtcggtaagaccttcgccagcattccgttccgcgatgtggtggtgctgcagtcggggcggagtctgcgtgactatcgcgtcaaaggtgctgagcgtgagtcggtgcagttggcgtcgatgattgatgacagtagcggcatgatggatgagcagagcattcgctatgcactgcatgtggggcctgaagcaggcgtgcatcgtctggatatggaccgtcgcttagtgctcacgacctatcagaccctgcgtgattatcagttctccctgtgccgaatcgactggggcatggtcatcttcgacgaggcgcagaacatcaagaaccccaatgcgctgcagactattgccgctaaagggctcaaggcggatttcaaactgttggcgactggcacgccggtggaaaatagcctgggcgatttctggtgcctgatgcatacggtgcagcctggcttacttggtggctgggaaagcttccgcgatacctggatcaagccaattctggctgcaagcgatgaagagcgtgatgaggtacgggcgcgtttgggcgagcagctgcggcgtgctgtaggcatattcatgttgcggcgggttaaagaagatcagctcaaaggtctaccagccaagactattctcagtggtgtcgagcaagccgatcatggcctgcaacggtatgcggcgcagttgggtgtggtgatgaaaggcatccagttgcaggcctacgacgaagtcctcgacagctatcgggctcgtcgtgcaagcgctgaggatatgcgtggtaccgcactggcggctttgactcagcttcgctccatttccctgcacccacggctggagaatgagtcggcgctgtacagcgaggatggcaagcaggcgcgacaactgatgatggagtccggcaagctggcggtgctgctgcagttactcgatgagatccgtagcaagggtgaaaaggtcatcctgttcatgatgaccaagcgcctgcaacgagtcctcaagctctggctggatcagatctatgacctgaatgtagcggtgatcaatggtgacacccaggctgtggcgactcgcgccgaggatatgacgcgcaagaagctaattgccgagtttgaagcgaaaagtggcttcaacatcctgatcatgtcgccagtagccgctggtgtcggtttgacggtgattggggccaaccatgtggtgcatttagagcgtcattggaacccggctaaagaagcgcaagcgtccgatcgggtttaccggatcggccaaaccaagcctgtgttcatccatctgcctgccgtcactcacccccagtttgattcattcgatgtgcaccttgaccgcttattgcgcggaaagctgatgcttaaagacgcggtagtgacaccagaggcggttagtgaaagtgagatgatgcaatcgatggggctttga

SEQ ID NO: 7471 - DNA, 2127 bp, Pseudomonas aeruginosa; identical to SEQ ID NO: 6656

SEQ ID NO: 7472 - DNA, 765 bp, Pseudomonas aeruginosa; identical to SEQ ID NO: 6657

SEQ ID NO: 7473 - DNA, 2013 bp, Pseudomonas aeruginosa; identical to SEQ ID NO: 6689

SEQ ID NO: 7474 - DNA, 3087 bp, Pseudomonas aeruginosa; identical to SEQ ID NO: 6722

SEQ ID NO: 7475 - DNA, 2196 bp, Pseudomonas aeruginosa; identical to SEQ ID NO: 6723

SEQ ID NO: 7476 - DNA, 738 bp, Pseudomonas aeruginosa; identical to SEQ ID NO: 6673

SEQ ID NO: 7477 - DNA, 1644 bp, Pseudomonas aeruginosa; identical to SEQ ID NO: 6674

SEQ ID NO: 7478 - DNA, 3252 bp, Pseudomonas aeruginosa; identical to SEQ ID NO: 6675

SEQ ID NO: 7479 - DNA, 2127 bp, Pseudomonas aeruginosa; identical to SEQ ID NO: 6656

SEQ ID NO: 7480 - DNA, 765 bp, Pseudomonas aeruginosa; identical to SEQ ID NO: 6657

SEQ ID NO: 7481 - DNA, 2013 bp, Pseudomonas aeruginosa; identical to SEQ ID NO: 6689

SEQ ID NO: 7482 - DNA, 3087 bp, Pseudomonas aeruginosa; identical to SEQ ID NO: 6722

SEQ ID NO: 7483 - DNA, 2196 bp, Pseudomonas aeruginosa; identical to SEQ ID NO: 6723

SEQ ID NO: 7484 - DNA, 738 bp, Pseudomonas aeruginosa; identical to SEQ ID NO: 6673

SEQ ID NO: 7485 - DNA, 1644 bp, Pseudomonas aeruginosa; identical to SEQ ID NO: 6674

SEQ ID NO: 7486 - DNA, 3252 bp, Pseudomonas aeruginosa; identical to SEQ ID NO: 6675

SEQ ID NO: 7487 - DNA, 2127 bp, Pseudomonas aeruginosa; identical to SEQ ID NO: 6656

SEQ ID NO: 7488 - DNA, 765 bp, Pseudomonas aeruginosa; identical to SEQ ID NO: 6657

SEQ ID NO: 7489 - DNA, 2013 bp, Pseudomonas aeruginosa; identical to SEQ ID NO: 6689

SEQ ID NO: 7490 - DNA, 3087 bp, Pseudomonas aeruginosa; identical to SEQ ID NO: 6722

SEQ ID NO: 7491 - DNA, 2127 bp, Pseudomonas aeruginosa; identical to SEQ ID NO: 6656

SEQ ID NO: 7492 - DNA, 765 bp, Pseudomonas aeruginosa; identical to SEQ ID NO: 6657

SEQ ID NO: 7493 - DNA, 2013 bp, Pseudomonas aeruginosa; identical to SEQ ID NO: 6689

SEQ ID NO: 7494 - DNA, 3087 bp, Pseudomonas aeruginosa; identical to SEQ ID NO: 6722

SEQ ID NO: 7495 - DNA, 2196 bp, Pseudomonas aeruginosa; identical to SEQ ID NO: 6723

SEQ ID NO: 7496 - DNA, 738 bp, Pseudomonas aeruginosa; identical to SEQ ID NO: 6673

SEQ ID NO: 7497 - DNA, 1644 bp, Pseudomonas aeruginosa; identical to SEQ ID NO: 6674

SEQ ID NO: 7498 - DNA, 3252 bp, Pseudomonas aeruginosa; identical to SEQ ID NO: 6675

SEQ ID NO: 7499 - DNA, 2196 bp, Pseudomonas aeruginosa; identical to SEQ ID NO: 6723

SEQ ID NO: 7500 - DNA, 738 bp, Pseudomonas aeruginosa; identical to SEQ ID NO: 6673

SEQ ID NO: 7501 - DNA, 1644 bp, Pseudomonas aeruginosa; identical to SEQ ID NO: 6674

SEQ ID NO: 7502 - DNA, 3252 bp, Pseudomonas aeruginosa; identical to SEQ ID NO: 6675

SEQ ID NO: 7503 - DNA, 2127 bp, Pseudomonas aeruginosa; identical to SEQ ID NO: 6656

SEQ ID NO: 7504 - DNA, 765 bp, Pseudomonas aeruginosa; identical to SEQ ID NO: 6657

SEQ ID NO: 7505 - DNA, 2013 bp, Pseudomonas aeruginosa; identical to SEQ ID NO: 6689

SEQ ID NO: 7506 - DNA, 3087 bp, Pseudomonas aeruginosa; identical to SEQ ID NO: 6722

SEQ ID NO: 7507 - DNA, 2196 bp, Pseudomonas aeruginosa; identical to SEQ ID NO: 6723

SEQ ID NO: 7508 - DNA, 738 bp, Pseudomonas aeruginosa; identical to SEQ ID NO: 6673

SEQ ID NO: 7509 - DNA, 1644 bp, Pseudomonas aeruginosa; identical to SEQ ID NO: 6674

SEQ ID NO: 7510 - DNA, 3252 bp, Pseudomonas aeruginosa; identical to SEQ ID NO: 6675

SEQ ID NO: 7511 - DNA, 2196 bp, Pseudomonas aeruginosa; identical to SEQ ID NO: 6723

SEQ ID NO: 7512 - DNA, 738 bp, Pseudomonas aeruginosa; identical to SEQ ID NO: 6673

SEQ ID NO: 7513 - DNA, 1644 bp, Pseudomonas aeruginosa; identical to SEQ ID NO: 6674

SEQ ID NO: 7514 - DNA, 3252 bp, Pseudomonas aeruginosa; identical to SEQ ID NO: 6675

SEQ ID NO: 7515 - DNA, 2127 bp, Pseudomonas aeruginosa; identical to SEQ ID NO: 6656

SEQ ID NO: 7516 - DNA, 765 bp, Pseudomonas aeruginosa; identical to SEQ ID NO: 6657

SEQ ID NO: 7517 - DNA, 2013 bp, Pseudomonas aeruginosa; identical to SEQ ID NO: 6689

SEQ ID NO: 7518 - DNA, 3087 bp, Pseudomonas aeruginosa; identical to SEQ ID NO: 6722

SEQ ID NO: 7519 - DNA, 2127 bp, Pseudomonas aeruginosa; identical to SEQ ID NO: 6656

SEQ ID NO: 7520 - DNA, 765 bp, Pseudomonas aeruginosa; identical to SEQ ID NO: 6657

SEQ ID NO: 7521 - DNA, 2013 bp, Pseudomonas aeruginosa; identical to SEQ ID NO: 6689

SEQ ID NO: 7522 - DNA, 3042 bp, Pseudomonas aeruginosa; identical to SEQ ID NO: 6718

SEQ ID NO: 7523 - DNA, 2127 bp, Pseudomonas aeruginosa; identical to SEQ ID NO: 6656

SEQ ID NO: 7524 - DNA, 765 bp, Pseudomonas aeruginosa; identical to SEQ ID NO: 6657

SEQ ID NO: 7525 - DNA, 2013 bp, Pseudomonas aeruginosa; identical to SEQ ID NO: 6689

SEQ ID NO: 7526 - DNA, 3042 bp, Pseudomonas aeruginosa; identical to SEQ ID NO: 6718

SEQ ID NO: 7527 - DNA, 2196 bp, Pseudomonas aeruginosa
atggactattcgaagtggttggacctttgggataaggcaacacccgagcaactgattgctcccgtgttcgtatttagtctggtgacggtgctgtgcctttggtatttgctgcgttacttcgtgcgctcatttgcattgagtcggcgcttgaagaagctcacgcggcaggtgcgggcaatcaaggagctgcagccggccaagcgccgtagcgagctggagcagctgttccaggagcatacgctgtggcatgcctggcaggagtatgccgagacgctgcatgaccagttcgaggtgcgtgagggtgagcagcgtttgctgtgctcccgagccactgcaggggcggggcatttttttaccgcgcagactgtggtggaaacgccgctgggtaccgagttttacaagcacttgccgggcatcctgactgggatcggaattgtcggcaccttcttcggcttgatgctgggcctgcagcactttgatcccagcacccctgagcaggtcagctccagtgttgatcagttgctcaaggatgtgctgttcgccttcctcggttccttcttctcgattttcgcttcgattggcgtgaccttgaccgagaagtggcggctgggtcgctgctacaagcacttggaaactctgaccgaaagtatcgatggcctgttcggcagcggggtaggcgaggagtaccttgcagaattggtgaagtcgagcaatgaaagcgcgattcagacccgccagctcaaggacagcctggttaccgatttgcgtgaaatgctgcagaacctggtggatacccaggtacgggagagcctcaagttggccgatacgctctcggcaagttaccgcgactctggccaggtgctggccgagcagattggtggcgccatcgagaacagtctcaagtctcccctggaggtcatcgccggcgctgtgaatactgccagtggtgatcagagtaaccaggtgcagagcctgctgactgatgtactcaccgcctttatgagcaagctggagagcaccttcggccagcagttcaatggtttgcacgagatgctggggcagtcggtagcggccatgcaatccatgcaacagggcttcaatgaactggtcggcgacatgcgctcggccagcgaggcatcatcgcagaacagcgccaagatgatcgcgcagctgctggccgatatgcaggccgggcaaaacagcatgcaggccgggatgaacgagatgctggccaatctgcagacctccatcgcgcgtatcggcagtgaaggtgagggtgctggtgagcgaatggccaagcagttggagaagctgtttgccgatagcgaagcacgccagcaggccatggcggcgaatctgcaggcctttgtcgaatccatgcagcagagcatgggccagggccagcaggagaccatggccaagatcgccggctcggtagatgtgctgggcgagcagttgggcggtctgttcaagcagcttgagcataaccgcacgcagatggaccaggctagcaaggtcgcccaggtcgaactgcaccgtggtacgcgcgagatggttggcgggctggaagaacaggtgaaaaccctgctggatgccgtcgccgatcagcaaggcgcgatgcaggacagcctcaaactgctgggagcgcaaaccgagcaacacctgcagagcatgcagcaaggtgccgagaagatgcgcctggcagccgagcgcttcgacagcgccgggcagagcgtgagtaaagccggcgaggcgactgcgggcgtgctgggtgcgctgcagggcacgagcggcgatctgatcggcgcttcccgcgaactgaccagtgtggtggccgactatcgcaataaccgtgaggcgttgaatcagacgcttgcggtcattcaaggtgtggtcgccactactcagggcgagtccgcggggcgcagccaatacttgcaggatctgaagcagcaaggtgagcggctacaggcgctcaatcgtgaagtgaacgactacctggagcagatcagcgcagtgctgggcaagggcttcaacgagtttagcgagggggtagatcgtagcctgcggcagacgctgggtagtctggatgccgagctgcacaaggcgatgaccagcctggccggtggtgtcgaaggggtcaaggaaagcctggaagacttcagtgacatcatggagcgcgttcagcgccgctga

SEQ ID NO: 7528 - DNA, 738 bp, Pseudomonas aeruginosa; identical to SEQ ID NO: 7448

SEQ ID NO: 7529 - DNA, 1677 bp, Pseudomonas aeruginosa
atgaatcgggcactgtcgtctctgtcggcggccatcgcctcgggcctagagcgccagattgagcgcagcggcgatgtcgggctcagtgctttgccatcgctgaagcgcgccagcagtgagctttctcggcgctttgatcaggtcgaaaaagccctggcaccgccccatgagaaacgcttgctggcacttggcaagttcaagcgcgagcaggcactgacttcatcggagtggcgcctggttttcgccgggctggccgatgacgatgaagtcagtgttccggtgctggaagacgatcagctgtttggtcgtgttcatcgggaggtggctggccgtatcgagcagcggtcacttagccgccgcgactggctggcgctgtgtttcagctactttgcctacgatgagcacaagcctgacgacaacgcgaactggcggatgctgcgtgacgatattgatcgcggcttcgatgctgtcaggcagcgtattggtcgtgagaaagagtggatgcgcatcgtagctgagcatcgcgaactgttcggcgttcaggctggggcccgtctggcggaggagatattcgagggcagggcgcgtgacctttcctctctgcaggccattgcccaggtgccggatggtagttggttgtggcagcggatatttgcggttctgctttcgcgcattttcctgctggatgacgaaaccttcctaaagcgcctgcgggagttggtagctctggggcaactgaatacgcgctatctcaatcaggtgctaagtgcctgccttactcgttatcaccgttcgcgatatcgcgagcagtcgtcctcgctactcaagcaggttgcgttggatcactggggcagcccacagatgcgttccaggcagaacgcctggttgcagtatgtggagcagcctgtctgcgccatggtggtggcctggttcgccaaggaagatctggaacacttcttcaccttgctcaagggcgaggcggaggttgatcagtcgcgcctgttctactggctgcgattcaccaatcaaatgagctacacgcggattgtgatgggcagcgatgcctggcatgaccggagtagtgatttcgtggccttccgtgagaagaacaaaggacgcttgagtcagctaaccggagggtcaagccacatcaatgcggttgtgatgcagatcggtgactacttctttgttgagttttcaggtacgggccatgcctgctacgtctaccgggcggataggttgccatttaaccctgatcagcaagtgcttggtctgaatacagagctaaagcagaagggccataagcccgcgcctatgcggcactcacctgcgcccaggcgtcctaatgtggtcgaagggtggctggagaagtttgatgacgagctccgggcgctgggaatcatcgcgcagcgtccagcttcatatacgcaaccccgcggttccgaagacaaacccgccgcccatagtgccgcgtctgcacccgtcgcgggtgattcgctggatgtgcaggttaagtcgatgttgggcagtgtgccctataagacgttcgatcaccgctcgaccagcggggtctaccaggttttgcttgccagggatgatgcggctgccaaaacagctctgctgcgcctcggcttcaaggctgtgaaaaacaatgcactcatgttctggaggctttga

SEQ ID NO: 7530 - DNA, 3252 bp, Pseudomonas aeruginosa
atgctcggccgatttttttccgggaaggatcgttctcagcccaccaagggggcggtgcctggtgcttaccagatcgaagaagaaggtttttgttatgccttgagtctggccgatgacgatgcaagctggcccgttgctgcctacctggaccagcttttcgaagaagactatgccagccagctgagtgatcgctggctgttgccttgggagtcgatctatcagctcttggatgatccagagcatgctagcagccttcctttacttggcttgcccgcgattgccaatctgcaaccgcagttggccagtaccggcggattgtcggatccagatttcaaggtatttatccggtcctggcgcaatccgcagacgggcaacccgattactttcgagcgtgttggcgccgtggcgcgccatgctggcaccactgagctgctgccgcgagcggtctgggagctgttgaaggcgattcgggatctgcatgccactcagcagcaggcccctggagaagtcgccaaccagatcggttgggccaatatccgtaaattggccaaacgggctggtgcggggctggacgggttcctcgacaagacggtggtggtcaaacctgagcacttgaggctgaagccgcgtaaggcagttgtcgccggtacgccgattatcgagttggatgtcgcgtttgttgggcagcctgacaattggttggccagtttcgatggttacaagcaggtgcaggataagtacagggtgctgggggccgatggaacggtgacgcacgtgctgattgagccggatgtaaaggcggtgcttgaatctgttcgcgcgttaccggggcggcgggtagccggtgatgaagcgctatcactggtgcgcaacccctacagcgtgatcggggatgcggccgagaaggttgttgatgcggacgagtacgaggagcagctggctgacgcgggcatctacttccatcgctttcgcctggaaccttttctaggcgaagacggcaaacatattcagtcgattagtctgttccttgagcctatctcgtccaaaccgctacccgaaattgagctgcgcttcgattttgcccatgagttcgcaccattcgtgaatgagctgcaggtgaagttggcagctggtatgcctgcgggattctggcagggctatgagctggagctgagtgacttcgatctcgcgcaattggcaggggtcaatgagcttttgcgccactggcagcgccaggaggccgggcagacattcgaggcggtgctcgatttggcctcgtatggtgatcgcgtcgtcggtatcggtgaggctgagcgcattacatctccgtttttggtgaaagaggcaacggaaaactggttgccagcggatgtgaaggcgcttggggtggacgccgagttgctcagccagtgggatcctgccagccgtgaagactttgaagagtttgagcaccgtctcgatcaggcgcgtgtcgcgggtgatgagcaggtatgtctaccgggtactgaaaccccgctacctttccaggtcgcggagcagctttatgaagcctggtcgaagaagcttaatccggtcgagccaaaaccacctgttgtgactgagcccgtagctggtcgtgcggtgctgcatatcgagcacaacattgaggaagcaacctatgcccagcgccgtgaggcggctctgctggcggggcggcatgccaacgcggatattccagaactgcttcgccccgaagttcaactgcgcgatcatcaaatgaaaggtgtggcgtggatgcagcacctgtttggcttatcacccgatcatgtcgcgggttgcttgcttgccgatgacatgggcttgggtaagaccattcaactgctgaccttcgtggtctggtatttggagcagaatcctcagggtaaaccggtcctgattgttgcccccgtttccctgttggataactgggagcgtgagctgcagcgattcttctatgcggatgcattgccggtattgaagctttatggcggcgcgctcagcgctgtgaagttcaagaaggacgagattcccggggatctgcaggccaaggggataaaaaatcttctgcggccgggttggatgggcgatgctcgtatcgtgctgaccacctatgaaaccttgcgtgatcaggaactctccttggcacggcagcagtgggccatcgtgatctgcgacgaggcgcagaagatcaagaacccggcggcgctgatcacgcaagcggcgaaagcaatcccctctcgattccgtatcgcctgcacgggtacgccggttgagaacacgctgatcgatttgtggtgtctgttcgactttatccagccgggctttctgggggggctgaatcagttcggtcgtgagtatcaacgccccatcgaggccggcatggagcgggacacggcgaagcttgaacgcctgcgtgggcttatcgaaccccagacattgcggcgcaccaagcaggatgtggcgaaggatctcccggccaaaatcgaggaccaggggtgccgcaagctgctgatgcacacattgcagcgcaatctctatttgtccgaggtggcccagtacacacagaagcagcagatgcaggagcaattggagcagcgggagagcggcatgcttggcctattgcacaggctcaagttggtgtgcgcgcacccgttcagcgtgcagcctgatccacgcttgagggagcactcgccgaaacttcaatggctcttaagcacgctggataacattgcgcgttcgggcagcggcgataaggtcatccttttcaccgagttgcgggacatccaacgtgaattgcagcatgcaattcaggaacgcttcggcttcaaacccactgtaatcaatggtgataccagcaccagcagccagagtgcgcacagccggcagcgcttgattgatcgtttccaagagcagccgggtttctcggtgataatcctctccactgttgcggttgggtttggtgtgaacgtgcaggcggccaaccacgttatccatttcactcgctgctggaacccggccaaagaggatcaggcaaccgatcgcgcttaccggattggtcaggagaaggacgtgtacgtctactacccgaccgtgcgtgatgcggggatgcctacatttgaggcgacgctggatgagctgctacagaagcgacgcgcgttagcgcgggatatgctgcatggggcatctgagcttcaggtatctgagtttggggaactgttaagggcgcaaggatga

SEQ ID NO: 7531 - DNA, 2196 bp, Pseudomonas aeruginosa
atggacttcacgaattggttggatttgttagggaaagcaacacacgagcaattgactgcgcccgccttcgtggtgagcttggtgacgttgctatgcctttggtacggcgtgcgttacttcctgtattcgttcgttctgagccgccgcatcaagcgggtgtcgaaggaggttcgcgccgtcggcgagctgcaaccggccaagcgtcgaggtgcactggagcaggtattccagaagcctccactgcaacatgcgtggcaggaatacgcggaaacgctgcacgaccaatttgaagtgcgtgatggcgagcggcagctgctgcgctctcgggcaacggctggcgctggacacttctttacgtcgcagacagtggtggaaacaccgcttggcactgagttctacaagcacttgccgggcattctgaccggcatcgggattgttggtaccttcttcggcttgatgctgggcctgcagcatttcaatccaggtacgcctgagcaggtcaacgccagcgtcgaccaattgctcaaggacgtactatttgccttcctgggctccttcttctcgatctttgcctccatcgccgtcacgctcactgagaagtggcgcctggggcgctgctacaagcacctggaaaaactgaccgaggccatcgacggcctattcgacagcggcgtcggcgaggagtatctggccgaactggtaaagtcgagcaatgaaagctcgatccagacgcgccaactgaaggacagccttgtcaccgacctgcgcgagatgctgcagaacctggtggacacccaggtgcgcgaaagcctgaagctggccgacaccctgtccgccagttaccgcgactccggccaggtgctggccgagcagattggtggtgcgatcgaaagcagtttgaaggctccactagagcaaattgcaggcgctgtccaatcggcgagtggcgaccagagcaaccaggtgcagagtctgctgcaggatgtgctggtggccttcatgaataagctggagagcaccttcggccagcagttcaatgggctacacgaaatgatggggcagtccgtggccgccatgcagtccatgcagcagggcttcaatagcctggtggacgacatgcgttcggctagcgagagctccacgcagaacagcgcgaagatgatcgcgcagctcctggccgatatgcaggctgggcagaacagtatgcaagccagtatgaatgagatgctggccaatctgcaggcctccattgcgcgaatcggcagtgaaggcgagggggccggcgagcgcatggcccagcagttggagaagctattcgccgagagcgaagcgcgccagcaagccatggcggaaaacctgcaggcctttatcgagacgatgaagcagaacatcggccaggggcagcaggaaaccatggccaaaatcgccggctcggtggatgttcttggcgagcagttgggcgccatgttcaagcagatggagcagggccgcgcgcagatggaccaggctactaaggttgcccaggtcgagctacaccgcggtactcgcgagatggttggtgatcttgagaagcaggtcaatgacctgttggatgcggtagctgagcagagcggctccatgcaggacaccgtcaagctgctcagcgctcagaccgagcaacatttgcagagcatgcaagctggcgcggagaagatgcgcgtcgcagcagaacgcttcgaaacggcgggcctaagcgtcaccaaggccggtgaagccactgctaacgtacttggggctatgcagggcaccggaaccgaactggtgggtgcctcgcgggaactcagcagcatcgtggccgactatcgcaacaaccgcgacgccctggctcaaaccctgagcgtgattcaaggtgtggttgccagcgcgcaaagcgaggcctccggacgcacccagtacctgctggatatgaagcagcagagcgagcggctgcaagcgctgaaccgtgaggttcatgactacctcgagcagatcagtggtgtgctgggcaagggcttcggggagttcaccgagggcgtcgaccgtagcctgcgacagaccctgggcagcctggatgccgaactgcacaaggccatgactagcctggccggtggcgtcgagggtgtgaaggaaagcctggaagacttcagcgacatcatggaaagcatccagaaaaagtga

SEQ ID NO: 7532 - DNA, 738 bp, Pseudomonas aeruginosa; identical to SEQ ID NO: 6673

SEQ ID NO: 7533 - DNA, 1644 bp, Pseudomonas aeruginosa; identical to SEQ ID NO: 6674

SEQ ID NO: 7534 - DNA, 3252 bp, Pseudomonas aeruginosa; identical to SEQ ID NO: 6675

SEQ ID NO: 7535 - DNA, 2127 bp, Pseudomonas aeruginosa; identical to SEQ ID NO: 6656

SEQ ID NO: 7536 - DNA, 765 bp, Pseudomonas aeruginosa; identical to SEQ ID NO: 6657

SEQ ID NO: 7537 - DNA, 2013 bp, Pseudomonas aeruginosa; identical to SEQ ID NO: 6689

SEQ ID NO: 7538 - DNA, 3042 bp, Pseudomonas aeruginosa; identical to SEQ ID NO: 6718

SEQ ID NO: 7539 - DNA, 2127 bp, Pseudomonas aeruginosa; identical to SEQ ID NO: 6656

SEQ ID NO: 7540 - DNA, 765 bp, Pseudomonas aeruginosa; identical to SEQ ID NO: 6657

SEQ ID NO: 7541 - DNA, 2013 bp, Pseudomonas aeruginosa; identical to SEQ ID NO: 6689

SEQ ID NO: 7542 - DNA, 3087 bp, Pseudomonas aeruginosa; identical to SEQ ID NO: 6722

SEQ ID NO: 7543 - DNA, 2196 bp, Pseudomonas aeruginosa; identical to SEQ ID NO: 6723

SEQ ID NO: 7544 - DNA, 738 bp, Pseudomonas aeruginosa; identical to SEQ ID NO: 6673

SEQ ID NO: 7545 - DNA, 1644 bp, Pseudomonas aeruginosa; identical to SEQ ID NO: 6674

SEQ ID NO: 7546 - DNA, 3252 bp, Pseudomonas aeruginosa; identical to SEQ ID NO: 6675

SEQ ID NO: 7547 - DNA, 2127 bp, Pseudomonas aeruginosa; identical to SEQ ID NO: 6656

SEQ ID NO: 7548 - DNA, 765 bp, Pseudomonas aeruginosa; identical to SEQ ID NO: 6657

SEQ ID NO: 7549 - DNA, 2013 bp, Pseudomonas aeruginosa; identical to SEQ ID NO: 6689

SEQ ID NO: 7550 - DNA, 3042 bp, Pseudomonas aeruginosa; identical to SEQ ID NO: 6718

SEQ ID NO: 7551 - DNA, 2196 bp, Pseudomonas aeruginosa; identical to SEQ ID NO: 6723

SEQ ID NO: 7552 - DNA, 738 bp, Pseudomonas aeruginosa; identical to SEQ ID NO: 6673

SEQ ID NO: 7553 - DNA, 1644 bp, Pseudomonas aeruginosa; identical to SEQ ID NO: 6674

SEQ ID NO: 7554 - DNA, 3252 bp, Pseudomonas aeruginosa; identical to SEQ ID NO: 6675

SEQ ID NO: 7555 - DNA, 2196 bp, Pseudomonas aeruginosa; identical to SEQ ID NO: 6723

SEQ ID NO: 7556 - DNA, 738 bp, Pseudomonas aeruginosa; identical to SEQ ID NO: 6673

SEQ ID NO: 7557 - DNA, 1644 bp, Pseudomonas aeruginosa; identical to SEQ ID NO: 6674

SEQ ID NO: 7558 - DNA, 3252 bp, Pseudomonas aeruginosa; identical to SEQ ID NO: 6675

SEQ ID NO: 7559 - DNA, 2127 bp, Pseudomonas aeruginosa; identical to SEQ ID NO: 6656

SEQ ID NO: 7560 - DNA, 765 bp, Pseudomonas aeruginosa; identical to SEQ ID NO: 6657

SEQ ID NO: 7561 - DNA, 2013 bp, Pseudomonas aeruginosa; identical to SEQ ID NO: 6689

SEQ ID NO: 7562 - DNA, 3087 bp, Pseudomonas aeruginosa; identical to SEQ ID NO: 6722

SEQ ID NO: 7563 - DNA, 2127 bp, Pseudomonas aeruginosa; identical to SEQ ID NO: 6656

SEQ ID NO: 7564 - DNA, 765 bp, Pseudomonas aeruginosa; identical to SEQ ID NO: 6657

SEQ ID NO: 7565 - DNA, 2013 bp, Pseudomonas aeruginosa; identical to SEQ ID NO: 6689

SEQ ID NO: 7566 - DNA, 3042 bp, Pseudomonas aeruginosa; identical to SEQ ID NO: 6718

SEQ ID NO: 7567 - DNA, 2196 bp, Pseudomonas aeruginosa; identical to SEQ ID NO: 6668

SEQ ID NO: 7568 - DNA, 738 bp, Pseudomonas aeruginosa; identical to SEQ ID NO: 6669

SEQ ID NO: 7569 - DNA, 1677 bp, Pseudomonas aeruginosa; identical to SEQ ID NO: 6709

SEQ ID NO: 7570 - DNA, 3252 bp, Pseudomonas aeruginosa; identical to SEQ ID NO: 6671

SEQ ID NO: 7571 - DNA, 2196 bp, Pseudomonas aeruginosa; identical to SEQ ID NO: 6723

SEQ ID NO: 7572 - DNA, 738 bp, Pseudomonas aeruginosa; identical to SEQ ID NO: 6673

SEQ ID NO: 7573 - DNA, 1644 bp, Pseudomonas aeruginosa
atgagtcgggcgttgtcgtcactctccgatgccatagcacgtagcttgcagcgccagcaggaacgcacggcggataccgggctgaatagatttgtcgatttgcaacgtgcaaacgatgagcttactcggcgcttcaatcaagtcgagaaggctctgcctccgcctcaagagaagcggagggaagcactgcgcaagtttaggcgtgataagcaattaagctctacgccctcggaatacagaccggtgtttgctggcttggcagataaagatgacggcggcctgccggtgcttgaggatgacgtcctatttgaattggtgcatcgagaggtctctattcgaagtgaccaacaaaagctgagccgaaaggattggttggcactttgctacagctattttttctacgatcacgccaagccggcagataactccaattggcgggtcctgcgcagcgatatcgatcagggccttgatgcggtcaagcggcgcatcggtcgcgagaaagagtggatgcggattgtccagcagcaccgtgagctgttcggtgatcaggcgggaaaacagctcgcggaggaaatctttgcggggcgcgccaaggacctgtccgctctgcagaccatcgcacaggtgccggatagcagctggttgtggaagcgcatctttgatgtgttgctgtcgtgcatcgatgatctggatgacgacaccttcgtgcagcgcctgccggagctgactgagttggggcagttgaataatcggtacatggataaggtgctcagcgcctgcctgacccgctattaccgctcgcgttttcgcgaacagtcttcttctctgctcaagcaagccgcgcttgagcactggggcagtccgcaacttcgctcagaccaaaaccgctggctaaaccatgtggagcagcccgtttgcgccatggtgatggcctggttcgccaaggaggacctggagcacttcttcaggttgctcaagggcgaggcggaggttgatcattcgcgtctgttctattggctgcgctttgccaatcaaatgagctatacgcggatcgtgatgggtaatgatgcctggaatgaccgtggtagtgacttcgtggccttccgcgagaaaaacaaggggcgtttgagtcagttgacaggggcctcacgtcacgtcagcgccgtagtcatgcagatcggccaattcttttttgttgagttctccggaacagggcatgcctgctatgtctacaaagcagatcaagcacctttcaacccggatcggataaaactcgacctaaccactgagctgaagcagcaggggcgtgagctaaagcgcatgtctcactcgccggcaccgagacgccctaacctcgttgaaggttggctagaaaagttcgacaccgagctccgggagttgggcatagttcctcagtcccctagtggccacaacgagccccggaaacctggaagccagtcgtccattgagatccaggtggcagcccaactgcggcacgttaactaccagctgatggacaaccgcagcaagggtggcgccttgatggtcaagcttgcacgtgatgatgcgcgggccagagttgcgctagcgcggttgggatttaaagagatgaacaagaacccgctgacattctggagaagctaa

SEQ ID NO: 7574 - DNA, 3252 bp, Pseudomonas aeruginosa; identical to SEQ ID NO: 6675

SEQ ID NO: 7575 - DNA, 2196 bp, Pseudomonas aeruginosa; identical to SEQ ID NO: 7527

SEQ ID NO: 7576 - DNA, 738 bp, Pseudomonas aeruginosa; identical to SEQ ID NO: 7448

SEQ ID NO: 7577 - DNA, 1677 bp, Pseudomonas aeruginosa; identical to SEQ ID NO: 7529

SEQ ID NO: 7578 - DNA, 3252 bp, Pseudomonas aeruginosa; identical to SEQ ID NO: 7530

SEQ ID NO: 7579 - DNA, 2196 bp, Pseudomonas aeruginosa; identical to SEQ ID NO: 6668

SEQ ID NO: 7580 - DNA, 738 bp, Pseudomonas aeruginosa; identical to SEQ ID NO: 6669

SEQ ID NO: 7581 - DNA, 1677 bp, Pseudomonas aeruginosa
atgaaccgggcactgtcgtctctgtcggcggccatcgcctcgggcctagagcgccagagtgagcgcagcggcgatgtaggtctcagtgctttgccctcgctgaagcgcgccagcaccgagctttctcggcgctttgatcaggtcgaaaaagccctggcaccgccccgtgagaaacgcttgctggcacttggcaagttcaagcgcgagcaggcgctgacttcatcggagtggcgcctggttttcgccgggctggccgatgacgatgaagtcagtgtcccggtgctggaagacgatcagctgtttgaccgtgttcatcgagaggtggctggccgcatcgagcagcggtcactcagccgccgcgactggttggcgctgtgtttcagctactttgcctacgatgagcacaagcccgacgacaacgtgaactggcgggtgctgcgtggcgatattgatcgtggcttcgatgctgtcaggcagcgtattggtcgcgagaaagagtggatgcgcattgtagctgagcatcgcgaactgttcggagctcaggctggaactcgtctggcggaggagatattcgagggcagggcgcgtgacctttcctctctgcaggccattgcccaggtgccggatggtagttggttgtggcagcggatttttgcggttctgctctcacgcattttcctgctggatgacgaaaccttcctaaagcgcctgccggagttggtagctctggggcagctgaatacgcgctatctcaatcgggtgctgagtgcctgcctgactcgttatcaccgttcgcgatatcgcgagcagtcgtcctcgctactcaagcaagctgcgttggagtactggggtagcccacagatgcgttccaagcagaacgcctggttgcaatatgtggagcagcctgtctgcgccatggtggtggcctggttcgccaaggaagatctggagcacttcttcaccttgctcaagggcgaggcggaggttgaccagtcgcgcctgttctactggctgcgctttgccaatcaaatgagctatacgcggattgtgatgggtggcgatgcgtggcatgaccggggtagtgatttcgtggccttccgcgagaaaaacaaagggcgcttgagtcagcttaccggtgggccgagccacaacaacgcggtggtgatgcagataggcaactacttttttgtcgagttctccggtaccggcaatgcgtgctacgtctatcgtgctgatgccgctccattcaatcctgacaaaaaggtgctggggctggcaactgagctgaagcagcaaggacgggcgctgaagcgtatgtcccactctccagccccgcggcgacccaatgtggtcgaagggtggctggataagtttgatgacgagctccgagcgctgggaatcgtcgcgcagcgtccggcgtcatatacgcaaccccgcgtttctgaagacaagcccgccgcccatagtgctgcgtatgcatctgtcgcgggtgactcgctggacgtgcaggttaagtccatgttgggcagtgtgccctataagacgttcgaccaccgctcgaccagcggggtctaccaggttttgcttgccagggatgatgcggctgccaaaacagcgctgctgcgcctcggcttcaaggctgtgaaaaacaatgcactcatgttctggaggctttga

SEQ ID NO: 7582 - DNA, 3252 bp, Pseudomonas aeruginosa; identical to SEQ ID NO: 6702

SEQ ID NO: 7583 - DNA, 2127 bp, Pseudomonas aeruginosa
atgatggacctgctgcaacacttgatccctgatttcgcccatatgttcagtgccaatcccaatggcatcagtgcctggttttggtctgcgacggcagtaattttcgtcttgtcgctttacttcctgtttgtgcacttccgccgttttcgtacccggctgcgtgccctgcgttctttgcttgaagggcaaagcaaggaaaccctggcgcttagccgacgtgaaaccatgcaaaaggcgcagggcttggacgcgcccaatgtcggcatgctgtggcgtgagttcgacgaaagcctggtgctgtcgtccgatcagaagcatctgttcaatacgctggatgccgagcatttcttcaatgcccgaaccttggctcccggcctgacagccagccgcttgctggctgctgcaccgagcttcctggtggccatcggtgtgctcggcacattcgtgggcctgacggtgggcctggaaggattggtcggcacctcggatgagatcgaggcactcaagggcggcatcaacaagctgatttccggtgctgccgtagctttcatgacgtcggtatggggggtgttcttcagcctgttgctgaactttgtcgaaaagatgttcgagcgttcagcgctgggccagatccagcagctgcagcacgatatcgatttcctctatccgcgtattcccgccgagcagtcgctggtgcatatcgccgagtacggcaaggagagcaaggaagcgctacaggagctgcacgagcgaattggcgatcgtctacaggaaacgctcaatggcatgagcgaagcgatgcagacggcgctgaccgatgccctgaacaacatcatggcgccagccatccagactctggtcagcaccaccagccagcagtccacgcaggtgctggaaaagctggtaggtaatttcatggacggcatgacctctgtgggccgtgagcagggcttgcagatgcagcaggcggcggctgacgtgaacgctgcagtgagtggcatgagtgagcgcctgaaccaattgttcagcagcctgaatgaacagcagggtcgacagatggaagtggctcagcaacagagtgcggccttcgagacgcagttgcagcgcatcagtggttctgccgaagagcgccaggcacagatggagcaacgctttgccgagttgatgtcagggctgacgaaccagttgcagacccagctgggtactgcccagcagcgcgacgaggagcgccaggtgctgttcgagcgcctgcttggccaggctagcagcagccagacggcgatgttggagcaattttccagctcaacccgcgagcagatgcaagcgatggctgaggcgggcaacgagcgccacagcaatctggagaaggtgttctctcgtttgatgatgaacctcaacacccagctcgattcgcaaatgggcgcggcagagcagcgtgagcaggcacgccaacagcgcttccaggagcagctcgaccaggtgtcgacgcaccagcaggaattgctcaccagtctggccactgctgtgcaggcgacccagcagcaaagccgcttgatggcggatcagcatcagcagttgctgggccagctcaagcaggtgtcggaagcgactgcacaaagcagcaagcatctggacagcagtgcgaatcagcttgggcttctatccgcgaatctgcgccaggctgccgataccttgggccagcgactggaagccgtcactcatggtgtcgagaaagctggccagcagaacgccgagctcgcggcgcagttgcaaggccaggccgctaccctggcgcagctgcaggccacgttgctggagggtgcgcagcgcttcgagcaagcagccagtgaggcgcgtaacggctttggcgagatgaaatccgctcagcaggagtttctctctggcgtacgccacgaattcaccgcgttgggagaaaagttgcgtgagcaggtcgaggcggtagagaagcaagccgaggaatggctgcgcagttatgccggcgaggtgcgtgtgcagactgatgagcgaatgaaccagtggaatgaggtatcgctgaagtatgccgatcagatgcaccgcgtcgtgcagaacatgagcagtattctggatgaactggaggcacgctga

SEQ ID NO: 7584 - DNA, 765 bp, Pseudomonas aeruginosa
atgcgcctgggtaaatccaaggaagtgagcgtcgacgaagagaacccttactggatgtcattctcagacatcatgtcggcgctattggtgatcttcatcctggcttcggtgattctgatcctgcagttgatggaaattcagaagaagttgaaagagcgcgaggtgcagtttgagcaagagctggtcgagctgaagaaagcagagcaggtgcgccgcaccattcttgatgaggccgtggaggccctgcgcaaacgcggcatcaaggtcgaggtgagcgagaaccatacggtcctgagtattcccaacgatctgctgggtttcgacacaggtgcctatgacattcatgccgcctatcaggcgcgtgctctggagattggcaaggtcatcaatgaggtgatctcgcgagaggatcgagtcgagttcctcgatacgatcttcatcgaggggcatacggacaatcgtccgctccagggctttatgggcaaaggcaactgggggctctcaaccttccgtgccatttctctctggcagttctggggcagcgcgctgtccgccgatgagcaactggcaaggctgaagaataaggatggcaagccactgttctcggttagcggttacggcgaaacccgccccgttttggtcgaccagcagactgaggatgacttcaagcgcaaccgacgcatcgatatccgcttcaccattcgtcgtcccgacagcgctcagtacgagcaggtgcgtgagcgtctggaggaggtcaagccgtga

SEQ ID NO: 7585 - DNA, 2166 bp, Pseudomonas aeruginosa; identical to SEQ ID NO: 7469

SEQ ID NO: 7586 - DNA, 3042 bp, Pseudomonas aeruginosa; identical to SEQ ID NO: 7470

SEQ ID NO: 7587 - DNA, 2196 bp, Pseudomonas aeruginosa; identical to SEQ ID NO: 6723

SEQ ID NO: 7588 - DNA, 738 bp, Pseudomonas aeruginosa; identical to SEQ ID NO: 6673

SEQ ID NO: 7589 - DNA, 1644 bp, Pseudomonas aeruginosa; identical to SEQ ID NO: 6674

SEQ ID NO: 7590 - DNA, 3252 bp, Pseudomonas aeruginosa; identical to SEQ ID NO: 6675

SEQ ID NO: 7591 - DNA, 2127 bp, Pseudomonas aeruginosa; identical to SEQ ID NO: 6656

SEQ ID NO: 7592 - DNA, 765 bp, Pseudomonas aeruginosa; identical to SEQ ID NO: 6657

SEQ ID NO: 7593 - DNA, 2013 bp, Pseudomonas aeruginosa; identical to SEQ ID NO: 6689

SEQ ID NO: 7594 - DNA, 3087 bp, Pseudomonas aeruginosa; identical to SEQ ID NO: 6722

SEQ ID NO: 7595 - DNA, 2196 bp, Pseudomonas aeruginosa; identical to SEQ ID NO: 6723

SEQ ID NO: 7596 - DNA, 738 bp, Pseudomonas aeruginosa; identical to SEQ ID NO: 6673

SEQ ID NO: 7597 - DNA, 1644 bp, Pseudomonas aeruginosa; identical to SEQ ID NO: 6674

SEQ ID NO: 7598 - DNA, 3252 bp, Pseudomonas aeruginosa; identical to SEQ ID NO: 6675

SEQ ID NO: 7599 - DNA, 2127 bp, Pseudomonas aeruginosa; identical to SEQ ID NO: 6743

SEQ ID NO: 7600 - DNA, 765 bp, Pseudomonas aeruginosa; identical to SEQ ID NO: 6744

SEQ ID NO: 7601 - DNA, 1923 bp, Pseudomonas aeruginosa; identical to SEQ ID NO: 6745

SEQ ID NO: 7602 - DNA, 3045 bp, Pseudomonas aeruginosa; identical to SEQ ID NO: 6746

SEQ ID NO: 7603 - DNA, 2196 bp, Pseudomonas aeruginosa; identical to SEQ ID NO: 6664

SEQ ID NO: 7604 - DNA, 738 bp, Pseudomonas aeruginosa; identical to SEQ ID NO: 6665

SEQ ID NO: 7605 - DNA, 1677 bp, Pseudomonas aeruginosa; identical to SEQ ID NO: 6685

SEQ ID NO: 7606 - DNA, 3252 bp, Pseudomonas aeruginosa; identical to SEQ ID NO: 6667

SEQ ID NO: 7607 - DNA, 2127 bp, Pseudomonas aeruginosa; identical to SEQ ID NO: 6656

SEQ ID NO: 7608 - DNA, 765 bp, Pseudomonas aeruginosa; identical to SEQ ID NO: 6657

SEQ ID NO: 7609 - DNA, 2013 bp, Pseudomonas aeruginosa; identical to SEQ ID NO: 6689

SEQ ID NO: 7610 - DNA, 3087 bp, Pseudomonas aeruginosa; identical to SEQ ID NO: 6722

SEQ ID NO: 7611 - DNA, 2196 bp, Pseudomonas aeruginosa; identical to SEQ ID NO: 6723

SEQ ID NO: 7612 - DNA, 738 bp, Pseudomonas aeruginosa; identical to SEQ ID NO: 6673

SEQ ID NO: 7613 - DNA, 1644 bp, Pseudomonas aeruginosa; identical to SEQ ID NO: 6674

SEQ ID NO: 7614 - DNA, 3252 bp, Pseudomonas aeruginosa; identical to SEQ ID NO: 6675

SEQ ID NO: 7615 - DNA, 2196 bp, Pseudomonas aeruginosa; identical to SEQ ID NO: 6664

SEQ ID NO: 7616 - DNA, 738 bp, Pseudomonas aeruginosa; identical to SEQ ID NO: 6665

SEQ ID NO: 7617 - DNA, 1677 bp, Pseudomonas aeruginosa; identical to SEQ ID NO: 6685

SEQ ID NO: 7618 - DNA, 3252 bp, Pseudomonas aeruginosa; identical to SEQ ID NO: 6667

SEQ ID NO: 7619 - DNA, 2196 bp, Pseudomonas aeruginosa; identical to SEQ ID NO: 6723

SEQ ID NO: 7620 - DNA, 738 bp, Pseudomonas aeruginosa; identical to SEQ ID NO: 6673

SEQ ID NO: 7621 - DNA, 1644 bp, Pseudomonas aeruginosa; identical to SEQ ID NO: 6674

SEQ ID NO: 7622 - DNA, 3252 bp, Pseudomonas aeruginosa; identical to SEQ ID NO: 6675

SEQ ID NO: 7623 - DNA, 2127 bp, Pseudomonas aeruginosa; identical to SEQ ID NO: 6656

SEQ ID NO: 7624 - DNA, 765 bp, Pseudomonas aeruginosa; identical to SEQ ID NO: 6657

SEQ ID NO: 7625 - DNA, 2013 bp, Pseudomonas aeruginosa; identical to SEQ ID NO: 6689

SEQ ID NO: 7626 - DNA, 3087 bp, Pseudomonas aeruginosa; identical to SEQ ID NO: 6722

SEQ ID NO: 7627 - DNA, 2127 bp, Pseudomonas aeruginosa; identical to SEQ ID NO: 6656

SEQ ID NO: 7628 - DNA, 765 bp, Pseudomonas aeruginosa; identical to SEQ ID NO: 6657

SEQ ID NO: 7629 - DNA, 2013 bp, Pseudomonas aeruginosa; identical to SEQ ID NO: 6689

SEQ ID NO: 7630 - DNA, 3087 bp, Pseudomonas aeruginosa; identical to SEQ ID NO: 6722

SEQ ID NO: 7631 - DNA, 2196 bp, Pseudomonas aeruginosa; identical to SEQ ID NO: 6723

SEQ ID NO: 7632 - DNA, 738 bp, Pseudomonas aeruginosa; identical to SEQ ID NO: 6673

SEQ ID NO: 7633 - DNA, 1644 bp, Pseudomonas aeruginosa; identical to SEQ ID NO: 6674

SEQ ID NO: 7634 - DNA, 3252 bp, Pseudomonas aeruginosa; identical to SEQ ID NO: 6675

SEQ ID NO: 7635 - DNA, 2127 bp, Pseudomonas aeruginosa; identical to SEQ ID NO: 6656

SEQ ID NO: 7636 - DNA, 765 bp, Pseudomonas aeruginosa; identical to SEQ ID NO: 6657

SEQ ID NO: 7637 - DNA, 2013 bp, Pseudomonas aeruginosa; identical to SEQ ID NO: 7445

SEQ ID NO: 7638 - DNA, 3087 bp, Pseudomonas aeruginosa; identical to SEQ ID NO: 6722

SEQ ID NO: 7639 - DNA, 2349 bp, Pseudomonas aeruginosa
atgactgaactgctgcatcatctctggcccaactttgcgttgctgaagcaaggaagcaccgaagcattgggggcgtttttctggatcgtcatggcgacaatctttgttgggtcgctgctcgctttgctgcgcagctggctgcactttaagggacgaatgggtagcttgagtaagctgctagcgggccagacgcgcgagaaccttgccatcaatcggcgcgagatgctgcagaaagccgatgccctaaaagataagcgaatcgcatcgctttggtacgaatttgacgacagcttggtcgcttccagcgatcaaaagaaattgttcaataccttagatgctgatcatttcttcaacgcgcgcacgttggccacgggattgacggcaagccgcctgcttggcgccctcccaggtttgttagtggggctaggtgtgctagctaccttcgtggggctgaccatcggcctttctaagctgaaattggatagccacgcaggtgttgagcaactgcgtgctggtatcgacgtgatgattcagggggctgccgttgcgttcatggcatccgtctggggggtgttcttcagcttagtgctcaacttgatcgagaagctggtcgagcgtagagcgctagggcagattttggacctgcagcaccgtattgacgcgctgtatccgctcattcccgcggagcaatcgttggttcacatcgctgattacagccgggaaagcaaggaagcactgcaagagctccacgaacgcataggtgaccgccttcaggaaagcttggtaggcatgaacgaggctatgcaggcggcccttactgatgctttgaacaacattatggctccggccatccagacacttgtcagcacgaccagccagcaatctacacaagtgctagagcggctggtaagcaatttcactgatggcctcacgtcggcagggcgcgagcagggcagtctgatgcagcaagctgctgccgatgtgaatgctgcagtcggtgggatgaccgatcgcttgaatcagctgttccagactctgagcgatcagcaagggcgacagcaggaggcggccagacagcaaagcggcgagtttcaggcccagatggaacggatttcttcttcagcagatcagcgccaacaacaattggagtcacgtttcagtgagctgttgagcggattgactggtcagctggatacgcagcttggctccgcgcagcggcgggatgaagagcgtcaggcgcttttcgagcgcactttggttgaggcaggggcgagccaatctgcgttgttagagaagttcgccagcgcaagccgtgaacagcttcaggctatggcagaggctggaaacgagcggcatggcaatctggagaaagtcttctcccggttaatgatgacactgaactcccagctggattcgcaaatgggtgctgctgagacgagagagcaagagcgagccttgcgccatgatcagcagcaggctgcggtattggcgcagcaacagcagttaattggcagccttgggcagaccagccagcagcagatcggtgcaattgccgaagcggcggctgcacagcaacgtgctttggaggagtcagttagcaagctgctcggtaacttcaatgagcagatgtcgggccatggccagcaagctgagcagcgtgaacattctcgccagcaacgcttcaacgagcagctggaaagcatggcggcgcagcagcatgctctgctggaaggcatcgccacagctgtacaagcaacccagcagcaaagtcgccaaatggctgagcagcatcagcaactgatggggcgtttgcagcaagccagcgacgcggccgctactagcagccgacacatggacagcagtgccaaccagctcggattgctctcaaccaatgttcgtcaggcagcagagcttcttggtcagcggttagaaagcgtgacgcagcgtattgagtctgctggtgagcagaatgctgagctcgcaggccaactgcggcaacaagctaccgctttggcgcaacttcaaggtgcgttgttggacggcgctcagcgcttcgagcaggccgccgcggaagcgcgcaacggatttggcgagatgagatctcatcagcaagagttcctaaccggagtgcgtggtgagttcactgctctgggagaggcgctgcgcagtcaagtgcagggggtcgagcagcaagctgagcaatggctgcgtagctactccaccgaagtccgcgaccaggtgcatgaacgcatggaccagtggaacaaggaaaccctgagctttgctggccagatgcatgccgcagtgcaggcgatcagtaacgtggtcgacgagctggaggcgcgctaa

SEQ ID NO: 7640 - DNA, 744 bp, Pseudomonas aeruginosa
atgcgttggcgaaaatcccatgacgtaccaatggaagacgaggatccgtactggaagtctttcgtggacattatgtcggcgctgctggtgctcttcatcttggcgtcggtggtactgatccttcagttgatggagaaaagcgctgattttgatcagcaggtcgagcagctgaagaaagcagaaaccgtacggcagcagattctcgatgaggcggtggagaagctccgccagcgcggaattaaggttgaggttagcgagaaccatacggtcctgcgtatacccaacgaattgcttggctttgacacgggcgcctttgaaattcaaccacgctaccagccgacggccctggagatcggggaggtcatcaaccaggtaatcagtcgtgaagatcgggtcaactacctcgataccatcttcatcgaaggacacacagacaaccgccccttcccaggctttatggggaagggaaactggggattatcgacgtttcgtgcaatctcactctggcagttctggagcaccgagatacctgaagcggagcgtctgaaccgactgagcaatcaggacggtgagcctttgttctcggttagtggctacgccgagactcgcccggtaagtaagcggcaggacggggaggaggactatcggttgaatcgtcgtatcgacattcgcttcaccattcgccggccgcagagttctgagtatgaagcggttaagtcattgcttgggaactcaactaaatga

SEQ ID NO: 7641 - DNA, 2172 bp, Pseudomonas aeruginosa
atgaagctgccgccgatcgataaccgccctggtgagtggtcgcctacggtcatcgagggctggtcgcgcttggtggaaaaggctagccgcatgaaggcgaaggtcggtagcggcgatgctttcgagcgagctattgcccggttgcgcagcatggctagtagtgggcgattcgacggactagttgagttactcagccgacgtctaggtgctagagcgcttacttggctttggttgcatgatgattttgctggtactcgactgttcaacggacgaatgctagaggccttgttggagtaccagcagccccgcttgagccgactgacgttgattcagttgctccaactgtatttcatcgtttttgatcgccttgacgagagagacaagcaggccgagaccagcttacgaggaaggttggagtggcatttactggatcagctcaaacgtttgccggagaaagctcggccccaatcattcgttgctgatccgttaacaacgctcaagacggaaggagattggctgctggcactggacggcccacttcgtctcgcacaggctgtgcgacagcgtggcaaggagctagcacagactttcgaagagatgggcctgagcggatttgatgtcggacgttatggggatatctgtcgcgcacacttctacttggaaaggctgcgccagctgcgaccaggtgagtgggatgaggtgctcgaagagctgctcaaaccatcagtgagtaaggcaccgtatgaggcggatagacgcattggtcatgctgcactggagatcatgatcgatcgtgctggggatgatccaggtgacacctggcaaaacttcattctcagcctggcgggtgatccacgtattgcgagctcagctccgaatttccgcgagtggtggaaacctctgggcgaggagcgcattggtaaggtgcgcgggtggctatccaaggaagacctgcgtttattcctgcaggctgttgagcagtatggcgtggagtcaggcaaagaagacctccagcgtatgttcccggcacgcaagctctttctggaggggttgttcaagcttggccttatccgatacacacggctgatgctcggtaacagcgccacgcactccgttaagcgcatccttgggggtgaagtaaaaactagttttgccagcatggactcagtgatgaatgacaaggctgtgatctatctggactgcggtgatttccatttagtcgagggctcgcatagcttcagaatctgggcctatctcggtcagccgggccattggatcaagtcatacgagcgcaatcatttctcgcatcatgacctgactatttcgttgcccagggagtacaaggcggcctatccgggtcttccctatgaggcagtggttcacaacggttcctggcaacacaaagtgttcgagtttctggcagaaaacggcattgctctggatatcgagaagctgcttagccgatcggactacaaagcgtatctaagcaggtacggcatgccggttgttgggctaaagaaggcgagagttgagcccttagtgccgccgactgcggaaagtgggattagcaaggatcgggagcttggggccatgagctcggccgagtcgaacctgatcaagctgcaggctgcaaggagggttgcaccccccgcgggagcacctggtccctctcagatcgagctcaacaagactcagcgttcaatcttgacctatttagcctcgcattcagatcgttccatgggggagatccggcgggcgatggatggggatgaggctttgctttacgaaatacaggagagtctcaggggtaggcttgcagcttacgttcaacaaaatgacgtcttccaatggtccctgtcagaagcagggcgaaatcttctcggagacgtgccttcccctgctcgaaccaagagccctagcgcgggcagctctaatagcgcagctcagctgaagcggcttggcgcgtttgagttgcaggtgctttggtacttcaaatcaaacccaggcgacagggtcagatctgcggccaacgttcttgatgttgaggcgcgagagattaatcgggtgctctacggagcccttaaaaatatgtgtgagcaaggcagaaactttggctgggcagtaaaggccgacatatctgacgccttggagcaactgccaacagaatcgtga

SEQ ID NO: 7642 - DNA, 3030 bp, Pseudomonas aeruginosa
atgggattggctgacatctttaaaagcctgcttggcgaggggcgagcaacgctgagcacgcagcagggatttgcctacgcagcggactcggacggcgtgaatttctacttggacaagaaggtgtacgcggcgctggcagccggcgaagggaatgccttgcagaaggtccagctgatcgttttgcgcatgcttcaggagcagggcttagctgagccactcgctaatggattccatgtagctgctgaagacgttgccggtatggacgacgagcaggctgagattcttcgtttgcctcgccggctcagcatgagctttgtcagcagaatcagcggtcgaactgggcatagcggttttcgtgtcgatctgacgattcaatccaaagcaggtgaagtgcccttcacgcggaaggggccactgctctacctgacatccacagagtgctatcgccttacgcctgcggagttgatggggctaatggcgtgggaataccaccaaaatctgcctgcacagctacgaggagaagcttccaatttgaggatgatggctgagctgcagaccgctgcgcgtagcgggatgcgtgtcgacctcagccattttgaacggctggatgtggtggtgccggagaacattggcgtcattgctacgcgtctggcagatggcagcctcatgctcagccccagcttgggagatggctctacaccggatcagttagagaagcgctggtcccaactggatatgggagcagatggcggagtattgcgcatcgacaaccgtgtggtgctccttgagccgcagaagatggctgcgattaaggaagtgttgggcagtaaacgcattcctgctgaccgggtcgcggagttcatcgccacaccaagcgcgttcctggatgcggcgttggtcaatcttgaccttggcttttctgtccgggtcgcaggcattggcaagcttcaacacatggagtttggcgacttagacaatcagaagaatgattggtttgcactggattcacgccccgctcccgctgagatcattccgaagctagtgcaatccgaagaggacctacagcacttcaacgagctctacaaagcggccattgagcagggcgcgaccagcatgacctttgggggagagacgattgatatctccgatcccgtccttgttgagcaacagctgaagaggattgaggtgtctctgagggacccggcactcgacgaagtgcccggggactcattgtcagtagagcccaaagagcgagtgagtgtgctgctacgtgatgctgacgagatcagcagcacgttgttgcgcaaagcaagcgaggctaagcccgcgcacgagcctgagtggagtgcgtacgcgcgccaacccttcccgcaccaacgggagggggttgagtggatgcttgggctgctggagtcggcagtttgcgatgatcatgatgatctgtatcggctgcagggcggactgctcgctgacgatatggggttgggtaagacctacatgtcgctggttacagtaggtgagtatctagcacagcaaaaggcctctgggcgtgcacaaaaaccagtgcttgtggtggctcccttgagcctgctggagaactgggaagatgaggtcgcgcagacctttagaagcatcccattccgggacatcgtagtgctgcagtccggaagggacttgagccgcttcagagtcaaaggggccgagcgagagtccgcgcaattggcttcgctgataaatgacgatggagaaatggacgatgaatccattcgctatgcgctcaccatcggcccagaggtgggtgtccaccgcctggatatggatcgtcgcctggttctgactacttatcagaccctaagggactaccagttctctctgtgcagaattgactgggggctggtgatttttgatgaggcacagaacatcaagaatcctaatgcggcgcaaacgcgagctgcgaagggtttgaaagcggacttcaaactgttggctaccggtacgccagtcgagaacagtttgggggacttctggtgcctcatggacacggctcagccaggaatcctcggaggctggagccagtttcgtgacaattggatcaagccgatcctggctgcggcagatgatgaaaaagatgaggttcggcgaagggttggggctgatctgcgagaggctgtaggcagattcatgctccgccgtatcaaggaagaccagttaaaagggcttccaagcaagaccatccatagcggcgtggcgcagcctcaaggggggcttcagcttcatgcagctcatcttgcggtctccatgaagggcatgcagcttcaagcttacgacgccgtgctcgaggacttccgggcaaggcgtgcgactgaggacatgcgcggtgctgcgcttgcagctctttctcagcttcgagagatctctctgcatcctcgtcttcgtgaagaggcagcgttgatggctggcaccgctagtgaggcgcgcgcccatatggctcagtcagggaagctggtggtgctgctggacttgctcgatcgaattcgtcggggcgaggaaaaggtcattctgttcatggtcaccaaacggcttcagaggatcttgaagctgtggctcgaccagatctacgggttggacgtagcgatcattaatggtgagaccgcggcagttgcgaagaaatcagatgagctgactcgcaaaaagctgattggtgtttttgagtctaaacctggcttcaacatcatgatcatgtctccggttgctgcaggggttggattgactgtggtcggagccaatcacgttgtgcatttggagcgacattggaaccccgccaaggaggctcaggcgtccgatcgtgtgtatcggattggccagaagaaagacgtgtacatacacctgcccgctgtgctccatccgcaattcgactcattcgatgtccaccttgatcgcttgcttagaggtaagttgatgctcaaggatgcggtagtgacgccggagatggtgagtgagggtgagataattcgctcaatgggattgtga

SEQ ID NO: 7643 - DNA, 2196 bp, Pseudomonas aeruginosa; identical to SEQ ID NO: 6711

SEQ ID NO: 7644 - DNA, 738 bp, Pseudomonas aeruginosa; identical to SEQ ID NO: 6712

SEQ ID NO: 7645 - DNA, 1677 bp, Pseudomonas aeruginosa; identical to SEQ ID NO: 6713

SEQ ID NO: 7646 - DNA, 3252 bp, Pseudomonas aeruginosa; identical to SEQ ID NO: 6714

SEQ ID NO: 7647 - DNA, 2196 bp, Pseudomonas aeruginosa; identical to SEQ ID NO: 6664

SEQ ID NO: 7648 - DNA, 738 bp, Pseudomonas aeruginosa; identical to SEQ ID NO: 6665

SEQ ID NO: 7649 - DNA, 1677 bp, Pseudomonas aeruginosa; identical to SEQ ID NO: 6685

SEQ ID NO: 7650 - DNA, 3252 bp, Pseudomonas aeruginosa; identical to SEQ ID NO: 6667

SEQ ID NO: 7651 - DNA, 2127 bp, Pseudomonas aeruginosa
atgatggacctgctgcaacacttgatccctgatttcgcccatatgttcagtgccaatcccaatggcattagtgcctggttttggtctgcgacggcagtaattttcgtcttgtcgctttacttcctgtttgtgcacttccgccgttttcgtacccggctgcgtgccctgcgttctttgcttgaagggcaaagcaaggaaaccctggcgcttagccgacgtgaaaccatgcaaaaggcgcagggcttggacgcgcccaatgtcggcatgctgtggcgtgagttcgacgaaagcctggtgctgtcgtccgatcagaagcatctgttcaatacgctggatgccgagcatttcttcaatgcccgaaccttggctcccggcctgacagccagccgcttgctggctgctgcaccgagcttcctggtggccatcggtgtgctcggcacattcgtgggcctgacggtgggcctggaaggattggtcggcacctcggatgagatcgagtcgctcaagggcggcatcaacaagctgatttccggtgctgccgtagccttcatgacgtcggtatggggggtgttcttcagcctgttgctgaactttgtcgaaaagatgttcgagcgttcagcgctgggccagatccagcagctgcagcacgatatcgactccctctacacgcgcatccctgcagagcaatcgctggtgcatatcgccgagtacggcaaggagagcaaggaagcgctgcaggagctgcacgagcgtattggcgatcgtctgcaggaaacgctcaatggcatgagcgaagcgatgcagacggcgctgaccgatgccctgaacaacatcatggcgccagccattcagaccctggtcagcaccaccagccagcagtccacgcaggtgctggaaaagctggtgggtaatttcatggacggtatgacctctgtgggccgtgagcagggcttgcagatgcagcaggcggcggctgacgtgaacgctgccgtcagtggcatgagtgagcgcttgaaccaactgttcagcagcctgaatgaacagcagggtcgacagatggaagtggctcagcaacagagtgcggccttcgagacgcagttgcagcgcatcagtggttctgccgaagagcgccaggcacagatggagcaacgctttgccgagttgatgtcagggctgacgaaccagttgcagacccagctgggtactgcccagcagcgcgacgaggagcgccaggtgctgttcgagcgcctgcttggccaggctagcagcagccagacggcgatgttggagcaattttccagctcaacccgcgagcagatgcaagcgatggctgaggcgggcaacgagcgccacagcaatctggagaaggtgttctctcgtttgatgatgaacctcaacacccagctcgattcgcaaatgggcgcggcagagcagcgtgagcaggcacgccaacagcgcttccaggagcagctcgatcaggtgtcgacccatcaacaggagctgctctccggtctggccagcgctgtgcaggcgacccagcagcaaagccgcctaatggcggatcagcatcaacagttgctgggccagctcaagcaggtctcggacgcaactgcgcagagcagcaaacatctggacagcagtgcgaatcagcttgggcttctatccgcgaatctgcgccaggccgccgataccttggggcagcgactggaggccgttactcatggtgtcgagaaagccggccagcagaacgccgaattggcagctcagttgcaaggccaggccgctaccctggcgcagctgcaggccactttgctggagggggcgcagcgcttcgagcaagcggccggtgaagcgcgcaacggttttggcgagatgaaatccgctcagcaggagtttctctctggtgtgcgccacgaattcaccgcgctgggtgaaaagctgcgtgagcaggtcgaggcggtagagaagcaagccgaggaatggctgcgcagctatgccggcgaagtccggacgcaaatcgatgaccgcatgaacaagtggaacgaggtgtcgctcagctacgccgaccagatgcatcgaacggtgcaagccatgagcagcattctggatgagctggaggcacgctga

SEQ ID NO: 7652 - DNA, 765 bp, Pseudomonas aeruginosa
atgcgcctgggtaaatccaaggaagtgagcgtcgacgaagagaacccttattggatgtccttctcggacatcatgtcggcgttgctggtgatcttcattctggcctctgtaattctgatcctgcagttgatggagaaggagactgagcttgaccgccgtcaggatcagttcaagcaagaacttgaagagttgaaggcagcagagcaggtgcgtcgcaccattcttgacgaggctgtggaggcattacgaaaacgcggcattaaggtagaggtgagtgagaaccacacggtcctgagtattcccgacgatctgcttggcttcaaaagcggagtctttgagattgatactgcgtaccagatggatgcgttgcaaattggtaaggtcatcaatgaggtgatctcgcgagaggatcgagtcgagttcctcgatacgatcttcatcgaggggcatacggacaatcgtccgctccagggctttatgggcaaaggcaactgggggctatcgacctttcgtgccatttctctctggcagttctgggggagcgcgctgtcccccaatgagcaattggcaaggttgaagaacaaggatggcaagccactgttctcggtcagcggttacggcgaaacccgccccgtgttggttgaccagcagactgaggatgacttcaagcgcaatcgacgcatcgatatccgtttcaccattcgtcgtcccgacagcgctcagtacgagcaggttcgtgagcgtctggaggaggtcaagccgtga

SEQ ID NO: 7653 - DNA, 2166 bp, Pseudomonas aeruginosa
gtgaagctgcctcctgttcacatgccggtcgctgaatgggcgcccgtggtgcgggagcgctggacggtgctggtcgaaaagggcgctcgaatgaaggccgcaagtggcaagagcgacgcctttgacgccatgttggcacgattgcgtgacatggcgagtacagggcgttttgacggcctgcctgagctgctaaaacgtcgtcttactgcgcgtgcgttgacctggttgtggctcaacgacgagaccatgggtaggcgtttgcttagttcgcgtctgctttcggtgctggtcgatgctcagcagcctaggctgacacgtataaccttgcagcagttggctcagttttactttcgtcgcttcgacaagctggatgagcacgatgggctgcgtaagcagcttgagcagattttgctccagcaactgcatttactgcccgagcccaaagtaagtggcccccaggctgatccgctggtaacgctcaagcgtgatggtcattggttgctgccgcctgacgggccagtccaactggttgagcgggtacgcgacagcggccatgagctgggccagacctttgaggtcatgggattgcagggctttgatgacgggcgttatggcgatatctgccgggcccacttctacctggaaaccctacgagggctttcgcccggtgaatacgaccccgtgctggatgagctgcagaagcccgctgtgtccaaggctccgtacgagggcgagcgtcgtatcggccatgttgcgctggagattctgatcgatcgtgccggacaggagccgggtgaggtctggcagaactttattctcaatctggcgggggatccgcggatcgcaagtaccgcagccaactaccgtgagtggtggcaaccacttggtgaggcgcgtatccagaaggtgcgtggttggttgtctaaggaagaccttcggttgttcctgcaggcggttgagcaatatggcttggagtcgggaaaggaagatctcaagcgtatgttcccggcgcgcaaactgttcttggagggattgttcgcgctcggcttgatccgacatacgaggttgatgcttggccgcaatgccaagcagtcagtgaagcgtattctcggaagtgaggtaaaaaccagcttcgcgggcatggattcagccatgagtgacaaggcggtgatctatctcgattgtggcgacttccatctggtcgagggctcccatagttttaaaatatgggtttacctcggccagccagggcattgggtcaagtcgtatgagcgaaatcagttctcgcacctcgatctgacaacttcgttgcctagtcaatacaaggcagcctacccaagccttccctacgaggcagtgacccataacggttcctggcagcgtaaggtgttcgatttcctggcggataacggtattgcgctggatattgaaaaattgcttagccggtcggagtacaaggcatatttgagcaaatacggcctacccgccgttagtggcaagaaagcgcgcgttgaaccactggttcagcaaagcgcgaagtctgattcggccccagtttctcagattggagcgaccggctttgtggccgcgcatcgtatggctgaaccgcgtcctcctgctgtggatgtttttgcctcagaagctccaagagcctccggcaccgaactgaccgacacgcaattatcgattctggcctacctgtccaagcacccggaaagcttgatgggagatattcgtcgagccctagaaggcgatgaagcactcttttacgagatccaggacgctcttcgaggcagtatttcaagctacgtccaacagaacgaggtcttccaatggtccttatccagcaaaggagaggcattgttgcgtagagcggatttagatcctgcacccaacacctctgatgcagaccagcaaccgttaatggctactttgcagcgtttggggacgtttgacttgcaggtgctgtggtacttcaaaaataacccaggcgacaaggtgcgccacgcagcgaacgttttcggcgtcgaggcgcgggtgattaatcaggtgctttacggttcgttgaagggcatgtgtgtgcaggacaagcagttcggctggtccgttaatgaaacgactcgcctctcacttgaagcgttggataaacaggacagggctgaataa

SEQ ID NO: 7654 - DNA, 3042 bp, Pseudomonas aeruginosa
atgggattgatggatattttccgctcgctgattggtgagcgggacggagcgctcagtacccagcaaggctttcagtctcagcctgattctaatggcttgaatttctatctgcccttgccggccttcaaggcactgcaagccgggcagggcagtgctttagaaaagattcagctgatagtgctcaacatgctggttgagcaagggattgccgaaaacacggccaacggttttcacatcggtgcagaagatattgccgggatggatttggagcaggccgagatcctgcgcttgccaagacgtctgcccggacgctttctcacttcgattagcgggcgcacgggcaacagtggttttcgtgtggcgatcacgctggaaatgccagacggccctgccagcttcagtcgcaaaggcccctatctgtacctgaccagcagtgagtgctattggctgacgccggctgaaatgatggggttgcaggcttgggaactgcacgagtctttaggcccagagcagcgaggagaggcggcaaatctacgcctgatggccgagctgcagaccgccgcgcgcagcgggatgcgtattgatcttagccactttgagcggctggatgtggtggtgcctcagaacatcggggttatcgctacgcgtttaccagacggcagcctccaactctgcccgagccttggggatggctccagtgttgaccagctggaaaaacgctggtcgcagttggatatgaccgccgatggtggtgtgctgcgcatcgacaatcgtttgttgctgctggatcaggcgcggatggatggcatccgcaatgtgctggctaacaaacgtatcccggctgatcaggtcaacgagtttattgccacgccaacggcgtttctcgatgctgcgctggtcaatctggaggtgggcttctctgcccgggttgcgggtattggcaagcttcagcacatggatttcggtgtgctggacgcaaccaagaatgactggtttgcgctggataaacgtccggcacctgtagcgattctgagcaaactgattcagtctcctgacgatttgcagcgcttcgaggaggtactgcaggcggctaatgaacagggtgcgacgagtttgtcgttcgcgggtgaggtaatcgacatctctgacgcgccggctgttcagcaagagctggccagggctcgccagaacatgactgatgtgagcgatagcgagccgcacagcgaggagggtgttctcccgggggaggacaaggagaaagtcggggtcattctcaaggatgccgacgagattaattctgcgctgttgcgtaaggctgctgctgcgacgccgctggtggtgcctgattggtcggcctatgcccgggagccgttccctcatcagcgtgaggggatcgagtggatgctgaagctgatgggcgcagcgttgcaggatgaaacggatgatctctatcgcctgcagggtggtctgcttgcagatgacatgggcctcggcaagacatacatgtcgctggtcgcagtcggggagtatctggccagtcagcgcgcggctgacaagccgcagaagccggttctggtggtggcgccactgagtctgctggaaaattgggaggatgaagtcggtaagaccttcgccagcattccgttccgcgatgtggtggtgctgcagtcggggcggagtctgcgtgattatcgtgtcaaaggtgctgagcgtgaatcggtgcagttggcgtcgatgattgatgacagtagcggcatgatggatgagcagagcattcgctatgcactgcatgtggggcctgaagcaggcgtgcatcgtctggatatggaccgtcgcttagtgctcacgacctatcagaccctgcgtgattatcagttctccctgtgccgaatcgactggggcatggtcatcttcgacgaggcgcagaacatcaagaaccccaatgcgctgcagactattgccgctaaagggctcaaggcggatttcaaactgttggcgactggcacgccggtggaaaatagcctgggcgatttctggtgcctgatgcatacggtgcagcctggcttacttggtggctgggaaagcttccgcgatacctggatcaagccaattctggctgcaagcgatgaagagcgtgatgaggtacgggcgcgtttgggcgagcagctgcggcgtgctgtaggcatattcatgttgcggcgggttaaagaagatcagctcaaaggcctgccagccaagactattctcagtggtgtcgagcaagccgatcatggcctgcaacggtatgcggcgcagttgggtgtggtgatgaaaggcatccagttgcaggcctacgacgaagtcctcgacagctatcgggctcgtcgtgcaagcgctgaggatatgcgtggtaccgcactggcggctttgactcagcttcgctccatttccctgcacccacggctggagaatgagtcggcgctgtactgcgaggatggcaagcaggcgcgacaactgatgatggagtccggcaagctggcggtgctgcttcagttactcgatgagatccgtagcaagggtgaaaaggtcatcctgttcatgatgaccaagcgcctgcaacgagtcctcaagctctggctggatcagatctatgatctgaatgtagcggtgatcaatggtgacacccaggctgtggcgactcgcgccgaggatatgacgcgcaagaagctaattgccgagtttgaagcgaaaagtggcttcaacatcctgatcatgtcgccagtagccgctggtgtcggtttgacggtgattggggccaaccatgtggtgcatttagagcgtcattggaacccggctaaagaagcgcaagcgtccgatcgggtttaccggatcggccaaaccaagcctgtgttcatccatctgcctgccgtcactcacccccagtacgactcgtttgacgtgcacttggatcgacttctgcggggaaagctgatgttgaaagatgccgttgtcactccagaggcagttgctgagagcgagatgatccaatcaatgggcctttga

SEQ ID NO: 7655 - DNA, 2127 bp, Pseudomonas aeruginosa; identical to SEQ ID NO: 6656

SEQ ID NO: 7656 - DNA, 765 bp, Pseudomonas aeruginosa; identical to SEQ ID NO: 6657

SEQ ID NO: 7657 - DNA, 2013 bp, Pseudomonas aeruginosa; identical to SEQ ID NO: 6689

SEQ ID NO: 7658 - DNA, 3087 bp, Pseudomonas aeruginosa; identical to SEQ ID NO: 6722

SEQ ID NO: 7659 - DNA, 2196 bp, Pseudomonas aeruginosa; identical to SEQ ID NO: 6723

SEQ ID NO: 7660 - DNA, 738 bp, Pseudomonas aeruginosa; identical to SEQ ID NO: 6673

SEQ ID NO: 7661 - DNA, 1644 bp, Pseudomonas aeruginosa; identical to SEQ ID NO: 6674

SEQ ID NO: 7662 - DNA, 3252 bp, Pseudomonas aeruginosa; identical to SEQ ID NO: 6675

SEQ ID NO: 7663 - DNA, 2127 bp, Pseudomonas aeruginosa; identical to SEQ ID NO: 6656

SEQ ID NO: 7664 - DNA, 765 bp, Pseudomonas aeruginosa; identical to SEQ ID NO: 6657

SEQ ID NO: 7665 - DNA, 2013 bp, Pseudomonas aeruginosa; identical to SEQ ID NO: 6689

SEQ ID NO: 7666 - DNA, 3087 bp, Pseudomonas aeruginosa; identical to SEQ ID NO: 6722

SEQ ID NO: 7667 - DNA, 2196 bp, Pseudomonas aeruginosa; identical to SEQ ID NO: 6723

SEQ ID NO: 7668 - DNA, 738 bp, Pseudomonas aeruginosa; identical to SEQ ID NO: 6673

SEQ ID NO: 7669 - DNA, 1644 bp, Pseudomonas aeruginosa; identical to SEQ ID NO: 6674

SEQ ID NO: 7670 - DNA, 3252 bp, Pseudomonas aeruginosa; identical to SEQ ID NO: 6675

SEQ ID NO: 7671 - DNA, 2127 bp, Pseudomonas aeruginosa; identical to SEQ ID NO: 7651

SEQ ID NO: 7672 - DNA, 765 bp, Pseudomonas aeruginosa; identical to SEQ ID NO: 7652

SEQ ID NO: 7673 - DNA, 2166 bp, Pseudomonas aeruginosa; identical to SEQ ID NO: 7653

SEQ ID NO: 7674 - DNA, 3042 bp, Pseudomonas aeruginosa; identical to SEQ ID NO: 7654

SEQ ID NO: 7675 - DNA, 2127 bp, Pseudomonas aeruginosa; identical to SEQ ID NO: 6656

SEQ ID NO: 7676 - DNA, 765 bp, Pseudomonas aeruginosa; identical to SEQ ID NO: 6657

SEQ ID NO: 7677 - DNA, 2013 bp, Pseudomonas aeruginosa; identical to SEQ ID NO: 6689

SEQ ID NO: 7678 - DNA, 3042 bp, Pseudomonas aeruginosa; identical to SEQ ID NO: 6718

SEQ ID NO: 7679 - DNA, 2196 bp, Pseudomonas aeruginosa; identical to SEQ ID NO: 6664

SEQ ID NO: 7680 - DNA, 738 bp, Pseudomonas aeruginosa; identical to SEQ ID NO: 6665

SEQ ID NO: 7681 - DNA, 1677 bp, Pseudomonas aeruginosa; identical to SEQ ID NO: 6685

SEQ ID NO: 7682 - DNA, 3252 bp, Pseudomonas aeruginosa; identical to SEQ ID NO: 6667

SEQ ID NO: 7683 - DNA, 2196 bp, Pseudomonas aeruginosa; identical to SEQ ID NO: 6723

SEQ ID NO: 7684 - DNA, 738 bp, Pseudomonas aeruginosa; identical to SEQ ID NO: 6673

SEQ ID NO: 7685 - DNA, 1644 bp, Pseudomonas aeruginosa; identical to SEQ ID NO: 6674

SEQ ID NO: 7686 - DNA, 3252 bp, Pseudomonas aeruginosa; identical to SEQ ID NO: 6675

SEQ ID NO: 7687 - DNA, 2127 bp, Pseudomonas aeruginosa; identical to SEQ ID NO: 6656

SEQ ID NO: 7688 - DNA, 765 bp, Pseudomonas aeruginosa; identical to SEQ ID NO: 6657

SEQ ID NO: 7689 - DNA, 2013 bp, Pseudomonas aeruginosa; identical to SEQ ID NO: 6689

SEQ ID NO: 7690 - DNA, 3087 bp, Pseudomonas aeruginosa; identical to SEQ ID NO: 6722

SEQ ID NO: 7691 - DNA, 2127 bp, Pseudomonas aeruginosa; identical to SEQ ID NO: 6656

SEQ ID NO: 7692 - DNA, 765 bp, Pseudomonas aeruginosa; identical to SEQ ID NO: 6657

SEQ ID NO: 7693 - DNA, 2013 bp, Pseudomonas aeruginosa; identical to SEQ ID NO: 6689

SEQ ID NO: 7694 - DNA, 3087 bp, Pseudomonas aeruginosa; identical to SEQ ID NO: 6722

SEQ ID NO: 7695 - DNA, 2196 bp, Pseudomonas aeruginosa; identical to SEQ ID NO: 6723

SEQ ID NO: 7696 - DNA, 738 bp, Pseudomonas aeruginosa; identical to SEQ ID NO: 6673

SEQ ID NO: 7697 - DNA, 1644 bp, Pseudomonas aeruginosa; identical to SEQ ID NO: 6674

SEQ ID NO: 7698 - DNA, 3252 bp, Pseudomonas aeruginosa; identical to SEQ ID NO: 6675

SEQ ID NO: 7699 - DNA, 2196 bp, Pseudomonas aeruginosa; identical to SEQ ID NO: 6723

SEQ ID NO: 7700 - DNA, 738 bp, Pseudomonas aeruginosa; identical to SEQ ID NO: 6673

SEQ ID NO: 7701 - DNA, 1644 bp, Pseudomonas aeruginosa; identical to SEQ ID NO: 6674

SEQ ID NO: 7702 - DNA, 3252 bp, Pseudomonas aeruginosa; identical to SEQ ID NO: 6675

SEQ ID NO: 7703 - DNA, 2127 bp, Pseudomonas aeruginosa; identical to SEQ ID NO: 6656

SEQ ID NO: 7704 - DNA, 765 bp, Pseudomonas aeruginosa; identical to SEQ ID NO: 6657

SEQ ID NO: 7705 - DNA, 2013 bp, Pseudomonas aeruginosa; identical to SEQ ID NO: 6689

SEQ ID NO: 7706 - DNA, 3087 bp, Pseudomonas aeruginosa; identical to SEQ ID NO: 6722

SEQ ID NO: 7707 - DNA, 2196 bp, Pseudomonas aeruginosa; identical to SEQ ID NO: 6723

SEQ ID NO: 7708 - DNA, 738 bp, Pseudomonas aeruginosa; identical to SEQ ID NO: 6673

SEQ ID NO: 7709 - DNA, 1644 bp, Pseudomonas aeruginosa; identical to SEQ ID NO: 6674

SEQ ID NO: 7710 - DNA, 3252 bp, Pseudomonas aeruginosa; identical to SEQ ID NO: 6675

SEQ ID NO: 7711 - DNA, 2127 bp, Pseudomonas aeruginosa; identical to SEQ ID NO: 6656

SEQ ID NO: 7712 - DNA, 765 bp, Pseudomonas aeruginosa; identical to SEQ ID NO: 6657

SEQ ID NO: 7713 - DNA, 2013 bp, Pseudomonas aeruginosa; identical to SEQ ID NO: 6689

SEQ ID NO: 7714 - DNA, 3087 bp, Pseudomonas aeruginosa; identical to SEQ ID NO: 6722

SEQ ID NO: 7715 - DNA, 2196 bp, Pseudomonas aeruginosa; identical to SEQ ID NO: 6723

SEQ ID NO: 7716 - DNA, 738 bp, Pseudomonas aeruginosa; identical to SEQ ID NO: 6673

SEQ ID NO: 7717 - DNA, 1644 bp, Pseudomonas aeruginosa; identical to SEQ ID NO: 6674

SEQ ID NO: 7718 - DNA, 3252 bp, Pseudomonas aeruginosa; identical to SEQ ID NO: 6675

SEQ ID NO: 7719 - DNA, 2127 bp, Pseudomonas aeruginosa; identical to SEQ ID NO: 6656

SEQ ID NO: 7720 - DNA, 765 bp, Pseudomonas aeruginosa; identical to SEQ ID NO: 6657

SEQ ID NO: 7721 - DNA, 2013 bp, Pseudomonas aeruginosa; identical to SEQ ID NO: 6689

SEQ ID NO: 7722 - DNA, 3087 bp, Pseudomonas aeruginosa; identical to SEQ ID NO: 6722

SEQ ID NO: 7723 - DNA, 2127 bp, Pseudomonas aeruginosa; identical to SEQ ID NO: 6656

SEQ ID NO: 7724 - DNA, 765 bp, Pseudomonas aeruginosa; identical to SEQ ID NO: 6657

SEQ ID NO: 7725 - DNA, 2013 bp, Pseudomonas aeruginosa; identical to SEQ ID NO: 6689

SEQ ID NO: 7726 - DNA, 3087 bp, Pseudomonas aeruginosa; identical to SEQ ID NO: 6722

SEQ ID NO: 7727 - DNA, 2196 bp, Pseudomonas aeruginosa; identical to SEQ ID NO: 6723

SEQ ID NO: 7728 - DNA, 738 bp, Pseudomonas aeruginosa; identical to SEQ ID NO: 6673

SEQ ID NO: 7729 - DNA, 1644 bp, Pseudomonas aeruginosa; identical to SEQ ID NO: 6674

SEQ ID NO: 7730 - DNA, 3252 bp, Pseudomonas aeruginosa; identical to SEQ ID NO: 6675

SEQ ID NO: 7731 - DNA, 2127 bp, Pseudomonas aeruginosa; identical to SEQ ID NO: 6656

SEQ ID NO: 7732 - DNA, 765 bp, Pseudomonas aeruginosa; identical to SEQ ID NO: 6657

SEQ ID NO: 7733 - DNA, 2013 bp, Pseudomonas aeruginosa; identical to SEQ ID NO: 6689

SEQ ID NO: 7734 - DNA, 3087 bp, Pseudomonas aeruginosa; identical to SEQ ID NO: 6722

SEQ ID NO: 7735 - DNA, 2196 bp, Pseudomonas aeruginosa; identical to SEQ ID NO: 6723

SEQ ID NO: 7736 - DNA, 738 bp, Pseudomonas aeruginosa; identical to SEQ ID NO: 6673

SEQ ID NO: 7737 - DNA, 1644 bp, Pseudomonas aeruginosa; identical to SEQ ID NO: 6674

SEQ ID NO: 7738 - DNA, 3252 bp, Pseudomonas aeruginosa; identical to SEQ ID NO: 6675

SEQ ID NO: 7739 - DNA, 2127 bp, Pseudomonas aeruginosa; identical to SEQ ID NO: 6656

SEQ ID NO: 7740 - DNA, 765 bp, Pseudomonas aeruginosa; identical to SEQ ID NO: 6657

SEQ ID NO: 7741 - DNA, 2013 bp, Pseudomonas aeruginosa
gtgaagctgcctcctgttcacatgccggtcgctgaatgggcgcccgtggtgcgggagcgatggacggtgctggtcgaaaaggtcgctcgaatgaaggccgcaagtggcaagagtgacgcctttgaagccatgttggcacgattgcgtgacatggcgagtacagggcgttttgacggcctgcctgagctgctaaaacgtcgtcttactgcgcgtgcgttgacctggttgtggctcaacgacgagaccatgggtaggcgtttgcttagttcgcgtctgctttcggtgctggtcgatgctcagcagccgaggctgacgcgtatcaccttacagcagttggctcagttctactttcgtcgcttcgacaagctggatgagcacgatgggctgcgtaagcagcttgagcagattttgctccagcaactgcatttactgcccgaacccaaagtaagtggcccccaggctgatccgctggtaacgctcaagcgtgatgctcattggttgttgccgcctgacgggccagtccaactggttgagcgggtacgcgacagtggccatgagctgggcgagacctttgaggtcatgggattgcagggctttgatgacgggcgttatggcgatatctgccgggtccacttctacctggaaaccctacgagggcttgcgcccggtgagtacgaccccgtgctggatgagctgcagaagcccgctgtgtccaaggctccgtacgagggcgagcgtcgtatcggccatgttgcgctggagattctgatcgatcgtgctggacaggagccgggtgaggtctggcagaactttattctgaatctggcgggggatccgcggatctcacgtaactcccccaattaccgcgagtggtggcagttcctcggtgaggagcgggtgcagaaggttcggggctggttgtccaaggaagatttgcggctgtttttgcaggcggtggaacagtttggaatcgaaacgcagaacgacgatctgcagcgcatgttccctgcacgcaagcagttcctagaggggctgtttaagctcaaactgatccgcaatacccgcttgctgcttggcgggcgggcacagcattcggtaaagcgcattctcggtaaagatgtgcaaaccagttttgccagcatggacgggcagatgaatgacaaggcggtcatctatctcgattgcggagactttcatctggtcgagggttcccacagttttaaaatctgggtctatctcgccgcgccgggagaggctttgcgttcctacgagcgctccagcttcagtcattccgatctgactacggctgttcctaaggcctacaagcgactgtatcctgagttgccctatgatgccttcacgcatcacccccctctttcctggcagaaccgggtattcagcttcctggctgataacggcatcgctctagatatcgagcagttgctcaatcgcagtgactaccagccttaccttcgtaaatttggtatgcctgtggtcaatgccaagcgaacacccgtgccgcctccaagtcagacagattttcccgcagagccggcgcgttcacgtgttggcaagactggcgcgacaacgatgtcagcgcctcaggggcgtaagcctgcagagatgattgcgagggactccagagctattcctagagaagaggcggccacagtacggcgaagcaaccagcagcatgatccggtagtgtcgcactccgtcagttcacctgatgcggctgctcctgcaacggcacgtccgtctctggtaggtgaaggattattgacaggcttgaaaccctctgcactgaagatactgcgctacttcgtggacaaccccggtgacaaagtccgatatgcagcgaatgttttcggtgtggactcgcgtgaaatcaatcagattttgtatggcccgttgaaggacatgtgcacgcgtgatgagcagttcggctggacggtgaatgaggcggcacgtctcgcgcttgaggcgttggatgaacaggacagggctgaataa

SEQ ID NO: 7742 - DNA, 3087 bp, Pseudomonas aeruginosa; identical to SEQ ID NO: 6722

SEQ ID NO: 7743 - DNA, 2196 bp, Pseudomonas aeruginosa; identical to SEQ ID NO: 6723

SEQ ID NO: 7744 - DNA, 738 bp, Pseudomonas aeruginosa; identical to SEQ ID NO: 6673

SEQ ID NO: 7745 - DNA, 1644 bp, Pseudomonas aeruginosa; identical to SEQ ID NO: 6674

SEQ ID NO: 7746 - DNA, 3252 bp, Pseudomonas aeruginosa; identical to SEQ ID NO: 6675

SEQ ID NO: 7747 - DNA, 2127 bp, Pseudomonas aeruginosa; identical to SEQ ID NO: 6656

SEQ ID NO: 7748 - DNA, 765 bp, Pseudomonas aeruginosa; identical to SEQ ID NO: 6657

SEQ ID NO: 7749 - DNA, 2013 bp, Pseudomonas aeruginosa; identical to SEQ ID NO: 6689

SEQ ID NO: 7750 - DNA, 3087 bp, Pseudomonas aeruginosa; identical to SEQ ID NO: 6722

SEQ ID NO: 7751 - DNA, 2127 bp, Pseudomonas aeruginosa; identical to SEQ ID NO: 6656

SEQ ID NO: 7752 - DNA, 765 bp, Pseudomonas aeruginosa; identical to SEQ ID NO: 6657

SEQ ID NO: 7753 - DNA, 2013 bp, Pseudomonas aeruginosa; identical to SEQ ID NO: 6689

SEQ ID NO: 7754 - DNA, 3087 bp, Pseudomonas aeruginosa; identical to SEQ ID NO: 6722

SEQ ID NO: 7755 - DNA, 2196 bp, Pseudomonas aeruginosa; identical to SEQ ID NO: 6723

SEQ ID NO: 7756 - DNA, 738 bp, Pseudomonas aeruginosa; identical to SEQ ID NO: 6673

SEQ ID NO: 7757 - DNA, 1644 bp, Pseudomonas aeruginosa; identical to SEQ ID NO: 6674

SEQ ID NO: 7758 - DNA, 3252 bp, Pseudomonas aeruginosa; identical to SEQ ID NO: 6675

SEQ ID NO: 7759 - DNA, 2127 bp, Pseudomonas aeruginosa; identical to SEQ ID NO: 6656

SEQ ID NO: 7760 - DNA, 765 bp, Pseudomonas aeruginosa; identical to SEQ ID NO: 6657

SEQ ID NO: 7761 - DNA, 2013 bp, Pseudomonas aeruginosa; identical to SEQ ID NO: 6689

SEQ ID NO: 7762 - DNA, 3087 bp, Pseudomonas aeruginosa; identical to SEQ ID NO: 6722

SEQ ID NO: 7763 - DNA, 2196 bp, Pseudomonas aeruginosa; identical to SEQ ID NO: 6723

SEQ ID NO: 7764 - DNA, 738 bp, Pseudomonas aeruginosa; identical to SEQ ID NO: 6673

SEQ ID NO: 7765 - DNA, 1644 bp, Pseudomonas aeruginosa; identical to SEQ ID NO: 6674

SEQ ID NO: 7766 - DNA, 3252 bp, Pseudomonas aeruginosa; identical to SEQ ID NO: 6675

SEQ ID NO: 7767 - DNA, 2349 bp, Pseudomonas aeruginosa
atcatggaatttctatatcacctgttgcccaatttttccttactgaaaggcggtagcacggaagcgctgggcgtcatcttttggttggtcatggcaacgctatttggctattcgctagtttcgttggtgatgagcagcatccgctttagggtacgggttcgtgccttgaacagcttggtcacggggcagaaccgcgaaaacctggcattaagccgtcgagagatattgcaaaaagccctatcgctcaaggaccaacgaattggtgcgctatggcgggagttcgatgacagcttggttagctccagcgaccataagcagctctttaatactttggatgccgagcatttctttaatgtgcgaactcttgcgcatggtctgagcggaagtcgctttttcagttctttgccagggttgctggttggattgggcgtgttagccacattcgtaggcctaaccatcggtttatcgaagttgaaactagatagcactgcaggcgtggatcagttgcgggagggtatctccgttatgatccaaggggcggcggttgccttcatggcatcggtgtggggggtaggtttcagcctaatactaaatctaattgagaagattgctgagcgctgggcgcttgggcgcgtgcaggatttacaacatcgcattgacacgctgtatccactgatccctgctgagcagtcgctggttcacattgctgactacagtcgggaaagcaaggaagcactgcaagagctccacgaacgcataggtgaccgccttcaggaaagcttggtaggcatgaacgaggctatgcaggcggcccttacggatgctttgaacaacattatggctccggccatccagacactcgtcagcacgaccagccagcaatctacacaagtgctagagcggctggtaagcaatttcactgatggcctcacgtcggcagggcgtgagcagggcagtctgatgcagcaagccgctgccgatgtgaatgctgcagtcggtggaatgaccgaccgcttgaatcagctgttccagactctgagcgatcagcaagggcgacagcaggaggcggccagacagcaaagcggcgagtttcaggcccagatggagcggatttcttcttcagcagatcagcgccaacaacaattggagtcacgtttcagtgagctgttgagcggattgactggccagctggatacgcagcttggctccgcgcagcggcgggatgaagagcgtcaggcgctttttgagcgcactttggttgaggcaggggcgagccaatctgcgttgttagagaagttcgccagcgcaagcagtgaacagcttcaggctatggcagaggctggaaacgagcggcatggcaatctggagaaagtcttctcccggttaatgatgacactgaactcccaactggattcgcagatgggggctgctgagaaaagagaacaagatcgagccttgcgccatgatcagcagcaggctgcggtattggcgcagcaacagcagttaattggcagccttgggcagaccagccagcagcagatcggtgcaattgctgaagcggcggctgcacagcaacgtgctttggaggagtcagttagcaagctgctcggtaacttcaatgagcagatgtcgggccatggccagcaagctgagcagcgtgaacattctcgccagcaacgcttcaacgagcagctggaaagcatggcggcgcagcagcatgctctgctggaaggcatcgccacagctgtacaagcaacccagcagcaaagtcgccaaatggctgagcagcatcagcaactgatggggcgtttgcagcaagccagcgatgcggccgctactagtagccggcacatggacagcagtgccaaccagctcggattgctctcaaccaatgttcgtcaggcagcagagcttcttggtcagcggttagaaagcgtgacgcagcgtattgagtctgctggtgagcagaatgctgagctcgcaggccaactgcggcaacaagctaccgctttggcgcaacttcaaggtgcgttgttggacggcgctcagcgcttcgagcaggccgccgcggaagcgcgcagcggatttggcgagatgagatctcatcagcaagagttcctaaccggagtgcgtggtgagttcactgcgctgggagaggcgctgcgcagtcaagtgcagggggtcgagcagcaagctgagcaatggctgcgtagctactccaccgaagtacgcgaccaggtgcatgagcgcatggaccagtggaacaaggaaaccctgagctttgctggccagatgcatgccgcagtgcaggcgatcagtaacgtggtcgacgagctggaggcgcgctaa

SEQ ID NO: 7768 - DNA, 744 bp, Pseudomonas aeruginosa; identical to SEQ ID NO: 6736

SEQ ID NO: 7769 - DNA, 2172 bp, Pseudomonas aeruginosa; identical to SEQ ID NO: 6737

SEQ ID NO: 7770 - DNA, 2895 bp, Pseudomonas aeruginosa
atgcaattgactctagcccctgctcccggcgcgcgcgcagtgatccgcgacgaagagtggatcatccagaacgctgatcagtgcaacctgggcggctggcagctctcctgcattggtgtgtcggagaccgtgcgcaatcgccacgcactattcctcaccgagctggaagacgttacgttgatcgatccggcgaagacggagctgatctacgacgattcgccaaccttcacggcgtcgcgcttgtttatcgaggctcgcctgcgtcagtctgcattgcagagcgattctgtcgtgattggtcaccatgcggtcatggatgcgctgcctttccagttgcagccggcgcaccgagtgctcgagcaactgcgtccgcgattgctgatcgctgatacggtgggcctgggtaagacccttgaagcgggcatcctcactactgaattgatgcgtcggggcaaagctcgccgcattctcgtggtcacgaccaagagcatgatgcgccagttccagcaggagttctggagccgctttaccatcccgcttactcgcctggactcggccggtattcagcgtattcgtcgcgaaatcccgaccaaccacaacccgttcaactactacgaccgtaccatcatctcggttgataccctcaaacgtgatagcgagtaccgccattacctagagaaagcttggtgggacctgatcatcatcgacgaggcacacaacgtctcctacaagggcaaccgtacccagagcaaccgcctggctgagttgctgtcgcagcgttcagatgcgctgattctgcttacggctaccccgcacaatggtaagaaggacagtttcgccagtctgatgcgcatgcttgaccccaccgtgctgccgatgggggcggactacacccgtgaagacgttcagcatctgtttgtgcgtcgctttaagaaagacgtacgcgagcagatgaagcaggacttccctgagcgcgaagtcttccgtctggcttcagccgcaagcccggccgagaaccttgccttcgatgccctggccgaactcaagctcaacagcgatggcagtggcgcccgcgatggagccatgctattccgcaccgtcctggaaaaggccctgttctcctcgccagcggcctgcctgcaatccctcaaagaacgcatccgcaggctagagggcaaggaccctcagcatccggatctcgagggcctgcgcgatcttcagggtttggtacaggctatcgggccgcagcagttcagcaagtttcaatatttgatcgagcaattgcgcggcggccaacattggcgttgggacggccgcgaccctagcgaccgcctggtgatattcacggagcgcgttgagaccctgaagtttctccaacaggaactgcctaaggcgctgggtctaaaagacgaggccgtcgcaatcctccatggccaactgccggatcaggagatccagcagactgttgaagacttcggcaagacccactcgccgcttcgcctattgattgcctcggatgtggcttccgaaggcctcaacctgcactaccaggcccatcgcctgatccacttcgatatttcctggtcgctgatggtcttccagcagcgcaatggtcgtgtcgatcgctatggccagacccgagcacctaagatcggttacctgctcaccgagccgcggcacgagcgcattcgtggtgacttgcgttatctggaaatcctcatcgacaaggacgagcaggccgccaagaacatcggtgatccttcggccttcatgggcttgtatgacgaagaggcggaaaccattgaggtagccaaggccatcgagggcagcgctactgtggagggcttcgaggcgctgctagcgggtgatgatgttgaccccttcgaagcactctggacgagcactgcacaggaggctgctcaagccagccaacccatggccagtgtgcatgccagcactgcggctatcactgcccccacttgtgagctaccgagcctgttcaatgacagctaccgctacttgcgtgatgcgctgcgtctgttggctgggcaatcgccaagcgagtactcaccggtcaaatacgacgacgccaacaagaccctgagcttccagcccagtcgtgatctggagcagctgctcaagcgtgatctggccagcgagatgtggccggaagacaacaccttcgccctgagtgccgatagaacggtggtcgagtcaggcgtccgccaagcccgcgacaccaacgcctggccgcagcttcactacctctgggcgctgcacccgattgctcagtggctcgactacaagctgatggccctgttcggtcgccagcgcgccccgttgctgcgggtggcacaaggcctgaatgtcggcgaggccattgtgctggtgctggcgcaggtgcccaaccggcgtggccaggcggtgctcgccgagtggatgggcgtgcaactcaatgccgccgggcaggtacagggcgtgctcagtctggaggatgccctgcagcgcactggtctcgccggcaacctcggcagcggcgccaacattcgtgccaacgatggcaacgccccggatgcccgcaccctgcaagcggcattgccggctgtgattgaggctgcccagcagcacatcaggccgatcaagcaggccttcgataccgactgccgagcacggctggatcgagagctgagcaagctgaaaacccttcaggacaaacacaccgtccagctggagctggatttcgccaagggcatcgagcaggtcaacgcggccaagcgcaggcaaaaggaaagcgacaccgccgagctgttcaacaactaccagcaatggattcgcgacaccctgcaactggacgaccgcgcccagttcaccgtggtcgcggccctgatggcgtaa

SEQ ID NO: 7771 - DNA, 2349 bp, Pseudomonas aeruginosa; identical to SEQ ID NO: 7767

SEQ ID NO: 7772 - DNA, 744 bp, Pseudomonas aeruginosa; identical to SEQ ID NO: 6736

SEQ ID NO: 7773 - DNA, 2172 bp, Pseudomonas aeruginosa; identical to SEQ ID NO: 6737

SEQ ID NO: 7774 - DNA, 3030 bp, Pseudomonas aeruginosa; identical to SEQ ID NO: 6738

SEQ ID NO: 7775 - DNA, 2196 bp, Pseudomonas aeruginosa
atggactattcgaagtggttggacctttgggataaggcaacacccgagcagctgattgctcccgtgttcgtatttagtctggtgacggtgctgtgcctttggtacttgctgcgttacttcctgcgctcatttgcattgagtcggcgcttgaagaagctcacgcggcaggtgcgggcaatcaaggagctgcagccggccaagcgccgtagcgagctggagcagctgttccaggagcatacgctggggcatgcctggcaggagtatgccgagacgctgcatgatcagttcgaggtgcgcgagggtgagcagcgcatgctgtgctcccgtgccacggcgggcgcgggacatttcttcaccgcgcaaacggtggtggagacgccgctggggaccgagttttacaagcacctgccgggcatcctgacggggatcgggattgtcggcaccttcttcggcttgatgctgggcctgcagcacttcgaccccagcacacccgagcaggtcagctccagcgtcgatcagctgctcaaagatgtgctgtttgccttcctcggttccttcttctcgatcttcgcttcgattggcgtgaccttgactgagaagtggcgcctgggccgctgttacaagcacctggaggccctgacggaaagtatcgacggcctgttcggcagcggggtaggtgaggagtatctggcagaactggtgaagtcgagcaacgaaagctcgatccagactcgtcagctcaaagacagtctggttaccgacctgcgcgagatgctgcagaacctggtggatacccaggtgcgtgagaatctcaagttagcagataccctttcggcaagttaccgcgactctggtcaggtgctggcccagcagattggcggtgccatcgaaaacagcctgaagtctcccctggaggccatcgccggagccgtgaataccgccagtggcgaccagagcaaccaggtgcagagcctactcaccgatgtgctcacagcctttatgagcaagctggagagtacctttggccagcagttcaacggtttgcacgagatgctggggcggtcggtagcggccatgcaatccatgcaacagggcttcaatgaactggtcggcgacatgcgctcggccagcgaggcttcatcgcacaacagcgccaagatgatcgcgcagctgctggccgatatgcaggccgggcaaaacagcatgcaggccgggatgaacgagatgctggccaatctgcagacgtccatagcgcgtatcggcagtgaaggtgagggggctggtgagcggatggccaagcagttggagaagctgttcgccgatagcgaagcgcgtcagcaagccatggcggcaaatctgcaggcctttgtcgaatccatgcagcagagcatgggccagggccagcaggagaccatggccaagatcgccagctcggtggatgtgctgggcgagcagttgggcggcctgttcaagcagcttgagcataaccgtacgcagatggatcaggccagcaaggtcgcccaggtcgaactgcaccgtggtacgcgcgagatggttggcgggctggaagagcaggtgaaaaccctgctggatgccgtcgccgatcagcaaggcgcgatgcaggacagcctcaaactgctgggggcgcaaaccgagcaacacctgcagagcatgcaacaaggcgccgagaagatgcgcctggcagccgagcgcttcgacagcgccggacagagcgtgagtaaagccggcgaggcgactgcgggcgttctgggtgcgctgcagggcacgagcggcgatctggtcggcgcttcccgcgagctgaccagtgtggtggccgactatcgcaataaccgtgaagctctgaatcagacgcttgcggtcattcaaggtgtggtcgccactactcagggtgagtccgcggggcgtagccaatacttgcaggatctgaagcagcaaggcgagcggctgcaggcgctgaatcgtgaagtgaacgactatctggagcagatcagcgcagtgctgggcaagggcttcaacgagtttagcgagggggtagatcgtagcctgcggcagacgctgggtagcctggatgccgagctgcacaaggcgatgaccagcctggccggtggtgtcgaaggggttaaggaaagcctggaagacttcagtgacatcatggagcgcgttcagcgccgctga

SEQ ID NO: 7776 - DNA, 738 bp, Pseudomonas aeruginosa; identical to SEQ ID NO: 6732

SEQ ID NO: 7777 - DNA, 1677 bp, Pseudomonas aeruginosa
atgaaccgagcactgtcgtctctgtcggcggccatcgcttcgggcctagagcgccagagtgagcgcagcggcgatgtagggctcagtgccttgccctcgctaaagcgcgccagcaccgagctttctcggcgctttgatcaggtcgagaaagccctggcaccgccccgtgagaaacgcttgctggcacttggcaagttcaagcgcgagcaggcgctgacttcatcggagtggcgcctggttttcgccgggctggccgatgacgatgaagtcagtgttcctgtgctggaagacgatcagctgtttgatcgtgttcatcgggaggtggctggccgcatcgagcagcggtcactcagtcgccgcgactggctggcactgtgtttcagctactttgcctacgatgagcacaagcccgacgacaacgtgaactggcgggtgctgcgtgacgatattgatcgtggcttcgatgctgtcaggcagcgtattggtcgcgagaaagagtggatgcgcattgtagctgagcatcgcgaactgttcggagctcaggctggaactcgtctagcggaggagatattcgagggcagggcgcgtgacctttcctctctgcaggccattgcccaggtgccggatggtagttggttgtggcagcggatttttgcggttctgctctcacgcattttcctgctggatgacgaaaccttcctaaagcgcctgccggaattggtagctctggggcagctgaatacgcgttatctcaatcgggtgctgagtgcctgcctgactcgttatcaccgttcgcgatatcacgagcagtcgtcctcgctactcaagcaagctgcgttggagcactggggtagcccacagatgcgttccaagcagaacgcctggttgcaatatgtggagcagcctgtctgcgccatggtggtggcctggttcgccaaggaagatctggagcacttcttcaccttgctcaagggcgaggcggaggttgaccagtcgcgcctgttctactggctgcgctttgccaatcaaatgagctatacgcggattgtgatgggtggcgatgcgtggcatgaccggggtagtgatttcgtggccttccgcgagaaaaacaaagggcgtttgagtcagcttaccggtgggccgagtcacaacaacgcggtggtgatgcagataggcaactacttttttgtcgagttctccggtaccggcaatgcgtgctacgtctatcgtgctgatgccgctccattcaatcctgacaaacaggtgctggggctggcaactgagctgaagcagcaaggacgggcgctgaagcgtatgtcccactctccagccccgcggcgacccaatgtggtcgaagggtggctggataagtttgatgacgagctccgagcgctgggaatcgtcgcgcagcgtccggcgtcatatacgcaaccccgcgtttctgaagacaagcccgccgcccatagtgctgcgtatgcatctgtcgcgggtgactcgctcgacgttcaggttaagtccatgttgggcagtgtgccctataagacgttcgaccaccgctcgactagcggggtctaccaggttttgcttgccagggatgatgcggctgccaaaacagcgctgctgcgcctcggcttcaaggctgtgaaaaacaatgcactcatgttctggaggctttga

SEQ ID NO: 7778 - DNA, 3249 bp, Pseudomonas aeruginosa; identical to SEQ ID NO: 6734

SEQ ID NO: 7779 - DNA, 2196 bp, Pseudomonas aeruginosa; identical to SEQ ID NO: 6723

SEQ ID NO: 7780 - DNA, 738 bp, Pseudomonas aeruginosa; identical to SEQ ID NO: 6673

SEQ ID NO: 7781 - DNA, 1644 bp, Pseudomonas aeruginosa; identical to SEQ ID NO: 6674

SEQ ID NO: 7782 - DNA, 3252 bp, Pseudomonas aeruginosa; identical to SEQ ID NO: 6675

SEQ ID NO: 7783 - DNA, 2127 bp, Pseudomonas aeruginosa; identical to SEQ ID NO: 6656

SEQ ID NO: 7784 - DNA, 765 bp, Pseudomonas aeruginosa; identical to SEQ ID NO: 6657

SEQ ID NO: 7785 - DNA, 2013 bp, Pseudomonas aeruginosa; identical to SEQ ID NO: 6689

SEQ ID NO: 7786 - DNA, 3042 bp, Pseudomonas aeruginosa; identical to SEQ ID NO: 6718

SEQ ID NO: 7787 - DNA, 2196 bp, Pseudomonas aeruginosa; identical to SEQ ID NO: 6723

SEQ ID NO: 7788 - DNA, 738 bp, Pseudomonas aeruginosa; identical to SEQ ID NO: 6673

SEQ ID NO: 7789 - DNA, 1644 bp, Pseudomonas aeruginosa; identical to SEQ ID NO: 6674

SEQ ID NO: 7790 - DNA, 2127 bp, Pseudomonas aeruginosa; identical to SEQ ID NO: 7651

SEQ ID NO: 7791 - DNA, 765 bp, Pseudomonas aeruginosa; identical to SEQ ID NO: 7652

SEQ ID NO: 7792 - DNA, 3042 bp, Pseudomonas aeruginosa; identical to SEQ ID NO: 7654

SEQ ID NO: 7793 - DNA, 2127 bp, Pseudomonas aeruginosa; identical to SEQ ID NO: 6656

SEQ ID NO: 7794 - DNA, 765 bp, Pseudomonas aeruginosa; identical to SEQ ID NO: 6657

SEQ ID NO: 7795 - DNA, 2013 bp, Pseudomonas aeruginosa; identical to SEQ ID NO: 6689

SEQ ID NO: 7796 - DNA, 3042 bp, Pseudomonas aeruginosa; identical to SEQ ID NO: 6718

SEQ ID NO: 7797 - DNA, 2127 bp, Pseudomonas aeruginosa; identical to SEQ ID NO: 6656

SEQ ID NO: 7798 - DNA, 765 bp, Pseudomonas aeruginosa; identical to SEQ ID NO: 6657

SEQ ID NO: 7799 - DNA, 2013 bp, Pseudomonas aeruginosa; identical to SEQ ID NO: 6689

SEQ ID NO: 7800 - DNA, 3087 bp, Pseudomonas aeruginosa; identical to SEQ ID NO: 6722

SEQ ID NO: 7801 - DNA, 2013 bp, Burkholderia cepacia
atgccaagcatgaatctgagtgagcttgcagcggagtattggcacatcggcgtggtcgcgctggtcttggtctgtctatcgctggactttctagtcaggtttttcatccggtcgtttaagctgaggcgcgatctcgatgacgcgatcgaggcgttgcaggcgattcgtggcgagaagaacggggagcttgtcgaactctccgcggtcgagaccaaggcgatgaagtccgaagctttgtccaacccgtggaccgaatatgccaagacgcttcacaagcagcttggcgatgaggacgagctggggcagcaacgcatcaggtgctggcgctcgacagcgttggccgagacttttttcacggatcaggcaatcgtcgacagtcgcttgaagacggacttcttcaagcatctccccggggtgctcacgggcctggggatcatcggaaccttcctcggcctcatcaagggtctcgtgcatttcgatgtgagcgtcgacccggcggcggcccaagctcagctccaagggttggtgagttcggtgggacatgccttctatgtctcggcattcgccatcggcctagccatgttgattacttggatcgagaagacgatcgtcacggtttgttatggccaagtcgaggacattcgcgaactggtcgatagcatgttcaggggcggggcgggagaggaatacctgcaacagctcgcgaagtcgtcccaagacgcggcgacccaagctcagcaaatgcgcgactcgctggtagtcgatctcaaagagatcctcacgacgttgaccgaacggcagattgcggcccaagcccagtacacaggccagatgtctgtcgacgtggccaaagtcatttcagaatcgctggccagtcccatgtccgcgatggccgaggctgtccagaaggtcagcggtagtcagggagacgctgtcaacaagctgttgaccgacgtgttggcgagcttctctgagcaaatgcaggagatgtttggcggccagatgcgcggcatgagcgatctgttgcaaaaggccagtgaatcgatgcaggccacggcgattcaattcggacagcttgcggcgaacatggacgccgccggtaacaatacggtggactcgatgggcgagaagctcgcccaagcgctcgatgcgatggacgtccggcagtcggcgatgaacgctcggatgggagaattcatcgagcagattcgctcgttggtcgcgcagtctcagtccgagaccggtgaaaagctacgagaggcgttggcggcggtcgggactcaggtcgcgggcgtggtcgagacgctgcgaaagcaggctgaggaggccgctgagtcgcaaggccaacgcgcccggcggttcgaggagtcgactggccaggcgatcaactcgctctccggccaagttgagcaactgctctcgcagtccgtggagaccaacaagtccttgcagacgtccgtatcggctttggccggcgcgacagaccgggcgatggctagcctcaattcgggggtggaaaccctctatgtcgcagccagcgacttcgcgaaagccggttcaggagtgtccgagacgatgcgctcggcctccacggccaccgattcgatcaagacggcctccgcgcagctctcgacggccactgacaacgccagggggatcttcgccgactacgcacgcacgcgcgacacattcgccacgatggtcgcggagctgcggcagaccttcgagtcggccaagaaggatgctgcaatgacttcggagctcgttggtaagatccaggcagcggcccgcgaactcgcagcggcccagcagcagtcagaggactatctcaaaggcgtgaccgaggtcctcgtgggtgcgcacgaatccttccgcgacaacattgacagaacgctgggtgagggcaatcgcaagttccagtctgagctatcgaacgccgtcaacctactgtccggagcgatcaagaatttgggcgatgcggttgatgagattccggccggtcgagggcgataa

SEQ ID NO: 7802 - DNA, 396 bp, Burkholderia cepacia
atgtttggtccgaaatcatctaggcggcgcaatggcagggacgaaggggagaagcccttctggatttccttttccgatttgatgacggcacttatggtgctgttcctcgtgtcgatggcagtcgccctgatcgccatcacgcagaagcaaaaggtcattgacgacacgatcgaattgcgcaagaagaccatcgcgcaatgcctgaccgaagtcgaagatgttaccaagcgccctgagttcaagggggtgacggtgcacggcaactcgatcgacttcggcgcagtcgttctgttcgccgatcagcaccactcgttcgagaggtcggccgacgagcgctttattcgcagcttcgtccccgaggtgttgaaggtggctctgacctgcccccatcaatag

SEQ ID NO: 7803 - DNA, 1611 bp, Burkholderia cepacia
gtggtgctgacgacctatgagacattgcgcgacctggaattctccttagctgcgcagaagtggtcggtcatggtttgcgacgaggcccaaaagatcaagaaccccaacgcgatggtgacgcgggccgccaagaagcagaacgccagactgaagatcgcatgcaccggcacgcccgtcgagaacacgttggctgatctgtggtgcctattcgattttgtgcagcctggcttgctaggttcgttgaaggacttcggcagcaaataccgcaggcccatcgaggtggagaccgacgacgagaaggcgcgcattgaagagctgcgcggccttatcgagccacagaagctgcgtcgcaccaaagccgaggtcgcgaaggacctgcctaagaagatcttgcatgagggctgtcgcaagctgccgctttccgctcgccagcgggcgctctacgcggatgcggtggctcagttcaaatcacgtgggcaagggcagggtagtgggctgcaatcgcctttaggtctgctgcaatacctgcgccgcctttgctctgatccgcggcctcccggtcatattgccaccagcgatgaatccgtcgagaccatcaagaaggcgtcgcccaagatggactggatgctgcggcggctcagggaaatcgaggcgtcgggatctggcgacaaggtcatcgtcttctgcgagttccgggacttacagcgcgtcattcaacgcgccatatctgaggtgttcggattcgtgccagacgtgatcaacggtgatacctcgaccgaatccggggccgcaagtagtcgccaaacccgtataacggcttatcagcaaaatcctggtttcggcgtgatcattctttcccctcttgcagtcggcttcggagtcaacatccaggctgccaatcatgtcattcactacacgcgcacatggaaccccgcgaaggaagaccaagccactgaccgcgcgtatcgaattgggcagcaaaaggatgtgtacgtctactaccccgttgtggttggcggcgacttcgtgactttcgacgagaagctggacgtgttgcttgaacggaagcgcgcgctgtcctatgacatgctgaatggggtcggcgatgtgaccccatctgacttcgctgacatcgaagcgccgggtggtggttcgccatttggcgaagatctctttaatcctgtcgatgtcggttccttgggaccggatgcattcgagtccttttgcgcgttgctgtggagcaagcaaggttactcgcgaacaatcaagacgccgaagacgggggatggcggtgtggacatcgttgcaatcaaaggcaatcgtggcgcgctcatccaatgcaagagctctggtgtcgagggtaaggagatgggctgggaggctgtcaaggatgtcgcggccggttccgtggcctattccgcgcgctacccgggcgtcgagttccaactcattgcagccaccaatcgccggttcaatcaatcggcccgacagcaagcgtcactgctgaacgtgacgttgatcgaagggagtgatctagtcgatttactttcgaagcacccgactaagagaggtgaattcgatcgcttcgcaatggctggctggtcgcagtga

SEQ ID NO: 7804 - DNA, 2013 bp, Burkholderia cepacia
atgccaggcgctaatctgggggaactcgtatcggaatattggcacatcggcctggtcgcgctggtcttggcctggctatcgctagacttcctaatcaagtttgtcgtccggtcgttcaagctgaggcgcgacctcgaaggggccatcgtggccttgcgcgcgattcgaagcgaaaaaaagggcgagcttatcgaactctccgaggtcgagtccaaagcgatgaagtccgaggctttgtccaacccatggaccgaatacgccaagacgcttcataagcagctaggcgacgaggatgagctgggacagcagcgcatcaggtgctggcggtcaactgctttggctgagacctttttcacggatcaagcgatcgtcgatagttgcttgaagacggacttcttcaagcatctcccgggcgtactcacgggcttggggatcattggaactttcttcggtctaattaaaggcctcgtgcatttcgacgtgagtgtcgatccggctgcagcccaaatgcaactgcaagggctggtgcgttcggtggggcatgctttctatgtctcggcatccgcgattggcttggccatgcttatcacttggatcgagaagtcgatcatcacggcttgctatggccgagtcgaggaaattcgggaactggtcgacggcttgttcaagggaggcgccggggaggaatacctgcaacagctcgccaagtcgtcccaagatgcagctacccaggcacagcagttgcgcgattcgctggtggtcgacctcagagagatactgacgacgttgaccgaacggcagattgcggctcaagcccaacacaccggccagatgtctgtcgacgtggccaaggtcatttccgaatcgatggccagccccatgtcggcaatggccgaggctgttcaaagggtcagcggcagccaaggggaggctgtcaataagctgttgaccgatgtgttgtcgagtttctccacgcagatgcaagagatgtttggcggtcaaatgcgtggcatgagtgatctgttgcaaaaggcgagcgagtcgatgcaggctacggcccttcaattcgggcagcttgcgtcgaacatggacgccgccggcaccaacactgtggactcgatgggcgagaagctagctcaagcgcttgatgcgatggacgctcggcagtcggcgatgaatgcgcgaatgggggaattcgtcgagcagattcgttcgttggtcgcgcattcgcagtccgagacaggtgaaaagttacgagatgcgctcgcggcggtcgggactcaagtcgcgggcgtggttgatacgttgagacagcaagcggaggcggctgccgaatcgcaaggccaacgtacgcaacggttcgaggagtccactgaccgggcgatcaactcgctctccggacagatagaccaattgcttgcgcagtccatggagaccaacaagtccctgcaggcttccgtgtctgcgttagctggtgcaaccgatcgggcgatggcgagcctcaattcaggggctgaaaccctctatgttgcagccagcgatttcgcgaaggctggctccggtgtgtccgaaacgatgcgttctgctactgctgctacggattcgatcaaggcggcttccgcacagctctcgatggcgaccgatagcgcgaaggggatttttgccgactatgcgcgtacgcgagatacgttcgcgacgatgatcacggatttgcggcagacctttgattcggccaagaaggatgccgcgatgacttctgagctagtcggcaagatccaggcagctacccgcgaacttgccgcggcacagcagcagtctgaggactatctcaaaggtgtcaccgaagttctcgtgggcgcacacgaatcatttcgcgacaacatcgacaagacactgggggagggcaatcgtaagttccactctgagctttctaatgctgtcaacctcctgtctggagcgatcaaaaatctgggcgatgtggtcgatgaaattccggcgggccgaggacgataa

SEQ ID NO: 7805 - DNA, 726 bp, Burkholderia cepacia
atgtttggtccgaaatcatctaggcggcgcaatggcagggacgaaggggagaagccgttctggatctccttttcagacttgatgacggcactcatggtgctgtttcttgtctcgatggctgtcgctctgattgccatcacccagaagcaaaaggccatcgacgatacgattgagctgcgcaagaagacgatcgcacagtgcttgaccgaagttgaagatgtcaccaagcgtcccgaattcaagggcgtgacggtgcatggcaactccatcgattttggcaccgtagtcctgttcgccgatcagcagcactcgtttgaaaagccggccgatgagcgattcattcgcagcttcgtccctgaagtgttgaaagtggcacgtgcacggagctgcgaatcctggcttaagcgtgtggtagtcgaaggcttcgcgagccgtaccggtaactatctctacaatctgaatttgagttacctgcgatctcagcgcgtcctgtgtgcgttgctcaatcagcaagtacaggatgcgctatccgaggctgatcgcaaacagatacaaacgctttttctcgtcggcggctcgtctttcaatacggcatccaacgatggcgctgcccgaatgcgtcgggttgagatcaagttggagtttcgcgatttcgggtcggcagctgaaccggcgccggatattccacttgacccgggcaagtcgtgcccgaatgatctgcgatga

SEQ ID NO: 7806 - DNA, 1638 bp, Burkholderia cepacia
atgaacgaagcgttggcattgctgcgatccggattgacccgctcgttcgcgcaagcggcgaagaatcccgatcagtggctagatgcgaggtcgatgcaactcgcgaaggagcgcgtgattcgagatcatggcggagcggcgatcaaggttgatcaccgaaccatttgggcctcgatcgaggacttcagacggcttggtcatgctgcgaattttcgagagctcaagtacgtttgcctaggtgtttccgccatggatgccaagggctggtgcattctcggtgaagaaaggttacgagagcaggtgggcagacaagtagaggaacaggttgcgattcatcgtaagctacgctgctttcaagccttgctcgcctcctatttctctttctctctaggtgcatccaatcttgacccaaaggccgtgaagggttggattacgctgcggacctggctccaacgccaccggcagcaattggctgttgtcttggatcacattccgccttggttcgaagcactggatcgacattcggaacttctgaccggacgcccttgcgacaagtttgtcccagacctgatgcggggtgatgcatctgcactcgaagaagcgatggaaagtctaggtatcgatcgcgattcctgggtaatggaggcggctgtcttcgctcagatggaggcagcggagaagcttgacgatgttcgatttaaggcggcactaccggatctactgcgcatcgcaatgggcgaggcgggcgcgaaggttggcgaacggcttcggattcgctgcatcgcgctgctggtctctcgatactcgcgttgctctgcaacgccggagcaccccgggctgcgtgacgcggcaatcggcgtcatcggtaacccttggttgcgcagagctagttgggatgcgtacgtcatagacgcagccaagcagccggacacgagtgcgagggagatggtcttcgggtggctcaaaggccggctcatccaggatttcttcgaattgcttagcgccgaagatgccggcgacacccggcgccttgtttactggctccgtttcgcgcccttcgttgacgatatgtggttcgctcttggccccgcagcacaataccgaaacgatcggctgtttagggagtttcgcgagcgtgcgaaggggcggctcttggaccttgaaggcgcatcgggcgacaacaacgcgttcgtgatgaggattggcgcctacgtcgccattgagttcggcaccacggggcacgcgttctatctacttcgctgggacgacttgccgccagccgtgtcccgggcgctgacgtcgggcaaaccgaaggactatgtggccctcattcagctgaagccagaatcccacgaatggaagcagagccatcgggatgcacccgtcgctctcagaagttgggaacagaaattcgacgacgaactcttgccccgattgggtgtggcaccgaaagaccggccggtatgcgtgccggacctcgaaaacctgttggaggggcgtaatgtcacggtgacggatcacagggccaaggggggcgcgcttcggattgggccggatgacgaactggccgatgtagctcgccagctcgcggctttgggtatgcagctgcggcgcggtcgcggctggatcaaggagtga

SEQ ID NO: 7807 - DNA, 3597 bp, Burkholderia cepacia
gtgctattgcttcggcagttagagcaggagggctatatcgaggcgcagtcgtccggagcgttgatggactgggagtcctactaccgccttgaagcagtggaaagttactccgcttcgcttcatctgttgaagccgcccatgaaccggggctggcggccgatgttgtccagccggggtgggctctcggatgcgaacttcgcgatcggcatttcgggttggcgtgacccatccggcgcgcagccgggtggagacgtcgaggtccaaggggccatcctctccgccgatggcaagcaatcgcttctttccgagtctgcatggcgcgtggtacaggccatcactgagcggcgctctcgttccgccgagagacacagccccgaagacaacaaacgcgattgggctcgaatcagacgtcacgccgtcgatgccaaggccgacctcgcggattttctcgccaaaacagtcgtgcttacccccgagcggatcgacatccaaatgcgcaagggtggcgaaggcgcgcaagacatggtggagatcatgcccagcttcgatggcgctccgggccgatggctggaggtgttcgatcgatttgaggtagtgccggcgcgctatgagataccggacggctcgggtttggtgcacatcctgctgtcagaggatgcgcgcgcggtcctgtcggagattcgacgcatgccggggcgccgcgtggccggcgctcgcgcggaggctttccttcgcaacccgtttgcgacacttggcccatcggctgcagtgacgatcgacccggaccagttcgagcgagcgcgtgaggatgcaggcatcgttttcgaaaggttctctgcgagcattgtcgaggaccaatctggctatccgtgcgaagtgggcttgctcatcgagcaagtcttcgagggcaagttggtggcggaggagtccaagttcgagtccgcctccgagctcgaatcgtttatcgccaagatggaaggacgcatcgccactggtgcgcagtgttgtcattggaaaggtttcgatctcgaaatcctgggcgactcgccagatcaaatcgagaaattgcgcgcggcgttggccaagcttgcccagccacacaagatcaaagcgtccgatatttttgatctttcgctatattccgaacgtatcgagggtttcgggatagaaaaaacctattactcgccctttatcgccaagaagggtgacggcggttgggtgccggagaacatcgaccttggcctgtggttcaccgactccaagggcgaaacagtggcgataccactcgatgggcgcaacctggacaagttccgaaaggaggttgaacgggctgagcaggagaagcgaggcagcttctcttttcctgggtgtccgaagccggtgccgacgggctgggccaaggaggctctcgaaaccctcggcaaggttaaggaagaagtcaaaggcggtaactatgatcccggcaaggacaagtcgggtcgcagggcggtcgaacgcaagggcttggtggtcaagcccaacgtagatgggcttgattacgaggagcggcgtggggagctgacagcggataaggcgccacccgcgatgccatcgagcctacgctccgaaattgagctcaaagaccatcagcgagacggtttagcttggctgcaaaagatgtggcgccattcaccgtcagcatgccgtggcgcgctcctggccgacgacatgggcttgggcaagaccatccagttgttggccttcatggcctcgctgattgagctcgagccccgcatcgatccattcttggtcgtcgcgcccgtttcgctgctggacaactggagggccgaaatcgagaaattcttcgttgagggggcgatggatgtcctcacgctgtatggctcgaacctcgcggccaagcgcgcaccgaagtccgcgcttgatgaggggttgatcgagtcgggttcgcccaagctcctcgcatcgggctggctcggttcggcaaaggtggtgctaacgacctacgagacattacgcgacctggaattctccttggctgcgcagaagtggtcggtcatggtttgcgacgaggcccaaaagatcaagaaccccaacgcgatggtgacgcgggcggccaagaagcagaacgccaggctaaagatcgcatgcaccggcacgcccgtcgagaacaccttggctgatttgtggtgcctgttcgactttgtacagccgggcttgctcggctcgttgaaggacttcggcggcaaataccgcaggcctatcgaggcggagactgatgacgagaaggcgcgcattgaagagctgcgtggccttatcgagccacagaagctgcgtcgcaccaaggctgaggttgcgaaggacttgcctaagaaggtcctgcatgagggctgtcgcaagctgccgatttcagctcgccagcgggggctttacacggatgcggtggctcagttcaagtcacgcgggcaagggcagggtagtggcctgcaatcgcctttgggccttctgcaatacctgcggcgcctttgctctgatccgcggcctccgggccatattgccaccagcaatgaatccgtcgagaccatcaagaaggcgtcgccgaagatggactggatgctgcggcggctcaaggaaatcgaggcgtcgggatctggcgacaaggtcatcgtcttctgcgagttccgggacttacagcgcgtcatccaacgcgccgtagccgaggcgttcggattcgtgcctgacgtgatcaacggtgatacctcgaccgaatccggctccgcgagcagccgtcaagcccgcataacggcttaccagcaagatcctggttttggcgtgatcattctttccccgctcgcagtcggcttcggcgtcaacatccaggctgcgaaccatgtcattcactatacccgcacatggaaccctgccaaggaagaccaggccacggaccgcgcgtatcgaatcgggcagcaaaaggatgtgcacgtctactatccggttgtggtcggcggcgatttcgtgactttcgacgaaaagctggacctgctgcttgaacgcaagcgcgcgttgtcctatgacatgctcaatggggccggcgatgtgacaccatctgaattcgctgacatccaagcaccgggaggtggctcgccattcggtgaagatcctttcgatcccgctgatgtcggctccttgggaccggatgcattcgagtccttctgcgcgctgctgtggagcaagcaagggtactcgcggacgatcaagacgcccaagacgggggatggcggtgtggacatcgttgcaatcaatggcaaccgcggcgcgcttattcaatgcaagagctctggtatcgagggcaaggagatgggctgggaggccatcaaggatgtctcggccggttcggtggcctattccgcacgctatccgggtgtcgagttccaactttatgcagccaccaatcgccggttcaatcaatcggcccgacagcaagcgtcgctgttgaatgtgacgttgatcgaagggggcgatctgattgacttgctttccaagcacccaaccaagcgcggcgagctcgatcgtttcgtaatggctgggtggtcacgatga

SEQ ID NO: 7808 - DNA, 2013 bp, Burkholderia cepacia; identical to SEQ ID NO: 7804

SEQ ID NO: 7809 - DNA, 726 bp, Burkholderia cepacia; identical to SEQ ID NO: 7805

SEQ ID NO: 7810 - DNA, 1638 bp, Burkholderia cepacia; identical to SEQ ID NO: 7806

SEQ ID NO: 7811 - DNA, 2583 bp, Burkholderia cepacia
ttgcttcggcagttagagcaggagggctatatcgaggcgcagtcgtccggagcgttgatggactgggagtcctactaccgccttgaagcagtggaaagttactccgcttcgcttcatctgttgaagccgcccatgaaccggggctggcggccgatgttgtccagccggggtgggctctcggatgcgaacttcgcgatcggcatttcgggttggcgtgacccatccggcgcgcagccgggtggagacgtcgaggtccaaggggccatcctctccgccgatggcaagcaatcgcttctttccgagtctgcatggcgcgtggtacaggccatcactgagcggcgctctcgttccgccgagagacacagccccgaagacaacaaacgcgattgggctcgaatcagacgtcacgccgtcgatgccaaggccgacctcgcggattttctcgccaaaacagtcgtgcttacccccgagcggatcgacatccaaatgcgcaagggtggcgaaggcgcgcaagacatggtggagatcatgcccagcttcgatggcgctccgggccgatggctggaggtgttcgatcgatttgaggtagtgccggcgcgctatgagataccggacggctcgggtttggtgcacatcctgctgtcagaggatgcgcgcgcggtcctgtcggagattcgacgcatgccggggcgccgcgtggccggcgctcgcgcggaggctttccttcgcaacccgtttgcgacacttggcccatcggctgcagtgacgatcgacccggaccagttcgagcgagcgcgtgaggatgcaggcatcgttttcgaaaggttctctgcgagcattgtcgaggaccaatctggctatccgtgcgaagtgggcttgctcatcgagcaagtcttcgagggcaagttggtggcggaggagtccaagttcgagtccgcctccgagctcgaatcgtttatcgccaagatggaaggacgcatcgccactggtgcgcagtgttgtcattggaaaggtttcgatctcgaaatcctgggcgactcgccagatcaaatcgagaaattgcgcgcggcgttggccaagcttgcccagccacacaagatcaaagcgtccgatatttttgatctttcgctatattccgaacgtatcgagggtttcgggatagaaaaaacctattactcgccctttatcgccaagaagggtgacggcggttgggtgccggagaacatcgaccttggcctgtggttcaccgactccaagggcgaaacagtggcgataccactcgatgggcgcaacctggacaagttccgaaaggaggttgaacgggctgagcaggagaagcgaggcagcttctcttttcctgggtgtccgaagccggtgccgacgggctgggccaaggaggctctcgaaaccctcggcaaggttaaggaagaagtcaaaggcggtaactatgatcccggcaaggacaagtcgggtcgcagggcggtcgaacgcaagggcttggtggtcaagcccaacgtagatgggcttgattacgaggagcggcgtggggagctgacagcggataaggcgccacccgcgatgccatcgagcctacgctccgaaattgagctcaaagaccatcagcgagacggtttagcttggctgcaaaagatgtggcgccattcaccgtcagcatgccgtggcgcgctcctggccgacgacatgggcttgggcaagaccatccagttgttggccttcatggcctcgctgattgagctcgagccccgcatcgatccattcttggtcgtcgcgcccgtttcgctgctggacaactggagggccgaaatcgagaaattcttcgttgagggggcgatggatgtcctcacgctgtatggctcgaacctcgcggccaagcgcgcaccgaagtccgcgcttgatgaggggttgatcgagtcgggttcgcccaagctcctcgcatcgggctggctcggttcggcaaaggtggtgctaacgacctacgagacattacgcgacctggaattctccttggctgcgcagaagtggtcggtcatggtttgcgacgaggcccaaaagatcaagaaccccaacgcgatggtgacgcgggcggccaagaagcagaacgccaggctaaagatcgcatgcaccggcacgcccgtcgagaacaccttggctgatttgtggtgcctgttcgactttgtacagccgggcttgctcggctcgttgaaggacttcggcggcaaataccgcaggcctatcgaggcggagactgatgacgagaaggcgcgcattgaagagctgcgtggccttatcgagccacagaagctgcgtcgcaccaaggctgaggttgcgaaggacttgcctaagaaggtcctgcatgagggctgtcgcaagctgccgatttcagctcgccagcgggggctttacacggatgcggtggctcagttcaagtcacgcgggcaagggcagggtagtggcctgcaatcgcctttgggccttctgcaatacctgcggcgcctttgctctgatccgcggcctccgggccatattgacgtgcccccatcaatagggccaatgggcttctag

SEQ ID NO: 7812 - DNA, 1827 bp, Pseudomonas fluorescens F113
gtggttgataccccactgggtaccgagttttacaagcatctgcctggaatattgactggtatcggtattgttgggacgttcttcggcttgatgctaggcctacaacacttcgatccgagcacgccggagcaggttaacgccagcgtcgacaagctattgaaagatgttttatttgctttcatcggctcctttatttcaattatggcttctatagcagtcacaattactgagaaatggcgtctcggccaatgctataaaattcttgaagagttcaacgagacgatcgatggactgttcgatagcggtgtcggagaggagtatttggctgagcttgtacgttctagtgctgaaagctctgtgcaaacccgccagctcaaggacagcctcgtaacagatttgcgggaaatgctgcaaaacctcgtagatactcaagtccgcgaaagcctcaaattagccgataccctgtcgtccacttaccgggactctggacagatgttggccgatcaggtgagcagtgcaattgagaacagtctcaaatccccccttgaagctatcgcgggtgcggttcaggccgccagtggtgatcagtcagggcaagtacagaacctgcttcaggatgtcctggttgccttcatgaacaagctggaaggtacgttcggccaacagttcaatggtcttcacgagctgatgggacagtccgtttccgccatgcagtcgatgcaacaaggcttttcgacgctgatccaagatatgcgttcggccagtgagtcctcgacacaaaacagctcaaccatgattgcccagttactctccgatatgcaggccggacagaacgccatgcaagcggggatgaacgagatgctaacgaatctccaagcttcggttgcccgtatcggcaacgaaggggagggagcaggggctcgaatggccgagcaattggagaagttgtttgctcaaagcgaggttcgccaacaggcaatggctgagaatctccaggcttttgttgaattgatcaaacagaacatcggccaggggcagcaggaaaccatggcgaaaattgcgggctccgttgatgtgctgggtgagcagctctcggcagtcttcaaacaattggaatatggtcagcagcagatggaccaatccacccgtgctgcgcaggctgatctccatcaaggaactcgcgatctggtaggcggccttgacgagcaggtcaaggcactgctgcaaacagtgtctgagcaacaaaaaactgcccaggacactgtcaaggcattgagtgcccaaacagagcagcatctgcagagtatgcagctaggcgcagacaaaatgcgggcggcggctgagcggtttgaaacggccggacaaagcgttgcacgagccagtgagtcgactgcgggacttatggggacagttcagggcgcagggactgagcttgcacaggcgtcacgtgagctgaataccgtggtcgcggactaccgaaacaatcgtgaagcactagcgaaaacgctcgccgtcattgaaggggtagttgcgagtgcacaaggagaggccaacggtcgcagccagtatctccaagacctgaaggttcaaagtgagcggatgcagacgcttaaccgtgaagtgtatgaatacctggaaaacatcagtggtgtgttgggtaacggcttcaaagagttcggtgatggcatggatcgggtgttgagacaaaccctgggcagtctggacgccgagctcgataaagcagtcaagagcctcgctggcggtgtagaaggggtcaaggaaagtctcgacgacttcggcgacatcatggaacgaatccggcagtaa

SEQ ID NO: 7813 - DNA, 744 bp, Pseudomonas fluorescens F113
atgtttggtaagcaaatgccttcggttgcccgttcaaaagacgagggagagaagcctttttggatatcctttgcggatttaatgaccgcgatgatgattcttttcctcgtggtcatggtggcagctttgagttctgtgacgcagcgtattaaccaagcggagcaaggagagaagcagcgcaataaggacattagtcagatctgcgagcacctgagccttcaggcgaagtctgccagtaaaaccatcgttgtagactgcaaggacaaccggattagtttcggcgatgcgggccgctttgggcataaccagtacgcgctgagcaacgatggccagtcggcacttcaggaggttgtgccgatgattctgggcgccgctaacagtgaagaaggccgaaagtggtttaaacaggttgtgatcgagggatcgacagacactgacggttcctatctttataacctgcacctttcactgcagcgttcagaatgggtgatgtgcagtctgctcgatagccgcagtcccctccaggtcggattgtcgccagagcaccaacagcaaatcagatcgatgttcctggcgggcggtgtgtcgttcaacaatgcaaaggacactaaggaggaaagccggcgggtggagttgcgcatgcagttcttcggcttgaaggaaaaggaagacaacctcaagccagaggtcccggttttcaacaacactgatatggaaaagtgtcagttggcaatgaaccgatga

SEQ ID NO: 7814 - DNA, 1629 bp, Pseudomonas fluorescens F113
atgaccagcccaatcgctaggctttccgccgctatcaacctgagtctttccgcgcatcgaacggggccggcgcctgaaccgttggcgcgattcccccgtctgggtgccgcgggagttgatctttacgagcgattcgagcgcgctgaaaaggctttgccgccacctcaggaaaagcgccgcgctgcgataaacaaattccgcaatgtactgccgctcaacgcttcagagtggcgcttggttttcgccggcctctcggacaaaagtgagcgagtcgggccgatactggatgatgaccagctttttgaccgagtgcacaaagaaattcatcaacgtatcgaaaaacgaaagcttagccgccgcgattggttggcgctgtgctttagctactttgggtacgaggccgccacgcctgataaaagcgccaattggtgtctgttgcgggaagacgttcagcttggcttcgaatgcgtcagaggccagcaaaaacgcgagaaggaatgggttcacatcgtccagcagcatcaggagcttttctccgagcaggcaggtgccaggctgggtgaccagatgttcaagggagagatcagcgacctttcggcattgcagacgattgcgcagatccctgacagcagttggctgtggcgaaggatctttaacgtacttatctctcgtatttttatgttggatgacgccgagttttctcagcgcttagccgaccttgtcgacatcggccggcagcatccgcggtacatgaacgacattctgagtgcatgcctgtcgcgttatcacttggcagagtatcgagagaaaccgtcgtcactgctcaaacaggtcgcactcgacaattggggcagccctcagatccgttccagacaaaacagctggctgcagtacgttgaaaaagatgtctgtgcaatggtcgttgcgtggttcgcgaaggaagatcttgagcacttcttcaatttgctcaaaggggacgccgaggtcgatcaatcacgtctgcattattggctacgctttgctaaccagatgagttacacccgaatcgtcatgggctcggatgcctggcatgacagtggacgggactacgtccattttcgtgagaaaaacaaagggcgccttagccgactggtaggtggtccaggtcataacaacgcagtcatcatgcagatcgggaactatttttttgtggagttctccggaaccgggaatgcttgctatgtgtaccaggcagacaagtcgcctttcgatccagataagtcactactcgagttggcgagcgaactgaagcagccccaccgtgcgctggatcgaatgcggcattcccctgcacctagccgccccaatcgcatagagggttggctcagcaaattcgatgatgccctcgataaattgggtattcatgtgcagagtcaggccggggcgccaggttcacccaaaccgctgcctttcgaagaccaagtccgtgaagccctgaagtcggtcaaacacaaagtctatgaccagcgcgcgcgcggaggggcatttcaggttcagcttgatgacaacgatctggcagccattgctgcgctccaacgcctgggcttcaagtccgtcaatcaccagccactccggttctggagacagtaa

SEQ ID NO: 7815 - DNA, 3249 bp, Pseudomonas fluorescens F113
atgctcaagcgtttcctcaaaggcattggcctgcagtcgaatttggcggtagaaaatactgagcctgggttttccattgaggagcagggcatttgttaccctctgagcttggcagataacgaagaatcctggccgctagcaagctacctggatcagttggaagaagaggagttcatctcccaactcagtgatcgctggctactgacgtgggatgagctctatcgacttcttgatgagccagagcacttaacaagtctgccgttattgagattgccaccacagacagctctcattcctcaactgagcagccaaggcagtcttgcctctgacgatttcaaggtctccgtcagtggatggcgtgatccgcaatccaacgcaaatgtgcaggtgcagcgtacgggagcgatcctccagtaccatggaaaaatggaaattttgcctgagtcgtgctggaagctgaccggtgcggtacgacaactttacctggctcaacaaaatgagtcgggtgaagtaactaatcaaatcggctgggccagcatcaggaagttggcacgcaaagccggtgcgggtatggatggttttttggataaaactatcgttatcaaacctgaaagcttgcggctcaatccgagaaagtcgacagtaggtaatacgccggttatcgaactgcaaccaaccttcgaaggtcagccggttaactggcttgagagtttcgacggtgccaatcaggttcaggatcgataccgagtgaccggcgatgatggatcgttgactcacgtcctgattgagcctgaagtcaaatctgtattggactatgtgcgctcgttacctgggcgtcgggttgctggggatgatgcactttccttcgtccgcaatccttacagcgtactcggcgaaagcgccgtacaagtattggatgctgagacctatgaagatgaactagccgaggctgggattttcttccaccgctttcatctggaaccaaaactggatgaatcgggacagcacattgagcaagtaaacctgacactcgaaccaatctcgccaaccccgcagtcgcccatcgaagttgaattcaaatccgcctatgagctcgctccgtttgtgcatgagttgcagctgaagttggccgctggcatgccagctggtttctggcagggttatgagttggagctcagcgattttgacttccgccagctagcaggtatcagcgatctgcttaagcgttggcaaaacgaagcggccggtattgagtttgactcggttctcgacctatctctttacggtgatcgtgtgattggcatcggggaggctgagagaattacttcgccttttctggtcaaagaggcgaccgagaactggttgcccaagggtgtggctgccttgggcattgacgcagaaactctgggacgttgggatccttccgaccgcgctcagttcgaagctttcgagcagcgcctggacgaagcccgcgcagcaggtgatgaaacggtttgcttgccggagtccgaaacaccgttatcgattgcagcggccgagcaactcttcgaagcctggtcaaagaagattgcacctgtcgagaccgatctgatccagccagtggaaaagattggccgcgccgtattgcaaatcggtcataacatcgacgagcccacctacgttcagattcgccagtcagccttgcgcgcagctttggacgcaacgccagaattacccaacctacttaagcctgaagtcgtcttgcgcgaacaccaactccaaggcatcgcgtggttgcagcacttgttccgcttgtccccctcggacgtgtcaggttgcttgctcgctgatgacatggggcttgggaaaacgatccagttgctcaccttcctagtctggtacttggaaaagtatccacaagataaaccgacactgatcgtcgccccagtctcgttgctcgataactgggagcgtgagcttcaccgattcttctttgctgatgcgctgccggtgttgaagctgtatggctcagccttgagtgcagtgaaattcaaaaaagaagaaatccctgccgacttgaaagcaaaaggcatcaagaatctgctgcgcccaggttggatgggcggtgcccgaattgtcctgactacttacgagacactgcgtgatcaggagttttcccttgcgcgccagcagtggtcgatcgtcgtgtgcgatgaagcgcagaagctgaaaaaccccgcggcactggtaactcaggcgattaaagccattcctgcgagatttcgtgtggcatgtaccggtacgcccgtcgagaacactctgattgatctctggtgcctcttcgacttcattcaaccaggctttttgggcggtttgaaccagttcggtcgcgagtaccagcgcccaatcgaagccgcattggagcgggatatgattgctctggagcgccttcgagggcttatcgatccacagactctgcgtcgtaccaaacaggacatcgctaaggatctacccgccaaaatagaagacgcagcatgccgttcattgggcatgcatgtcttgcagcgtagtttgtatctatccgaaatatccgcgtataccaagaagcagcagatcgaagagcagctcgatcaaaaaacgtctggcatgcttggtttgttgcataaactcaagctcatttgcgcccacccttacagcgtccaacccgataggcgcttacgcgataattcgccgaagctgcagtggctgattcaaaccctggaaggcattaaaagagccggtaagaacgataaggtcattctcttcaccgagttacgggacatacagcgggagcttcagcattcaattcaagaacattttggattccgggcaacggttatcaatggcgatacgagtaccagcagtcaaagcgccaatagccggcaaagactaatcgaccagttccaagagcagcctggatttgccgtgattatcctctccaccattgccgtcgggtttggcgtcaacgtccaggctgcgaaccatgtaattcacttcacccggtgctggaacccggcaaaggaagatcaggccacagaccgtgcatatcggattggtcaaaaaaaggatgtgtacgtgtattacccaaccgtgcgtgatccggagatgccgacttttgaggcgacacttgatgacttgttgagcaaacgacgggcgctggcgcgggatatgctaagcggggcttcggagattcaagcttcggagtttggggaactgttggggccccggtag

SEQ ID NO: 7816 - DNA, 2193 bp, Pseudomonas fluorescens LMG 5329
atggatttttcgacgctgctgcatctttgggatgcagcgagctccgagcaattgattgcaccaaaaattgtagtcggttttgttttcattttatgcgcttggtatttcgtccgttatttttgtagatccttcaagcttagcaatcagctgaaaattctgactaaacgcgtgcgggacgtgaaagctttcgccgcacctcaacggcgctctgaactggagcaactgttcaatggaagcaatttggagcactcctggcacgagtacgctgaaacgctgcatgatcagtttgagctgcaggacggtgaacaggtccttgtccgatcgcgctcaaccgccggggctgcgcactttttctcacctcaaagcgtggtcgatacaccgctggggaccgaattttataaacacttacctggcattttgaccggcattggtattgtcggaaccttctttggtttgatgctaggcctgcaacattttgatccaagcaccccggagcaggtcaatgccagcgtagataagctgctcaaggacgtattgtttgcgttcatcggctcctttatctcaattatggcttctatagtcgttacgattactgagaagtggcgcctaggccaatgctataagctccttgaaacgttcaacgaaaccattgatgggctttttgatagtggtgtgggagaggaatacctagctgagcttgtacgctcaagtgctgaaagctccgtgcaaacccgtcagctcaaggacagcctggtaaccgatctgcgggaaatgctgcagaacctcgttgatacccaagtccgcgaaagcctcaaattagcggatactttgtcaacgacttaccgtgattctgggcaattgttggccgatcaggtaagcagtgcgattgagaacagtctcaaatccccccttgaagctatcgcgggtgcggttcaggcggtcagtggtgaccagtcagggcaagtacaaaaccttcttcaggatgttttagttgccttcatgaacaagctggaaggtacgttcggccaacagttcaacggtctacacgaactgattggtcagtccgttgccgccatgcagtcgatgcagcaaggcttttcgacgctgatccaagatatgcgttcggccagcgagtcctcgacccaaaacagctcgactatgatcgctcagttactctccgatatgcaggccggacagaacgccatgcaagcggggatgaacgagatgctcgccaatctccaggcttcggttgcccgtatcggcaacgaaggggagggggcaggcgctcgaatggccgagcaattggagaagttgtttgctcaaagcgaggctcgccaactggcaatggctgagaatctccaggcttttgtggagtcgatcaagcagaacatcggccagggtcaacaggaaaccatggcgaaaattgcaggctccgttgaggtgctgggtgagcaactctcggcagtcttcaaacaattggagcacggccagcagcagatggatcaaaccacccgcgctgcacaggctgacctgcatcaaggcacccgtgacttggtgggcggtcttgacgaacaggtcaaggcgttgctgcaaacagtgtcagagcaacagcagtctgcacaggacaccgttaaggcattgagtgcccaaacagagcagcatttgcagagcatgcagctaggcgcagacaagatgcgggcggcggctgagcggtttgaaacggccggacaaagcgttgcacgagccagtgagtcgactgcggggctgatgggcacagttcagggcgcaggtactgaacttgcacaggcatcacgtgagttgaacaccgtggtcgcggactatcgaaacaatcgtgaagcgttggcgaagactctcgcggtcatcgaaggcgttgtcgcatgtgcgcaaggggaggccagcggtcgcagccagtatctccaggacctgaaggctcaaagcgagcggatgcaggcgcttaaccgtgaagtgtatgaatacctggaaaacatcagcggtgtgctgggtaacggcttcaaagagttcggtgatggcatggatcgagtgttgaggcaaaccctaggtagtctggatgccgagctcgataaagcagtgaagagcctcgctggtggtgtagagggggtcaaggaaagtctcgaagacttcggcgacatcatggaacgaatcaggcagtaa

SEQ ID NO: 7817 - DNA, 744 bp, Pseudomonas fluorescens LMG 5329
atgtttggtaagcaaatgccttcggctgcccgttcaaaagacgagggagagaagcctttctggatatccttcgctgatttgatgaccgcgatgatgattctgtttctcgtggtcatggtggcggctttgagttccgtgacacagcgtattaaccaggcggagcagggggagaagcagcgtaataaggacatcagtcagatctgcgagcacctgagccttaaggcgaagactgctagcaagaccatcgtcgtggactgcaaagacaaccgaattagcttcggtgatgctggccgctttgggcataaccaatacgcgctgagcaacgatggccagtcggcacttcaagaagttgtgccgatgattctggatgcggctaacagtgaagaaggccggaagtggttcaagcaggttgtgatcgaaggatcgacagacaccgacggctcctatctttataacctgcacctttcactgcagcgttcagagtgggtgatgtgcagcctgctcgatagccgcagcccgctccaagtcggcttgtcgccggagcaccaacagcaaatcagatcgatgttcttggcgggcggtgtgtcgttcaacaatgctaaggacactaaggaagaaagccggcgagtggagttgcgcatgcagttcttcggcttgaaggaaaaggaagacaacctcaagccagacgtgccggtgttcaataatactgatatggaaaagtgtcagttggcgatgaatcgatga

SEQ ID NO: 7818 - DNA, 1629 bp, Pseudomonas fluorescens LMG 5329
atgaccagcccaatcgcgaggctttccgccgctattaacctgagtctttccacgcatcgagtggggcctgcgcctgaaccgttggcgcgattcccccgtctgggtgctgcgggaattgatctttacgaaagattcgaacgcgctgaaaaggctttgccgccacctcaggaaaagcgtcgcgtagcgataagcaaattccgcaatatactcccactcaacgcctcagaatggcgtttggtttttgccggtctttcggacaagagtgagggagtcgtgccgatactggacgatgatcagctctttgaccgagtgcacaaagaaatccatcaccgtatcgaaaaacggaggctaagccgtcgagattggttggcactgtgctttagctactttgggtacgaggccgccacgcctgataagaacgccaattggtgtctgttgcgggcagacgttcagcttggcttcgattgcgtcagaggtcagcaaaaacgcgagaaggaatgggtacatatcgtccagcaacatcaggaacttttttccgagcaggcaggtgccaggcttggtgacaagatgttcaagggtgaaatcagcgacctttcagcattgcagacgatcgcgcagatcccggacagcagttggctgtggcgcagaatctttaacgtattgatctctcgtattttcctgttggatgacgcagagttttctcggcgcttagccgaccttgtcgatatcggtcgacagcatccgcggtacatgaacgacattctgagtgcatgtctgtcgcgttatcacttggcagcctatcgagaaaccccgtcgtcgctgctcaaacaggtagcactcgacaattggggcagccctcagatccgctccaggcaaaacagctggctgcagtatgttgaaaaagacgtctgcgcgatggtcgtggcgtggttcgcgaaggaggatctggagcacttcttcaacctgttgaagggagacaccgaggttgatcaatcgcgtctgcactattggctgcgatttgccaaccaaatgagctacaccagaattgttatgggggcggatgcgtggaatgacggcggacgggacttcgttcatttccgtgagaagaacaaagggcgcttgagtcgtttggtcgggggttccagccgcaacaacgctgttgtcatgcagatcggaaactatttctttgttgagttttccgggaccggcaatgcttgttttgtgtacgaatccgacaaatcgcccttcgatccggataagtttcaacttgagctgacctctgagttgaagcagcctcatcgtgcgaaggctcgaatgctgcatacgccggcacctagtaaaccaactcgaatagaagggtggcttctcaagtttgacgactctctcggaaaactgggcattcgcgtgcagagtcaggccggcactccaggggcatccaaccccatggcttttgaagaccaagtccgtgtcgccctgaagtcggtcaaacacaaagtctatgaccagagcgcacgcggcggtgcatttcaggtccagcttgacaacaacgacctggccgccgttgctgcgctccaacgcctgggcttcaagcccgtcaatcaccagccactccggttctggaggcagtaa

SEQ ID NO: 7819 - DNA, 3249 bp, Pseudomonas fluorescens LMG 5329
atgctcaagcgtttcctaaaggggattggcctgcagccgagttcgccggtagaaaatactgaacctgctttttcaattgaagagcagggcatttgttattccttgagcttggcggaaaacgcagagtcctggccgctggcaagctatctggatcagttggaagaggaggagttcgtctcccaactgagcgatcgctggcttctgacgtgggatgaactctatcggctgcttgatgagccggagcatttatcaagtctgccgcttttggggttaccgccacagacaactctcatccctcaactgagcagccagggcagtcttgcctccgacgacttcaaggtcgctgtcagtggatggcgtgacccgcagtccaacgcaaatgtgcaggtgcagcgtacgggcgccgtcgttcagtaccacggaacaatggaaattctgcctgagtcgtcctggaaactgaccggtgcggtgcgccaactctatctggctcaacaaaatgagccgggtgaagtgaataaccagattggctgggccagcatcaggaaattggcgcgcaaggctggtgcaggtatggatggttttttggataagaccgtcgttatcaaacccgaaagcctgcggctgaacccgcgaaaatcaacggtcggaaatacgccggttatcgagctggaaccaagcttcgaaggccagccggcaaactggcttgtgagtttcgacggtgccaatcaggttcaggatcgataccgggtgaccagcgatgatggatcgttgacccacgtcctgattgagcctgaagtcaaatctgtactggactatgtgcgctcgttgcctggccgtcgggtcgctggggacgatgcactttccttcgtccgcaacccttacagcgctctcggcgatagtgccgcacaagtgctggatgcgcagagctatgaggacgagctggtcgaggccgggattttctttcatcgctttcatctggagcccaaactggatgaagcgggacagcacattgagcaggtaaaactgaccctcgaaccgatctcgccaaccccgcagccgcccatcgaagttgaattcaatgcagcttatgagctcgcaccgttcgtgcatgagttacagctgaaattggccgctggcatgcctgcaggcttctggcagggctatgagctggaactcagtgattttgatttacgccagctggcaggtatcaacgacctgcttaagcgttggcaaaatgaagcagcgggtatcgagttcgactccgtcctggacctgtctctttatggcgaccgtgtgacgggcatcggggaggcggaaaaaattacttcgcctttcctcgtcaaagaggcgaccgagaactggttgccgaaggatgtggcggcattgggcgttgacgcagaagttcttggacgttgggacccttccgaccgtgctcaatttgaagcgtttgagcagcgactggacgaagctcgcgctgccggtgatgaaacggtctgtctgccagagtccgaaacaccgctctcgattgccgtcgccgagcaactgtttgctgcctggtcgaggaagatcgcccctgtcgagaccagtctggtccagcaacaggaaaaggtgggccgcgctgtactgcaaatcggccacaacattgacgaaccgacctacgttcaaattcgtcaggcagccctgcgcgccgctttggacgcagtcccagagttgcccggtttgctcaagcctgaagtcgtcctgcgtgagcatcagcttcaaggcgtggcgtggctgcagcacttgttccgtttgtccccatcagacgtgtcaggctgcttgctcgctgatgacatggggctagggaaaacgatccagttgctgactttcttggtctggtacctggaaaagtacccacaggccaagccgacactgatcgtcgccccagtctcgttgctcgataactgggagcgggagcttcaccggttctttttcgctgacgcgctgccagtacttaagctgtatggctcagccttgagtgcagtgaagttcaagaaagaagaaatccctacggacttgaaagccaaaggcatcaagaatttgctgcgcccaggttggatgggcggcgcccgaatcgtcctgacgacttacgagacactgcgcgatcaggagttttccctggcgcgccagcaatggtcgatcgtcgtgtgcgacgaagcgcagaaactgaagaaccctgctgccctcgtcactcaggcgatcaaagctattccggcgagatttcgggtggcgtgcaccggtacgcctgttgagaacaccctgatcgatctctggtgtttgttcgacttcattcagccaggttttctggggggactgaaccagttcggtcgtgaatatcagcgcccaatcgaagccgcattggagcgtgatacggttgcgctggagcgcctgcgcgggcttatcgacccacagactttgcgtcggaccaagcaggacattgccaaagacctgccggccaaaatagaagacacagcatgccgttcccttggcatgcataccttgcagcgcaatctttacctgtccgaaatagctgcgtacagccagaaacagcagatcgaagaacagctcgatcaaaagacatctggcatgctcggattgctgcacaagctcaagctcatttgcgctcatccttacagtgttcagccagacaaacgactgcgcgacaactcgccgaaactgcagtggttgatgcagacgcttgagtcgatcaaaagagctggcaacggtgacaaggttattgtctttaccgagttgcgtgatatccagcgggagttgcagcactcgatccaggagcatttcgggtttcgggcgactgtgatcaatggcgataccagtaccagcagtcagagcgcaaatagtcgacagaggttgatcgaccagttccaggagcaacctggtttcgcagtcatcatcctgtcgaccatcgccgtcggttttggggtgaatgtacaagcggccaaccacgtcattcacttcactcgttgctggaaccccgccaaggaagatcaagcgacggatcgggcctatcggattgggcaggagaaggatgtgtacgtgtactatccgacggttcgggatgcggcgatgccgacgtttgaagcgacgctggatgagttgttaagtaagcggcgagcgttggcgcgggatatgttgagtggggcttcggagattcaggcttcggattttgaggggctgcttaaggcacaatga

SEQ ID NO: 7820 - DNA, 2346 bp, Pseudomonas fluorescens
atggacttgttaaaactgctctggccagacttcagcttgctgctgactggcaacaccaatggcatcagcgcctggttctggctgctgacggcgggcatctttgctatcgcgctgttggctctgctggtgcacttagttcattttaaagcaaggttgcaggcggttaacagcctgctagccggacagacaagggagcagcttgccctcaatcggcgggaaaccgtgcagcgcgcccatgcgttgaaaaataccggcatcagcatgctctggcgagaattcgacgagagcttggtcagctcgggcgaccaaaagctgttgttcaacactctggatgccgagcacttctttaacgcccgcaccctggcgccgggccttaccgccagccggttgctggccgccaccccaggttttttggtggcgattggtgtgttaggtacctttgtcggtttgaccatcggcctggtggggctggagctgagcagctcttcgggtgttgaagcgttgcgcaagggcatcgacgggctgatttcaggcgcggctgtagcttttatgacctcagtgtggggcgtgaccttcagcctgctgctgaactttatcgaaaaaatgttcgagcgctcggcactggctcaagtacagtctttgcagaataaaatcgacagcctctacccacgaattttggccgagcagtcgctagtgcatatcgccgactatggtcgggaaagcagcactgccttgcaggagttgcacgaacgcatcggcgatcgcctgcaggaaagcatggcggggatgaacgaggccatgcaaacggcactcgcagatacgctgaacaacatcatgggcccggccattcaaaccttggtcagcggcgccagccagcagtccacccaagtattggacaaactggtcggcagctttatggaaggtatgacgtcggtaggccgagagcagggcaacctgatgcagcaggcagccgccgatataaacaacgccgtaggcgcaatgagcggtcagctcaatcaactgttccatagcctcagcgatcagcagggccgtcagcaagaaaccgctcagcagcaaagccgtcagtttgaggaacagttgcagcgtgtcgtgagcagcgccgaacagcgagagcaacagttggagcagcgtttcaatcagctgatgtcaggactgggtgggcaactggatggccagttgagcgccgcccagcgacgcgatgacgagcgccaggcattgttcgagcgggcacaggccgaggccaatcagcgccagcaggaactgctgacgcaagtcgccagtagcacccgtgaacaaatgcagacgatggccgaggcgggtaacgagcggcacaacaacctggagaacgtcttctcgcgcttgatgatgagcctcaacacccagctcgattcgcagctatcgtcttcagagcaacgtgagcaggcgcgcgccgaacgtcacgaacgacaactagtggccgccactgcgcaacagcaacagctggtcggcagcctgagtcagaccactcagcagcaattgactgccatggttgaggcggcatccgcccaacagagcaacctggaatcggcctttggcaaattgctcggcaatctcaacgagcaaatgagtggccacagcgagtatgccgaacagcgtgagcagtcgcgccaacagcgcctagccgaccagatggaaaacatggccagtcagcaacagcagttgctggaaagcatcgccaaggcagtgcaaaccacccaacagcaaagcctgcaaatggccgagcaacatcagcagttgctcgggcgcttgcagcaaaccagcgaagctgctgcagctagcagtaagcacatggacagcagcgccaaccaacttggtctgctgtcgaccaacgtgcgccaagcctccgaactattgggccagcggctggagtcggtgtctgagcgaattgaagacgccagcgcgcaaaatgccgagctggccgcgcagctcaagggccagtcagcctcgctctcgcagctgcaagaggcgctactggaaggcgcccagcgtttcgaacaggccgccagtgaggcgcgtaatggctttggtgagatgaggacccaccaacaagagtttctcgtcggtatacgcaccgagttcaccgccttgggcgaaacactgcgcacgcaggttgcgggtgtcgagaagcaggctgaagaatggctgcgtagctactcgggtgaggtgcatcagcaagtacatgagcgcatggatcagtggaacaagcagaccttgagctttgccgaccagatgtatgccgctgtgcaggccatcagcaacgttgtcgatgagttggaggcccgctga

SEQ ID NO: 7821 - DNA, 747 bp, Pseudomonas fluorescens
atgcgctggcgcaaatccaacgaggtatccgtagatgaggagaatccgtactggatgtccttctcggacatgatgtcagcgctgttggtgatcttcatcctggcggcagtgatcctcatcttgcagttgatggagcggcagaaggactttgatcagaaggtttcccttctggagcaggccgagcaggtgcgtcgtaccattctcgatgaggcggtggatgagctgcgccagcgcggcatcaaggtggaggtcagcgaaaaccatacggtgctgcgtatccccaatgcgctgctcggttttgacaccggcgcttatgaagtgttgccacgctaccagccaacggcgctggagatcggcgaggtgattaacaaggtgatcagcaaagaacatcgagttgactttctggatacgatttttatcgaaggccacaccgataaccgaccgtataacaatgcacagattaagggtaactgggggctgtcgacctttcgcgccatctcgctgtggcaattctggagtagcgaactgccggaagccgagcggcttaatcggttgaataaccaggatggcgaccccctgttctcggtcagtggctatggcgagacccgaccggtgaacgaccagcaatcaagcgaagatgactaccggctcaatcgccgcatcgacattcgcttcactattcgccggccattgagcgccgaatatgagggtgtgcgagaggtgttggggggaggcactaccaaatga

SEQ ID NO: 7822 - DNA, 2115 bp, Pseudomonas fluorescens
atgaaggtgccgccgatagacaaccgtcctggggaatggccgcatggtgtcattgaaaactggacgcgcttgcttgcgcgcgctcagcacctggagagcaaggccggcggcagtgatgcctttgaacagatgttggctacttttcgcgagatgatgcgcaccggccgttttgacggttttaaagcgttgctgaccaggcgcctggccgctcgcgcactgacctggctatggctgcacgatgacgtgattggaccacggctgttgaatgtacggctcctcaatacgctgatagaagcgcaacaaccacgcctgacgcgaatcacgttggtgcaaatggttcagctgtatttccgcttttttgatcgcttggatgaccgcgacaaaactgccgagcaaagcttgcgggctgtgctcgaggcacatgtgcatgcccagttgcgctggctccccgagccgcgcatgcagtccctgcggccggatgccttaacccaactcaagcagcacgggtattggttgttggggcttgaaggccctttggccttggctaagcacgttcgcgagcagggccaagagctggccgctacgtttgaggcgtatggcttggcaggattgagtactagccgttacggcgatgtttgccgcgcgcacttttatctcgaaactttgcgccagctggtgccaggggaatgggacgaggtactagatgaactgctgaaaccttcggtaagcaaagcaccctacgagggtgacaagcgcattggtcacgcggccttagaaatcataatcgaccgcgcgggtgatgcgccgagcgatatttggcagagtttcatcctcaatctggcaggcgatccgcgcattgccagctcatcgcctaactaccggcaatggtggttgcctttgggtgaggcgcgtatcaaccaggtgcgcggctggctgtccaaagaagacttgcggctgttcctgcaagcggttgagcagtacggcaacgaaagcggcaaagaagacttgcagcggatgtttccagcacggaaaaccttccttgaggggctgttcaagcttgggttaattcgccatacacgcttgatgctgggcggcatcgcgcagcagtcggtgcggcgaattctgggggaagaggtaaaaaccaactttgccaaaatggaaggatccatgaacgacaaggctgcaatctacttggattgcggtgacttccatttggttgagggctcgcacagcttcaagatttgggtgtatttggctcagcctgggccggcaatgaaatcgtacgaaaaaaacctgtttagccattcagatcttacgattgagctccctaaggtatacaaaaagctctatccgggactgggttacgaggcggtaacccacaatggcacctggcagcgcaaagtcttcgattttttggcggagaatggcatcggcgtggacatcgagaagctactgagtaagcaggaataccgtagttatttgaatcgccacggggtgccagtggtacggagcaacaaggtcatcgtaccgtcagcgctacaaagtccaatgcaagccgtaaagcctgagcgtttacctgagctagggagcaatgcatttgaaacaaccagctatgccattggatctgcatcagctgcatcaaggccgctgaccgaaccacgaacagtaggtgcagcggcggaggcttcagtcgtcaattctattcgtgcgcagaataacgccatcgccgatgccggctattcaggaagccggcggttatttggtaaagaacctgatgctggtactgcgcttgcacccgtcgatagtgctttgccctcggtagtcgccgtcgtcgcggaatcggcatctgcacctttggtggtaaacgagctgagtggcaccgcgttagctggcagcatcacgcggctgcctaaaagtgccattgcagtcatgcattactttgcctctaacccgggtgataaggctcgctacgccagtaacgttctcgagattgaaatacgtgaggttaatcgtctgctgcatggaccgctaaggactttttgtaagcaagatgagtcttttggctggagtgtttccggccctgctttagcggttctgaataaacttttcccctga

SEQ ID NO: 7823 - DNA, 3030 bp, Pseudomonas fluorescens
atggcatttgtagacgttataaaaggcctgctcggcaaggccggtgaagaactagcagcgcagcctgggtttgattttcaggccgatagccatgggctgaatttttacctgcccaaagcggctttcgttgcattgcaggaaggccgcggcagcacgctgcagaaagtccagctgattaccctgcgtatgcttgaagagcagggcctggccaatcccctgcctaatggcttcatggtgttggaggctgaccttgccggtcttgaggccgagcaagctgacttactccgactgccgcctcgcttgcccggctcgtttgcggcccaaatcagtggccgcaccggtaacagcagttttcgcgttgcgctgcatttgaagatgactgatggcgatgcgccttttacccgcaagggcccgctgctctatttgacttcaaccgaggcttaccggttgacgcccgcagagttgatggggctgttggcctgggaacatcatcaggagctacagcccgagcagcgaggcgaagcggccaatcttcgcctgatggccgaactgcaaacggctgcacgcagcggtatgcgtatcgatctcagccatttcgagcgcttggacgtggtggtgccacaaaacatcggtgtagtggctacacgtttgcccgatggcagtttgttgctgtgccccagcttggggaatggcaccacaccggatcagctggaaaaacgctggtcgcagttagatatgggcgccaatgatggcgtactgcggatcgacaatcgggtcgtactgcttgatccgcagaagatggcggccatcaaggaagtcctgagtaataagcgtattcctgcggataaagtcgccgaattcttgaccacgccaagcgcctttctcgatgccgcgctagtaaatcttgatatggggttttccatcagagtagcgggtatcggcaagctgcagcatatggattttggagaccaagacagccagaaaaatgattggtttgcattggataaacgtccagcatccgccgccatcatcctgaagttagtgcaaacgccggaagagctggccaggtttcaggaggtttatgcgtccgccaaggagcagggcgcaacaagcctgacttttgctggccaggttattgatgtctccaatccagaacaagttgatgagcatattcaaaaggtccaagaggcttttgaaggtgcaacggctgcacccgttgtcgagcctgatgaacctgatgaggtgaaagaaacagtcagtgtcctgctgcgcgatgccgacgatattcaccagggcttgctgcgaaaggccggggaggccaagccattccgggaaccggattgggatgcatatgctcgccagccatttccgcaccagagggagggtgtggagtggatgatgaagttgcttggggcagccattcaagatgaccacgccaacctctatcggctgcagggcgctttgctggcagatgacatggggctgggtaaaacctacatgtcactggtgactgtgggtgagtacctggctcagcaaaaggcggtcaataagtcgcaaaaaccgattttggtagtcgctccgttgagtttgctggagaactgggaggacgaggttgatcacacgttcaaaagcattccgtttcgcgacattgttgttctgcaagccgggcgtgacctcaatcgcttccgcgtaaaaggcgcagagcgtgagtcggtgcaagtagcatcgctggcagatgaagatggtcagatggatggcgaggccatacgttatgctctgaccatcgggcctgaggccggcgcccagcgcctggacatggaccggcggctggtgctgaccacctatcaaacccttcgcgattatcagttctcgatgtgcatgattgactggggcatggtgatcttcgatgaggcgcagaacattaagaaccctaatgcgctgcaaacccaagcagccaaaggcttaaaagctgacttcaagctattggcgaccggcaccccggtggaaaatagccttggcgatttctggtgtttgatgcataccgcgcagcctggtgttttaggcggttggagccagtttcgtgacaactggataaagccgattctgcatgcgccagaggatgagcgtgatgcggtgcggcgcaaggttggggccgaactacgtgatgctgtagggatttttatgctgcgccgggtcaaggaggaccagctcaagggcttgccaagcaagaccattcacagcggcgtcgctcagccgacaggtggtttgttagtgcatacgccacagctttcgcgagggatgaagggcattcagctaaaggcctacgatgcaattttgtctgactttcgtgaacgacgagccactgaggatatgcgcggcacggcgcttatggcgctctcccagttgcgtgagatatccctccatccgcgcctgcgcgaagagacgcagctcatgaccaacacagcaaaggatgcacgcgaggttatggccgagtctggcaagttgactgtgttgctggagttgctcgatcagattcgccagaaaaacgaaaaggttattttgttcatggtaacaaagcggctgcaacgcttgctcaagctgtggctagatcaaatttatggcttaaatgtggccatcattaatggtgacaccgctgctgtagccaagaaagccgacatcctaacgcgcaaacagttgatcacagcttttgaggccaagccggacttcaacctgattatcatgtcaccggttgcagcaggggttggtttgacggtagtaggcgctaaccacgtcgtccatctggagcgccattggaacccggccaaagaggcccaggcttctgatcgcgtgtaccgcattggccaaaccaaggaagtacatatccacctaccagcagtcttgcatccccagtatgattctttcgatgtacatcttgatcgtctactgcgtggcaaattaatgctcaaagatgccgtggtgacgccagaagcagtaagcgaaaatgagatgattcagtcgttggggttgtag

SEQ ID NO: 7824 - DNA, 2193 bp, Pseudomonas putida F1
atggatttttcgacgctgcggcacctatgggatggtgcaagctccgagcagttgatcgcacccttaatggttgctgggtttgtcgccattttgtgcaccttttattttttccactatttctacaaatctttcggtcttagcgcccagctgaagcgtttgatcaaaagcttggagaacgcaaaaacagttctcccgtcagatcggcgatcagagctggagcgactgttcaaaggctccaatctggagcattcgtggcgcgaatatgccgaaacgctgcacgaccaatacgagctcaaggaaggcgaacaggtaattggccgatcgcgagccaccgcagcagctgcacacttcttttcaccgcaaagtgtggttgataccccgctgggaaccgaattctataaacatctgcctggcattctgaccgggatcggtattgtcggaaccttcttcggcttgatgctaggcctccagcactttgacccgagcacacccgaacaggttaacgccagcgtcgataaactattgaaagacgtgttgttcgcattcttcggctctttcatttcaatcatggcctccatcgctgtcacgctcactgaaaagttgcgtttggggcactgttacaagctgcttgaggcactcaacgaaacgatcgacgggctttttgacagcggtgtcggtgaggaatacctggctgagctggtgcgctctagtgctgaaagctcggtgcaaacccgccagctgaaggacagcctggtgactgatctgcgggaaatgttacagaacctggttgatacccaggtccgtgaaagcctcaaattggcagataccttgtcgacgacgtaccgcgactctgggcagctgttggccgaccaggtgagcggtgcaatcgagaacagcctcaaatcgccgcttgaagccatcgcgggtgccgtgcaggccgccagtggcgatcagtccgggcaggtacagaatctgcttcaggatgttctggttgccttcatgaacaagctggaaggtacgttcggccagcagttcaatggcctgcacgagttgatgggccagtcggttgccgccatgcagtcgatgcagcagggcttctcgacgctgatccaggatatgcgttcggctagcgagtcctcgaatcaaagcagttcgaccatgattgcccagctactggccaatatgcaggcaggacaaagcgccatgcaagccgggatgaacgagatgctcgccaatcttcaggcttcggttgcccgtatcggcaacgaaggagagggggctggcgcgcgaatggccgagcaactggagaagctgttcgctcaaagcgaggctcgccaacaggcaatggctgagaatctccaggcttttgtcgagtcgatcaagcagagcatcggccaaggccaacaggaaaccatggccaagattgcaggctcggtcgaggtgctgggtgagcagctttctgcagtcttcaagcaactggaacagggccagcagcagatggatcaatccacccgcgctgcccaggcagacctgcaccaaggtacccgcgaactggtgggcggcctcgacgaacaggtcaaggcgttgctgcagacggtttccgagcaacagaagtctgcccaggacaccgtcaatgcattgagtgcccagactgagcagcatctgcaaagtatgcagctgggtgcggataagatgcgggcggcggctgagcggtttgaaaccgccggacaaagcgttgcgcgagccagtgagtcgactgcagggctgatgggtacagtccagggcgcaggagctgagcttgcacaggcatcccgtgagctgaataccgtagtcgcggactaccggaacaatcgtgaagcgctcgcgaaaacgctcgcggtcatcgaaggggtagttgccagtgctcaaggggaagccagcggtcgcagtcagtatctccaggacctgaaggttcaaagcgagcggatgcaggcacttaaccgtgaagtgtatgaatacctcgaaaacatcagtggtgtgctgggtaacggcttcaaggaattcggtgagggtatggaccgggcgttgaggcaaaccttgggcagcctcgacaccgagctcgataaagcagtcaagagcctcgctggcggtgtggaaggggtcaaagaaagcctcgaagacttcagcgacatcatggaacgcatcaggcggtaa

SEQ ID NO: 7825 - DNA, 744 bp, Pseudomonas putida F1
atgtttggtaagcaaatgccttcggctgcccgttccaaggacgagggagagaagcctttctggatttcctttgctgatttgatgaccgcgatgatgattctgtttctcgtggtcatggtggcggctttgagctccgtgacgcagcggatcaaccaggcggagcagggggagaagcagcgtagcaaggacatcagtcagatttgcgagcacctgagcctcaaggcgaagactgccagcaagaccatcgtcgtggactgcaaggacaaccggatcagcttcggcgatgctggccgctttgggcataaccagtacgcgctgagcaacgatggccaatcggcacttcaggaggtcgtgccgatgattctggacgcggccaacagtgaagaggggcgtaaatggttcaagcaggttgtgatcgaagggtcgaccgacactgacggttcctacctgtataacttgcacctgtcattgcagcgttcggagtgggtgatgtgcagcctgctcgatagtcgcagcccgctccaggtcggattgtcgccggagcatcaacagcagatcagatcgatgtttctggcgggtggtgtgtcgttcaacaatgcaaaggacaccaaggaagaaagccggcgagtcgagttgcgcatgcaattctttggcttgaaggagaaggagagcagtctcaagcctgatgtgccggtgttcactaacactgacgtggaaaaatgtcagttggcgatgaatcgatga

SEQ ID NO: 7826 - DNA, 1626 bp, Pseudomonas putida F1
atgaccagctcgatcgcgaggctttccgtcgccattagcaaaagcctgtcagctcatcgcacagtgcatgccccagagccgttggagcgcttccctcgtctgactgctgcgggagtcgacctttacgagcggttcgagcgcgctgaaaaggccttgccgccacccgaagaaaagcgccgtgctgcgataagcaaatttcgcaatgtgctgccacttaacgcttcagaatggcgcctggtgtttgccggcctttcggacaagagtgaacgcgtcggaccgatattggacgatgaccagctttacgcccgggtgcataaagaagttcataagcgtatcgagaagcgagaactgagccgccgggactggttggcgctgtgcttcagctactttggctacgatgccgctacgcccgagcagaacgccaattggtgcctattgcgcgaagatgttcagctcggtttcgaatgtgtccgcgaccagcagaagcgcgtgaaggaatgggtgcagatcgttcagcaacatcaggagcttttttccgagcaagcaggtgccacgctgggtgaccaaatgttcaagggcgagatcagcgacctttcggcattgcagacgattgcacagatccccgacaaaagttggctgtggaacaggatttttagcgtactggtttctcgtattttcttgttggatgacgctgagttctctcagcgtttggccgacctggtcgacatcggccggcagcaccaggggtacatgaatcagattctgagtgcatgcctgtcgcgttaccacttggcagcttatcgggagaagccatcgtcactgctcaaacagctcgcgctcgacaattggggtagtccgcagatccgctccagacaaaacagctggctgcagtatgtcgataaagatgtctgtgcgatggttgtggcgtggtttgcgaaggaggatctggaacacttcttcaacctgctgaagggcgatgatgacgtcgaccagtcacgccttttctactggctgcggtttgccaaccagatgagctacaccagaatcatcatgggctcggatgcatggagtaacgaaggtcgagactttgctcatttccgtgagaagaacaaagggcgtcttggccgcctgataggcgcagctggtcataacaatgctgtcgtcatgcagatcgggaactactttttcgtggagttctcgggaatgggcgcctgctatgtgtatcaggcagacaaagctccgtttgatccagagaagtcccagcttggactcgctaccgaaattaagcagcgccatcgtgtggtggagtggatgcgtcacttcccggcgccgagccgctcagatcgcgttgagggatggctgatcaagttcgatgacaccctagagagactgggcattcgtattcaaagccatgaggtagagcctgtcacgtcaagactgctttcgtttgactatcagcttcgtgagtccatgaggtcagtaaaacacacgctccatgatcgacgtgcgcagggcggtgcaatccatattcaactcgaagaaaacgatcaggctgcaaccatcgccctccggcgattgggctttaagcccgagaacaataagccactacggttctggagagagtga

SEQ ID NO: 7827 - DNA, 3249 bp, Pseudomonas putida F1
atgctcaagcgtttcctcaaaggcattggcctgcagccgaattcggcagcagaaaagactaagccggctttttccattgaggagcagggtatctgttatcccctgagcttggcggagaataccgagtcctggtcgctggccagttatcttgatcagctggaagaagaagagttcgtctcccagctgagcgatcgctggctgctgacgtgggatgagctctaccggctgctggatgagcccgagcacgtaacaagcctgccgctattggggttgccgccgctgacagtccttatccctcaattgagcagccagggcagccttgcctcagacgatttcaaagtctccatcagtggctggcgtgatccgcagtccaatgccaatgtgcaggtgcagcgaacgggggccatcgttcaatatcagggagccacagaactgctgcctgaggcgtcctggaaactgactggtgcggtacgacagctttatctggcacaacaaaatgagcccggtgaagtaaccaaccagatcggctgggccagcatcagaaagctagcgcgcaaggctggcgctggtatggatggcttcttggacaagaccgtcgttatcaaacccgagaaactgcggctcaacccacgaaagtcgacgcttggcgacacaccagttatcgagttgcaaccgagctttgatggccagccggccaactggcttgagagctttgacggtgccaagcaggttcaggatcgataccgggtaacgggtgacgatggctcgctgactcatgttctgattgagcctgaagtcaagtcggtactggactacgtgcgttcgttgcctgggcgtcgggttgctggtgacgatgccctttcatttgtccgtaacccttacagcacactcggcgaaagtgccgcacatgtgctggatgccgaatcctatgaagacgagctcgccgaggccggtattttctttcatcgcttccatctggaacccaaaccggatgaagcgggccagcgtatcgagcaggtaacactgacgctcgaaccgatttctccaaccccgcaagcgcctatcgaaattgagttcaaagcggctcatgagttcgcgccgctggtgcatgaattgcacctgaagttggccgccggcatgcctgcaggcttctggcagggctatgagctggaactcagcgattttgatttgcgccagttggcaggcatcaatgacctgctcaagcgttggcaaaacgaagcggccggaatcgagtttgaatcggtcctggacctttctctctacggcgaccgtgtgacaggcattggtgaggcggaaagaattacttcgcctttcctggtcaaagaggcgaccgagaactggttgccgaaagatgtggcagcgctgggcatcgacgcagaaatcctgggtcggtgggatccttccgatcgtgctcaatttgaagcgtttgggcagcggctggatgaagcacgcggtgccggtgatgacacggtctgtttgccagagtccgaaacaccactctcgattgccgcagcagaacaactgttggatgcctggtcgaagaagattgcacctgtcgagaccggccaggttgagcaacgggagaaagttggccgcgccgtactgcaaatcggccacaatattgacgagccgacttacgtacaggtacgtcaagcagcgttacgcgccgctttggatgcaacgccagagttgcctggtttgctcaagcctgaggtcgttctgcgtgaccatcagctgcaaggcgtggcgtggttgcagcatttgttccgcttgtcccccacggacgtatcgggttgcttgctcgctgatgacatggggcttgggaaaacgatccagttgctcaccttcctggtctggtacttggaacagtacccaaacgatcagccaacactgatcgtcgctccggtttcgttgctcgataactgggagcgagagcttcaccgtttcttctttgctgacgcgctgcctgtattgaaactgtatggctcagccctgagtgcagtgaagttcaagaaggatgaaatccctgcggacttgaaagccaaaggcatcaggaacctgctgcgcccaggttggatgggcgatgcccgaatcgtcctgacgacttacgagacgttgcgcgatcaggagttttccctggcgcgtcagcaatggtccatcgtcgtatgtgacgaagctcagaagctgaagaacccggcggcactggtgactcaggcgatcaaagccattcccgcacggttccgagtggcgtgtactggtacaccagtcgaaaatactttgatcgatctatggtgcctgttcgactttattcagccaggattcctgggcggcttgaaccagttcggtcgcgactatcagcgccctatcgaagccacactggagcgtgatacggaggcgctggaacgcctgcgtgggcttatcgagccgcagactttgcggcggaccaagcaggacatcgccaaggacctgccggccaagatcgaggacgcagcatgccgttcacttggcatgcatgccctgcagcgtaacctgtatctgtccgaagtatccgcatacagccagaagcagcagatcgaagagcagctcgatcagaagacctccggcatgctggggttgctgcacaggctcaagctgatttgtgctcacccttacagcgttcagccagacacccggttgcgcgacaactcgccgaagcttcagtggctgattcagactctcgagtcgatcaaaagggccggcaacggcgacaaggtcatcgtctttaccgagttgcgcgatattcagcgggaactgcagcatgcgattcagcagcatttcggctttcgggcaacggtcatcaatggcgataccagtacaagcagtcagagcgccaatagccggcagcggctgatcgatcaattccaggagctgccaggtttcgccgtcatcatcctgtccactatcgccgtcggattcggggtgaacgtgcaggccgccaatcacgtcattcactttacgcgctgctggaacccggccaaggaagatcaagcgacggatcgagcctatcggattgggcagcagaaggatgtgtatgtgtactatccgacggttcgagatgcagcgatgccgacgtttgaggcgacgctggatgaacttttgagtaagcgacgggcgttggcgcgggatatgttgagtggggcttcggagcttcaggcttcggattttgagggattgctgggggcgcggtga

SEQ ID NO: 7828 - DNA, 2193 bp, Pseudomonas putida ND6; identical to SEQ ID NO: 7824

SEQ ID NO: 7829 - DNA, 744 bp, Pseudomonas putida ND6; identical to SEQ ID NO: 7825

SEQ ID NO: 7830 - DNA, 1626 bp, Pseudomonas putida ND6; identical to SEQ ID NO: 7826

SEQ ID NO: 7831 - DNA, 3252 bp, Pseudomonas putida ND6
gtgatgctcaagcgtttcctcaaaggcattggcctgcagccgaattcggcagcagaaaagactaagccggctttttccattgaggagcagggtatctgttatcccctgagcttggcggagaataccgagtcctggtcgctggccagttatcttgatcagctggaagaagaagagttcgtctcccagctgagcgatcgctggctgctgacgtgggatgagctctaccggctgctggatgagcccgagcacgtaacaagcctgccgctattggggttgccgccgctgacagtccttatccctcaattgagcagccagggcagccttgcctcagacgatttcaaagtctccatcagtggctggcgtgatccgcagtccaatgccaatgtgcaggtgcagcgaacgggggccatcgttcaatatcagggagccacagaactgctgcctgaggcgtcctggaaactgactggtgcggtacgacagctttatctggcacaacaaaatgagcccggtgaagtaaccaaccagatcggctgggccagcatcagaaagctagcgcgcaaggctggcgctggtatggatggcttcttggacaagaccgtcgttatcaaacccgagaaactgcggctcaacccacgaaagtcgacgcttggcgacacaccagttatcgagttgcaaccgagctttgatggccagccggccaactggcttgagagctttgacggtgccaagcaggttcaggatcgataccgggtaacgggtgacgatggctcgctgactcatgttctgattgagcctgaagtcaagtcggtactggactacgtgcgttcgttgcctgggcgtcgggttgctggtgacgatgccctttcatttgtccgtaacccttacagcacactcggcgaaagtgccgcacatgtgctggatgccgaatcctatgaagacgagctcgccgaggccggtattttctttcatcgcttccatctggaacccaaaccggatgaagcgggccagcgtatcgagcaggtaacactgacgctcgaaccgatttctccaaccccgcaagcgcctatcgaaattgagttcaaagcggctcatgagttcgcgccgctggtgcatgaattgcacctgaagttggccgccggcatgcctgcaggcttctggcagggctatgagctggaactcagcgattttgatttgcgccagttggcaggcatcaatgacctgctcaagcgttggcaaaacgaagcggccggaatcgagtttgaatcggtcctggacctttctctctacggcgaccgtgtgacaggcattggtgaggcggaaagaattacttcgcctttcctggtcaaagaggcgaccgagaactggttgccgaaagatgtggcagcgctgggcatcgacgcagaaatcctgggtcggtgggatccttccgatcgtgctcaatttgaagcgtttgggcagcggctggatgaagcacgcggtgccggtgatgacacggtctgtttgccagagtccgaaacaccactctcgattgccgcagcagaacaactgttggatgcctggtcgaagaagattgcacctgtcgagaccggccaggttgagcaacgggagaaagttggccgcgccgtactgcaaatcggccacaatattgacgagccgacttacgtacaggtacgtcaagcagcgttacgcgccgctttggatgcaacgccagagttgcctggtttgctcaagcctgaggtcgttctgcgtgaccatcagctgcaaggcgtggcgtggttgcagcatttgttccgcttgtcccccacggacgtatcgggttgcttgctcgctgatgacatggggcttgggaaaacgatccagttgctcaccttcctggtctggtacttggaacagtacccaaacgatcagccaacactgatcgtcgctccggtttcgttgctcgataactgggagcgagagcttcaccgtttcttctttgctgacgcgctgcctgtattgaaactgtatggctcagccctgagtgcagtgaagttcaagaaggatgaaatccctgcggacttgaaagccaaaggcatcaggaacctgctgcgcccaggttggatgggcgatgcccgaatcgtcctgacgacttacgagacgttgcgcgatcaggagttttccctggcgcgtcagcaatggtccatcgtcgtatgtgacgaagctcagaagctgaagaacccggcggcactggtgactcaggcgatcaaagccattcccgcacggttccgagtggcgtgtactggtacaccagtcgaaaatactttgatcgatctatggtgcctgttcgactttattcagccaggattcctgggcggcttgaaccagttcggtcgcgactatcagcgccctatcgaagccacactggagcgtgatacggaggcgctggaacgcctgcgtgggcttatcgagccgcagactttgcggcggaccaagcaggacatcgccaaggacctgccggccaagatcgaggacgcagcatgccgttcacttggcatgcatgccctgcagcgtaacctgtatctgtccgaagtatccgcatacagccagaagcagcagatcgaagagcagctcgatcagaagacctccggcatgctggggttgctgcacaggctcaagctgatttgtgctcacccttacagcgttcagccagacacccggttgcgcgacaactcgccgaagcttcagtggctgattcagactctcgagtcgatcaaaagggccggcaacggcgacaaggtcatcgtctttaccgagttgcgcgatattcagcgggaactgcagcatgcgattcagcagcatttcggctttcgggcaacggtcatcaatggcgataccagtacaagcagtcagagcgccaatagccggcagcggctgatcgatcaattccaggagctgccaggtttcgccgtcatcatcctgtccactatcgccgtcggattcggggtgaacgtgcaggccgccaatcacgtcattcactttacgcgctgctggaacccggccaaggaagatcaagcgacggatcgagcctatcggattgggcagcagaaggatgtgtatgtgtactatccgacggttcgagatgcagcgatgccgacgtttgaggcgacgctggatgaacttttgagtaagcgacgggcgttggcgcgggatatgttgagtggggcttcggagcttcaggcttcggattttgagggattgctgggggcgcggtga

SEQ ID NO: 7832 - DNA, 2346 bp, Pseudomonas putida LS46
atgatggacctgctgcaacacctgattcctgacttcgcccatatgttcagcgccaaccccaatggcatcagtgcctggttctggtcggccactgcgcttgtctttgttttttccttttgggcgctggttgtgcattaccgccgcttcagcgcgcggatgcatgctctgcactcgctgctggaagggcagagcaaggagacgttagcgcagaaccgccgggaaaccctacagagggcgggtgagctcaaggcgccgaatgtaggcatgctctggcgtgagttcgacgagagcctagtgctgtcctcggatcagaagcagctgttcaacacgctggatgccgagcacttcttcaacccgcgtacgctggctggtggtttgacggccagccggttgctggcggcagcgccaagctttctggtggccatcggcgtgctgggtaccttcgtcggtctgaccgttggtctggaagggctggttggcagcacgggcgagatcgaagcactcaagggcgggatcaacaagctgatctccggtgctgccgtggcctttatgacgtcggtctggggtgtgcttttcagcctgctgctcaacttcatcgagaagatgttcgagcgtgcggcgctgcaggggattcaagcgctacagcacgatgtggatgcgctgtatccgcgcattcccgccgagcagtcgctggtgcacatcgccgaatacggcaaggagagcaaggaggcgctgcaggagctgcacgagcgcatcggcgagcgcctgcaggaaaccctgactggcatgaacgaggcgatgcagaccgcactcactgatgccctgaacaacatcatggcgccggccattcagaccttggtcagcaccaccagccagcagtccactcaggtgctggaaagcctggtaggcaattttatggaaggcatgacctcggttggccgtgagcagggccagcagatgcagcaggcagcggctaatgtgaatgccgccgtgagtggcatgagcgagcagctgaatcagttgttcagcagcctcagcgagcagcagagccagcagatggcggtggtgcagcagcaaagctcggccttcgaggcgcaattgcagcgcattagcggttctgctgatgatcgtcaggcgcagatggaacagcgtttcagcgagttgatggctggcctgagcggccagctacagagtcaactgggtgcggcgcagcagcgtgacgaagagcgccaggcgctgttcgagcgggtattggggcaggccagcagcagccagacggcgatgctggagcagttctcccattcgacccgtgagcagatgcaggcgatggccgaggccggcaacgagcgccataacaatctggagaaggtgttctcccgtttgatgatgaacctcaacactcagctcgatacgcaaatgggcaccgccgagcagcgtgagcaggctcgcgcgcaacggcatgagcagcaacaggccgagctgctcgaacgccagcagctgatgctgggcagcctggggcagagcagccagcagcagatcaatgcactcaacgaggcggcggcgcagcaacaacgtgaattgcagagcaccgtggacaagctgctgggtggcctgaccacgcagatcggcacccagggtgagcaggccgaggctcgcgagcaggcgcggcaggagcgcttccagcagcagcttgagcaggttgccctgcagcagcaggagttgctggccggtttggccagtgccgtgcaggccactcagcagcagagccggctgatggcggagcagcaccagcagttgctcggccagctcaagcaggcaaccgaggcggctgcacagagcagcaagcatatggacagcagtgccaatcagcttggcctgctatcgaccaacgtgcgctcggccgccgaactgttgggccagcgcctggaacaggtgactgcacgcatcgagcaggcaggcgggcagaacgccgaactggccggccagctgcagcagcaggcgacgatcctggcgcagttgcagggcaccctgctggaaggcgctcagcgctttgaacaggctgccagcgaggcgcgtaacggctttggcgagatgaaaacgacccagcaggaattcctcgccggggtgcgctatgagtttacctcgctgggcgtggcgctgcgtgagcaggtcgaggcggtggagaagcaggccgaggagtggctgcgtagctatgccggtgaggtgcgtgtgcagacggatgaccgcatgaacaagtggaatgaggtctctcagaactatgcggatcagatgcaccgcatcgtgcagaacatgagcagcattctggatgagctggaggcacgctaa

SEQ ID NO: 7833 - DNA, 765 bp, Pseudomonas putida LS46
atgcgtctgggcaaagccaaagaggtcagcgtcgacgaggaaaatccgtactggatgtccttctcggacatcatgtcggcgttgctagtgatctttattctggcctcggtgattctgatcctgcagttgatggagattcagcaggagctgaaggagcggcaggttcagttcgaggaagaaatcgtcgaactgaaaaaagctgagcaggtgcgccgcaccattctggatgaagcggttgaggccctgcgccgtcgcggcatcaaggtcgaggtcagcgaaaatcatacggtactgagtattcctaacgatctgctcgggttcgacagcggcgcctatgacattcatgccgcttaccaggaacgtgcgctggagatcggcaaggtgatccatgaggtgatcgcccgtgatgaccggattgagtatctcgataccatcttcattgagggccatactgacaatcggccgttcccggggtttatgggcaagggcaactgggggctctcaaccttccgcgccatttctttgtggcagttctggggcgctgccctgccgggtgatgagcaactggccagcctgaacaacaaggatggcaagccgctgttctcggtcagtggttacggtgaaacccggccggtggtggtagaccagcaggcggaagaagacttcaagcgtaaccgccgtatcgacatccgcttcaccattcgccgcccggacagcgctcagtacgagcaggtgcgtgagcgcctggaagaggtgcagccgtga

SEQ ID NO: 7834 - DNA, 2046 bp, Pseudomonas putida LS46
gtgaagttgcccccgctgcatatgcccgtggtcgagtggcctgccaggacaattgaagtctggcagactctgatcgaaaagggggccaggatggcggcagcgacagggcagggtgatgcgttcgaggcaatgctggcgcgtttgcgcgatatggccagcaccgggcgttttgatggcttgccggcgttgctcaaacgccggcttactgcgcgagcgctgacctggttgtggttgaacgacgaggttatcggcaggcgcctgttcagtgtccgcttgctcactgtgctggtggaggcgcagcagccgaggctgacgcgcattactctgcagcaactggcgcagttctacttccgtcgcttcgacaagctggacgagcacgaggggctgcgtgaaaagcttgagcaggttttgcagcagcaactgcaattgttgcctgaacccagagtcagcgggccgcaagccgatccgctgttaaccctcaagcgtgatggacattggttgttgccgcttgacggcccggtacaactggtcgagcaggttcgcgacagcggccatgagctgagtgcaacctttgaggctttgggtcttcagggctttgacgatgggcgctatggcgatatctgccgggcgcacttctacctggagaccctgcgagggctttcgcccggtgagtatgacccggtgctggacgaactgcagaaaccctctgtggccaaggcgccctacgagggcgagcggcgaatcggccatatcgcgctggagattttgatcgaccgcgtcgggcaggaaccgggcgatgcctggttgaactttatcctcaatctggcgggggatccgcgtatttcccgcaactcggccaattaccgagagtggtggcagttcctcggtgacgagcgggtgcataaggttcggggttggttgtccaaggaagacttgcgtctgtttttgcaggcggtggaacagttcggtattgaaactcagaacgacgatctgcagcgaatgttccctgcacgcaagcagttcctggaaggcctcttcaagctcaagctgatccgcaatacccgtttgctgcttggtgggcgggcgcagcattcagtcaaccgcatcctcggcaaagaggtcaagaccacatttgcgcgtatggacgggcagatgaacgacaaggcggtgatctatctcgattgcggagatttccacctggtcgagggctcgcacagcttcagagtttgggtttatctcgcctcgccgggcgaggctctgcgctcctatgagcgctcaagtttcagtcacgctgatctgaccacggctattcctcaagcctacaagctgctttatcccagtctgccctatgatgccttcacgcatcacccgccgctttcctggcagaacagagtgttcagtttcctggctgataacggtatcgctctggatatcgagcagttgctcaatcgcagtgactaccagtcttacctgcgcaagtttggtatgcctgtggtcaatgccaggcgaacggcagtgccggctcctcgacagctagattctcctgcagagtcggcgcgttccgctgctgacaggactgaggcgacaatgctgtcagcgcctcaggggcgtgcgcctgtagcacaggtaacgagagaatccagagctactcctgcacaagaaccattggcttcgcgtgctgtgacgtcttctccgtcttcttcagtacggcaaggcactcagcagcattatcccgtagtgacgcgctatgtaagtccttccgtagtgaatgctcctgtcacggctcctccgatgcaggcaagcgaaggacggctggcagggttgaaaccctcggccctgaagatactgcgctactttgtggataacccaggcgataaagtccgctatgcggcgaatgtgttcggtgtcgaaacgcgagaaatcaatcagatcttgtatggcccattgaaggacatgtgcgtgcgtgatgagcagtacggctggacggtgaatgaggcagcacgtctcgcgcttgaggcgttggatgaacaggaaggggccgaatag

SEQ ID NO: 7835 - DNA, 3039 bp, Pseudomonas putida LS46
atggggttgatggatattttccgctcgctcatcggtgagcgggatggcgcgctgagtactcagcagggctttcagtcgcaaccggactccaatggcttgaacttcttcatgcccacgccggccttccaggcgttgcaaactgggcagggtagtgcgctggcaaaagtacagttgatcgtgttcaacatgctgactgagcagggcattgctgaaaccaccgctaacggtttccacatcggtgccgaagatgtttcggggatggaccttgagcaggcggaaatcctgcgcttgccaaggcgcttgccggggcgctttctgacctcgatcagtggacgcacaggcaacagtggttttcgtgtggcgatcaccttggaaatgccggatggcgctgccagcttcacacgcaaaggcccttatttgttcctgaccagcagtgagtgctactggctgacgccggctgaaatgatgggtttgcaggcctgggagcggcatgaggcgctgctgccggagcagcgtggtgaggcggccaatctgcgtttgatggctgaactgcagaccgccgcacgcagcggtatgcgcattgacctgagccacttcgagcggctggatgtggtggtgccggagaacatcggggttatcgccacgcgcttgccagatggcagccttcagctctgccctagcctgggggatggctccactgctgatcagttggagaaacgctggtcgcagttggacatgacggccgatggcggcgtgctgcggattgacaatcgtgtgctgttggtggatcaggcgaggatggagggtatccgcaatgtgctggcgaacaagcgtattccggctaaccaggtaaacgagtttattgcgacgcccacggcgtttctcgatgctgcgctggtcaatctggaggtgggcttctccgcccgggttgcgggcatcggcaagcttcagcacatggacttcggcgcgctggatgcaactaagaatgactggtttgcactggacaaacgcccggcacctgccgctattctgggcaagctgattcagtctcccgaggatttgcagcgcttcgaaggggtactgcaggcggctaatgaacagggcgcgacgagtgtggagtttgctggcgaggtgatcgatatctccgatgccccggccgttcagcaggagctggccaaggctcgccagaacatgcacccggtcagcgatagcgaatcgcgtgacgaggagtacgagcccccggaaagcaaggaaaaggtcggggtcattctcaaggatgctgacgagataaattcggcactattgcacaaggcggctgctgcaacgccgttgactgtgcccgactggtcggtttacgcccggcagccgttccctcatcagcgtgaggggatcgagtggatgttgaaactgatgggcgctgcgttgcaggatgaagcggatgacctgtatcgcctgcagggaggtctgctggctgatgacatgggcctcggcaagacctacatgtcgctggttacggtcggggaatatctggccagtcagcgcgcggctgacaagccacagaaaccagttctggtggtggcgccgctgagtctgctggaaaactgggaggatgaagtcgacaagactttcgccggcattccgttccgcgatgtggtggtgctgcagtcggggcggagtctgcgcgactatcgcgtcaacggtgctgagcgcgaatcggtgcagttggcgtctatgatcgatgacaccagtggcatggtggatgagcagagcattcgctatgcgctgcatgtagggccggaagctggtgtgcatcgtctggatatggatcgccgcttggtactgacgacctaccagaccctgcgcgattatcagttctctctgtgccgtatcgactggggcgtggtcatcttcgacgaggcgcagaacatcaagaaccccaatgcgctacagactattgcggccaaagggctcaaggcggatttcaaactgctggcaaccggcacgccggtagaaaatagcctgggcgatttctggtgcctgatgcatacggtgcagcccggtttgctggggggctgggaaaacttccgcgatacctggatcaagccgatcctggctgccagcgatgatgagcgagatgaggtccgggcgtatttaggcgagcagctgcggcgtgcggttggcatattcatgctgcggcgggtgaaagaggatcagctcaagggcctgccaaccaagaccatcctcagtggtgtcgagcaagctgatcatggcctgcaacggcatgcgacgcagttgggtgtggtgatgaaaggcaaccagttacagatctacgatgaagtcctcaacagctaccgggcgcgacgtgcgagtgctgaggatatgcggggtaccgcacttgcggcattgactcagctgcgctcgatttccctgcacccacgcctggagaatgagccggcgctgtacagcgaggacggcaagcaagcgcggcaactgatgatggagtccggcaagctggcggtgatgctgcagttgctcgatgagatccgtagcaagggtgaaaaggtcattttattcatgatgaccaagcgtctgcagcgagtcctcaagctctggctggaccagatctatggcttgaatgtatctgtgatcaatggcgataccaaagcggtcgcgacacgtgcggaagacatgacgcgcaagcggctgattgccgaatttgaagcccacggcggtttcaatgtgctgatcatgtcgccagtcgctgcgggggtcggtctgaccgtgatcggggccaatcatgtggtgcatctggagcgccactggaacccggccaaggaggcgcaggcatctgaccgggtttaccggatcggccagaccaaaccggtgttcgttcatctgcctgctgtcactcatccccagtttgattcattcgatgtgcaccttgaccgcttgttacgtggaaaactgatgctcaaggatgccgttgtgacaccggagtcggtcagtgagggggagatgattcagtcgatgggcctttaa

SEQ ID NO: 7836 - DNA, 2193 bp, Pseudomonas putida HB3267
atggatttttcgacgttgttgcacctatggggtgcagcaagctctgagcagctgatcgcacccaaaatggttgttggtctcgttttcattctttgcgcttggtacttcgtccgttacttctgtaggtcattcaagcttagcgcccagctgaaacgtttgactgttagcttgcagaacgtgaaaactctcgatccatctctccggctttctgagctggaacgtctgttcagtggcagcagactggagcattcctggcgcgagtatgctgaaacgctgcacgatcagttcgagctcaaggagggcgaacaggttcttctccgatcacgagccactgccggtgctgcacatttcttctcacctcaaagtgtggttgataccccgctggggaccgagttctacaagcacctacccggtattttgaccggtatcgggatcgtcggaaccttcttcggcttgatgctaggtcttcagcactttgacccgagcacgcctgaacaggttaacgccagcgtcgataagctgttgaaagacgtgctgttcgctttcatcggctccttcatttcaatcatggcctctatcgccgtcacgcttactgaaaagtggcgcttgggacactgctacaagctgctggaggcattcaatgaaaccatcgatgggctttttgacagcggtgtcggcgaggaatacctggccgagctggtgcgatcaagtgctgaaagctcggtgcaaacccgtcagttgaaggacagcctggtaaccgatctgcgggaaatgctacagaacctggttgatacccaggtccgtgaaagcctcaaattggcagataccttgtcgacgacctaccgtgactcggggcagctgctggccgaccaggtgagcggcgcaattgaaaatagcctcaagtcgccgcttgaagccatcgcgggggccgtgcaggccgccagtggcgatcagtccgggcaggtacagaacctgcttcaggatgttctggtggcgtttatgaacaagctggaaggtacgttcggccagcagttcaatgacctgcacgagttgatgggccagtcggttgccgccatgcagtcgatgcagcagggcttctcgacgctgatccaggatatgcgttcggctagcgagtcctcgaatcaaaacagttcgaccatgattgcccagctactggccgatatgcaggccggacaaaacgccatgcaagcggggatgaacgagatgctcgccaatctgcaggcttcggttgcccgtatcggcaacgaaggggagggggctggcgctcgaatggccgagcaactggagaagctgtttgctcaaagcgaggctcgccaacaggcaatggctgagaatctccaggcttttgtcgagtcgatcaagcagagcatcggccaaggccagcaggaaaccatggccaagattgcaggctccgttgaggtgctgggtgagcagctctctgcagtcttcaagcaactggaacagggccagcagcagatagatcaatccactcgcgctgcccaagcagacctgcaccaaggtacccgcgacctggtgggtggcctcgacgagcaggtcaaggcattgctgcagacggtttccgagcaacagaaatctgcccaggacaccgtcaatgcattgagcgcccagacagagcagcatctgcacagcatgcagttaggtgcggacaagatgcgggcggcggctgagcgatttgaaactgccgggcaaagcgttgtgcgagccagtgaatcgactgcagggttgatgggtacagtccagggcgcaggggctgaacttgcacaggcttcgcgagagctgaataccgttgtcgcggactaccggaacaatcgtgaagcgctcgcgaaaacgctcgctgtcatcgaaggggtagttgccagtgcgcaaggggaagccagcgggcgcagccaatatctccaggacctgaaggttcaaagcgagcggatgcaggcgctcaaccgtgaagtatatgaatacctcgaaaacatcagtggtgtgctgggtaacggcttcaaggagttcggtgaaggtatggaccgggcgttgagacaaaccctgggtagcctcgacaccgagctcgataaagccgtcaagagccttgctggcggtgtggaaggggtcaaggaaagtctcgaagacttcggcgacatcatggaacgcatcaggcggtaa

SEQ ID NO: 7837 - DNA, 744 bp, Pseudomonas putida HB3267
atgtttggtaagcaaatgccttcggctgcccgttccaaggacgagggagagaagcctttctggatttcctttgctgatttgatgaccgcgatgatgattctgtttctcgtggtcatggtggcggctttgagctccgtgactcagcggattaaccaggcggaacagggggagaagcagcgtagcaaggacatcagtcagatttgcgagcacctgagcctcaaggcgaagactgccagcaagaccatcgtcgtggactgcaaggacaaccggattagcttcggcgatgctggccgctttgggcacaaccagtacgcgctgagcaacgatggccaatcggcacttcaggaggtcgtgccgatgattctggacgcggccaacagtgaagaggggcgcaagtggttcaagcaggtcgtgatcgaggggtctaccgataccgatggttcctacctttataacctgcacctgtcactgcagcgttcggagtgggtgatgtgcagcctgctcgatagtcgcagcccgctccaggtcggattgtcgccggagcatcagcagcaaatcagatcgatgtttctggcgggtggcgtgtccttcaataatgcaaaggacaccaaggaagaaagcaggcgagtggagttgcgcatgcagttctttggcttgaaggagaaggagggcaatctcaagcctgaagtgccggtgttcactaatactgatgtggaaaaatgtcagttggcgatgaaccgatga

SEQ ID NO: 7838 - DNA, 1629 bp, Pseudomonas putida HB3267
atgaccagctcgatcgcgaggctttccgccgccattagccaaagcctgtcagctcatcgcacggtgcaggccccacaaccgttggagcgtttccctcgtctggctgctgcgggagtcgatctatacgagcgattcgagcgcgctgaaaaggccttgccgccacccgaagaaaagcgccgtgctgcgataagcaagtttcgcaatgtgctgccactcaacgcctctgaatggcgcttggtgttcgccggcctttcagacaagagtgagctagtcgggccgatactggacgatgaccagctttacgcccgggtgcacgaagaagtacatcagcgtatcgaaaagcgaaggctgagccgccgggattggttggcgctgtgcttcagctactttgggtacgatgccgccacgcccgcacaaaacgccaattggtgcctattgcgcgaagacgttcagctcggtttcgaatgcgtcagagaccagcagaagcgtgtgaaggaatgggtgcagatcgttcagcagcatcaggagcttttttccgagcaggcaggtgccacgctgggtgaccagatgttcaagggtgagatcaatgacctttcggcattgcagacgattgcgcagatcccggataacagctggctgtggcgcaggatctttaccgtgctgatttctcgcattttcatgctcgatgacgccgagttctctcagcgtttggctgacctagtcgacatcggccggcagcacccgcggtacatgaacgacattctgagtgcatgcctgtcgcgttaccacttggcagcttatcgagagaagccatcgtcgctgctcaaacagctcgcgctcgacaattggggtagtccgcagatccgctccagacaaaacagctggctgcagtatgtcgataaagatgtctgtgcgatggttgtggcgtggtttgcgaaggaggatctggagcacttcttcaacctgcttaaaggggaggcagaagtcgatcaatctcgtctgcattattggctgcgttttgccaaccagatgagttacacccggattgtcatgggttcggatgcctggaatgacagcgggcgagacttcgtccatttccgagagaagaacaaaggacgcctcagccgactggtaggtggccccggttataacaacgccgtcatcatgcagatcgggaactactttttcgtggaattctccggtacgggtaatgcctgctatgtctatcaagcagacaagtcgcctttcaacccagacaagatgcagctcgaattggcgagcgagctgaagcagcctaatcgtgcactggatcgaatgcggcattcacctgcacccagccgcccagaccgcatagagggttggctcagcaaattcgattatgccctcgagcaatggggtattcgtttacagagtcaggtcgcagcggcaggttcagccaagccgttgccttttgaagaccaggtccgtgacgctctaaagtcggtcaaacacaaggtctatgatcagcgcgagcgcggcggtgcatttcaggtccagcttgatgatcatgacccggccgcagtaactgcactgcagcgcctgggcttcaggcccgtcaataatcagccactccggttctggagacagtaa

SEQ ID NO: 7839 - DNA, 3288 bp, Pseudomonas putida HB3267
atgctcaagcgtttcctcaaaggcattggcctgcagccaaactcggctgtagaaaatactgagccggttttttccattgaagagcagggcatctgttatcccttgagcttggcggagagtacggagtcctggtcgctggcgagttatcttgatcagctggaggaagaggagttcgtctcccagttgagcgatcgctggctcttgacgtgggatgagctctaccggctgctggatgagccagagcacgaaacaagcctgccactattgcggttgccgtcgcagacagccctcatccctcaattgagcagccaaggcagccttgcctccgacgatttcaaggtctccatcagtggctggcgtgatccgcagtccaatgccaacgtgcaggtgcggcgaacgggggccattgttcagcatcagggcgctacagaaatgctgccagaggcatcctggaagctgaccggtgcggtacggcagctttatctggcacaacaaaatgagcccggtgaagtgaccaaccagatcggctgggccagcatcagaaagctggcgcgcaaggctggcgctggtatggatggcttcttggacaagaccgtcgttatcaaacccgagaaactgcggctcaacccacgaaagtcgaagcttggcgacacaccagttatcgagttgcaaccgagctttgatggccagccggccaactggcttgagagctttgacggtgccaagcaggttcaggatcggtaccggataacgggtgacgatggctcgctgactcatgttctgattgagcctgaagtcaaatcggtactggactacgtgcgttccttacccgggcgtcgggttgctggtgacgatgccctttcattcgtccgtaacccttacagcacactcggcgaaagtgccgcacacgtgctggatgccgaagtctatgaagacgagctcgctgaggccggtattttctttcatcgcttccatctggaacccaaactggatgaagcggaccagcgtatcgagcaggtaacactgacgctcgagccgatttctccaaccccgcaggcgcctatcgaaattgagttcaaagcggcccatgaattcgcgccgcttgcgcatgaactgcacctgaagttggccgccggcatgcctgcaggcttctggcagggctatgagctggaactcagcgattttgatttgcgccagttggcaggcatcaatgacctgctcaagcgttggcaaaacgaagcggccggaatcgagtttgaatcggtcctggacctttctctctacggcgaccgtgtgacaggcattggggaagcagaaaggattacttcgcctttcttagtcaaagaggcgaccgagaactggttgccgaaggatgtggcggcgcttggcatcgacgcagaaatccttgggcgttgggatccttccgaccgcgctcaatttgaggtttttgggcagcggttggatgaagcgcgcgctgctggtgatgaaacggtctgtttgccagagtccgagacgccactctcgattgccgctgccgagcaactgtttgatgcttggtcgaagaagattgcacctgacgaaattagccaggttgagcaacgggagaaagttggccgcgccgtactgcaaatcggccacaacattgatgagccgacctacgttcaggtgcgtcaagcagccttgcgcgccggtttggacgcaacgccggagttacctggcttgctcaagcctgaagtcgtcctgcgcgagcatcagcttcaaggcgtggcgtggttgcagcatttgttccgtttgtcccccacagacgtatcaggttgcttgctcgctgatgacatggggcttgggaaaacgatccagttactcaccttcctggtatggtacctggaacagtacccaaaagatcagccagcactgatcgtcgctccggtttcgttgctcgacaactgggagcgagagcttcacaggttcttctttgctgacgcactgcccgtgttgaagctgtatggttcagccttgagtgcagtgaaattcaagaaagatgaaattccagcggacttgaaagccaaaggcatcaagaatctgctgcgcccaggttggatgggcgatgcccgaatcgtcctgacgacttacgagacactgcgtgatcaagagttttccctggcgcgccagcaatggtccatcgtcgtgtgtgacgaagctcagaagctgaagaatcctgcggcactggtgactcaggcgatcaaagccatccccgcacggttccgagtggcgtgtaccggtacgccggtcgagaacaccctgatcgatctgtggtgtgtgttcgacttcattcagccaggattcctaggtagtttgaaccaattcggtcgcgagtatcagcgccccattgagggcgcactggagcgtgatacggttgctttggagcgcctacgtggacttatcgatccgcagactttgcggcgtaccaagcaggacataggcaaagacctgcctgccaaaatcgaagacacagcatgtcgttcacttggcatgtatgctctgcagcgcaatctgtacttgtccgaagtagccgcatacagccagaagcagcagattgaagagcagctcgatcaaaagacctccagcatgcttgggttgctgcacaagctcaaactgatttgtgcccatccttatagtgttcagccagacacgcggttgcgcgaccactcgccgaagctgcagtggttgacgcagaccctcgagtcgatcaagagggccggcaacggcgacaaggtcatcgtctttaccgagttgcgtgatattcagcgtgaattgcagcacgcgattcagcagcatttcgggtttcgggcgacggtcatcaacggtgacaccagcaccagcagtcagagcgccaatagccgacagaggctgattgatcaattccaggagctgccaggtttcgccgtcatcatcctgtccactatcgccgtcggattcggcgtgaacgttcaggctgccaaccacgtcattcacttcacgcgttgctggaaccctgccaaggaagatcaggcgaccgatcgggcctatcggattggacagcagaaggatgtgtatgtgtactatccgacggttcgggatgcggcgatgccgacatttgaggcgacgctggatgagttgctgggtaagcggcgagcgttggcgcgagatatgttgagtggggcttcggagcttcaggcttcagattttgaggcgttactaggccctgtacgaaaagagatttcgcaatcaccgcatggaacaagccagtga

SEQ ID NO: 7840 - DNA, 2349 bp, Pseudomonas putida
atcatggaattcttgaatcacctgctgcccaacttttctttgctgaagagcggcagtaccgaggcgttgggtgtcgtgttctggttgatcatggcggcacttttctcctactcgctctactccttgtttcgcagcgggctgagcttcaatgcgcgcatgcaggcgctgaacactctgatcgttgggcagagtcgtgaaaacctggccttgaatcggcgagagaccttgcagaaagcgactggcctcaaggtcaagcgcatcggcgcgctgtggcatgagtttgacgacagcttagtgagttcaagtgaccacaagcagttgttcaacacccttgatgctgagcatttcttcaatgcgcgcaccttggctccgggcctgagcggaagtcggtttttcggttcgctgcctggcttattggttgggttgggcgttctggccaccttcgtgggccttacaatcggcctctccaaactgaagctagacagcagcgggggagtggatcagctgcgggtgggcatctccgtaatgatccagggcgcggcggttgccttcatggcatcggtatggggtgttggattcagccttgtgttgaacttgatcgagaaggtcactgaacgctgggcattgggccgaatacatgacctgcagcaccagatcgacgcgctatatccacttattcctgccgagcagtccctggtccatatcgccgattacagccgtgagagtaaggaagccctccaagagttgcacgaacgtatcggcgatcgcttgcaggaaagccttgcaggtatgaatgaggcgatgcaagcggcactcaccgatgcgctaaacaacatcatggcccctgccattcagacgctcgtcagcaccaccagtcagcaatctactcaggtccttgagcaactggtaagcaacttcacgcaagggctgacatcggcagggcgtgagcaaggtaatctgatgcagcaggctgctgcggatgtgaataccgccgtaagtggtatgtcgaaccagctgaaccagcttttccagagtttgagcgatcagcaggggcgccaactggaagtcgcccgccagcaaagtggagagttccaggcccagttgcaacagctttccacttcggcagaccagcgccagcatcaattggaggcgcgcttcagcgagcttatgagtgggttgacggggcaactggatggacaacttgcgtctgctgaaagacgggatgtggagcgccaatcactgttcgagcgaacgctggccaaggcaggtgagagccagtctgcgctgcttgagaagttcgccggcgccagtcgtgaacagctgcaagccatggctgaggctggcaatgagcgacacagtaacctggaagccgtgttctcccgattgatgatgacgttgaatactcagctggattcgcagatgggcgccgcagaatcacgtgagaaagagcgcgctcagcgtcacgagcagcaacaggccgcctcgctggcgcaacagcagcaattgattggtagcctggggcaaaccagtcagcagcaaatcaacgctatcgctgaggctgcctctgctcagcagcaggcactagaagtcaccgtcggcaaaatgctgagtaacttcagtgagcagatggcgggtcatgaccagcaagcggaaaaccgcgagcaatcgcgccaaaagcttttcaacgagcagatgcaaagcatggcggctcaacagcaggcgctgcttgagggtatagccacggccgttcaggcgactcagcaacagagccggcagatgagcgaacaacatctgcaactgatgggccgcctgcagcaggccagtgaggccgcagctgccagcagccggcatatggacagcagtgccaatcaactgggtctgctttcgaccaatgttcgtcaggcggctgacttgctcggccagcgtttggagagcgtgacgcagcgtatcgagtccgcaggcgagcagaacgctcagctggctggccatctacaaggccaggccgccgctttgtcgcaacttcagagtgccctgttggaaagtgcgcagcgttttgagcagactgccgctgaggcgcgcaatggatttggcgagttgagggggcaccagcaggaatttcttactggcgtgcggggcgagttcactgctttaggtgaggctctgcgtgagcaggtccagggcatcgagcagcaggccgaacaatggctacgaacatactccagtgaggtgcgtgaccaggttcatgagcgcatggatcaatggaacaaagagaccatgagcttcgccagtcagatgcatgcagcggtacaggcgatcagcaacgtggtcgatgagctggaggcccgttga

SEQ ID NO: 7841 - DNA, 744 bp, Pseudomonas putida
atgcgctggcgtaaatcccatgacgtgccgatggaggatgaggatccgtactggaagtccttcgtggatatcatgtcggcgcttctggtgctttttatcctcgcctcggttgttcttattttgcagttgatggagaagagcgctgacttcgatcagcaggtcgaacaactgaagaaggccgaaacggtacggcagcagattctcgatgaggcagtcgaaaaactgagggagcggggcatcaaggtagaggtcagtgaaaaccatacggtgctgcgcattcccaatgaactgcttggtttcgataccggcgcttacgagatccagccgcgttatcagcagacggcactggaaatcggtgaggtcatcaatcaagtgatcagcaaggacgaccgaatcaactaccttgacaccatttttatcgaaggtcatacggacaatcgtccgtttcctggcttcatgggtaaaggtaactgggggctttcgacattccgcgcaatttcgctctggcaattctggagcaatgagataccagaggctgatcgcctgaaccggctgagcaaccaggatggcgaacctctgttctcagtcagtggctatgcggagactcgacctgtgagcaaacagcaggatggagaagatgactatcggctgaaccgtcgcattgacatccgattcactatccgccggccgcaaagtgctgattatgaggcggtcaagaccttgcttggaaactctagccaatga

SEQ ID NO: 7842 - DNA, 1881 bp, Pseudomonas putida
atgaatctgccgccgattgacaaccgcccgggtgaatggccgcctacggtcattgagggttgggtgcggctggtggaaaaggccaatcggatgaaggccaaagtgggaggaagcgacgcttttgaacgaatgctggctcgatttcgcgacatggctagcagcgggcgcttcgacggccttaaagaattgcttgggcgtcggttgggtgcgagggcgctgacttggctctggttgcatgacgaggttgtgggtttccgactgttcaacgcgcgaatgcttgatgcattgatcgagcaccagcagcctcgccttagccggctgactctgatccaactgctgcagttgtacttccgctatttcgatcgcttggacgagcgggacaaacaagcggaaagcagcctgcgcggtcgattggagcttcacctgctggaccagcttcagcgaatgccggcgccacgccaggtattcggcgtagatccgctcgtcaacctgaatcgggaaggtgagtggctgctgacgctcgatggccctacggcgctggtgaagtcagtacgtagtaaggggggcgagctgggagaagcgtttgaagcccttggtctaagtggctttgatgttgggcgttatggcgatatttgtcgcgcacactactatcttgatgtgttaagccagttgcctccgggggaatgggatgatgtgctcgacgagctactcaaaccctcggtgagcaaggctccttacgagggcgagaagcgaatcggtcatgccgcgctagagataatgatcgaccgagcgggggacgatcctggtgacgcttggcagaacttcttcctcactctggccggcgacccgcgaattgccagttcagcaccgaacttccgggagtggtggaagccactaggcgatgagcgtattgccaaggtctgtggctggctgtccaaggaggacttgcgtttattcctgcaggcagtcgagcagtacggggtggagtcgggaaaagaagatctcaagcgaatgttcccggcgcgaaaattgtttttggaaggtctgttcaggctcggattgatccgacacacgaggttgatgctcggtcgtagtgccaaagcctcggttaagcgcattctcggaggagacgtaaagaccagctttgccagcatggactccgtgatgaatgacaaggctgtgatctatctggactgcggcgactttcatctggtcgagggctctcacagcttcaagatctgggtgtatctcgcccaacctggggattggatcaagtcatacgaacgcaatcagttttcgcactccgatttgaccatttcgttgccagggcagtacagggccgcctacccgaatcttccctacgagtcggtaacccacaacggctcctggcaacgcaaggtattcgacttcttggcggctaacggtattgcactggatatcgagaagctgctgagtcgagctgagtacaagtcgtatttgattaggtacggtatgccggtagtgggacttaagaccgcgcgaactgagcctcttccccagcacggcgtgcgttctgattcggcccctgccgccgagccagcaacgcgtgcggcgctattggcgcgacgtttagtggcgtcccgcgttgtgtcagaggtcgctgatgcagacgctgccatagggcagctcggagtctttgagctgcaggtgctctggtatttcaaggaaaaccctggggacaaagttcgatacgcggcgaatgtgctgggggttgatgcacgtgaaattaatcgagtgctctatgggcccttgaagagcttttgcgagcaaggcagtggcttcagttggtcgctgaaggaagaaatttcttctgtactggatcgccaggccacagagaagtga

SEQ ID NO: 7843 - DNA, 3030 bp, Pseudomonas putida
atgggactagctgacatcttcaaaagcctgctgggagaggggcgagcaactctgagtactcagcagggattcgttcatgcagcggactcggatggtgtgaacttctatctggataagacagcgcatggcgcattgctggagggaaaaggtaactccctgcagaaggtccagatgatcgttctgcgcatgctgcaggagcagggtttagctgagccgctcgccaatggattccatgtcgctgccgaagacgttgcaggcatggacgaggagcaggcagaaattctccggctgcctcgacgtttcaacatgaacttcaccagcaaaatcagtggtaggacggggaatagcggtttccatgtcgatctggcagttttatccggtgccaccgaggcacctttcacacgtaagggaccgctgctttttctcacctcaacagagtcctatcgcctaaccccggctgagctgatgggcttgatggcttgggaacgtcaccagaatctgcttccccagcagcgtggggaggcagccaatctgcgtatgatggctgagctgcagactgcggctcggagcggcatgcgtgtcgacctcagccatttcgacaggcttgatgtggtggtgccagagaacatcggtgtgattgccacccgcttgcccgatggaagcctgatgctcagccctagcttgggagatggttctacaccggaccaattggagaagcgctggtcgcaattggacatcggggccgatggcggcgttttgcgaatcgacaatcgcgtggtgcttcttgatccgcagaaaatggcagcgatcagggaggtgctgggcagcaagcgaattccagctgaaaaagtggccgagttcatcgctactcctagtgcgtttctggatgccgccctagtcaatctcgatgttgggttttcagtacgtgtcgccggcattggcaagctccagcatatggagtttggtgacctagacaatcggaagaatgactggtttgcgcttgattcacggccggcgcccgcagaaattattccgaccctggtgcagtccgaggaggacttggcgcgtttccacgaagcttacaaggctgcaaaggaacagggcgcggacagcatgagtttcgggggagaggtcattgatatctccgaccctgtgcgtattgatgcgcagctcgacaaagtcgtgagtggtctgggagacctaaaacctgacgtaactgctggtgtggagccttcggaggggccaaaggagcgagtcagtgtgctgttgcgcgatgccgacaagatcaacagtgctttgctgagcaaggcaagtgaagccaagccagagtatgagccagattggggcgcttatgcgcgccaaccgttcccgcatcagcgcgagggtatcgaatggatgctggggctgttggagtcggcagttcgagatgatcatggtgatctctaccgacttcagggtgggttattggccgacgacatgggccttggcaaaacctacatgtcattggttgcggtaggtgaataccttgtccgccagaaagttgcggggcgtgcacagaagcccgttctggtcgtggctcccttgagtctccttgagaactgggaggatgaggtcagtcaaaccttcaagggcattccattccgggacatcgtgatgctgcaggcgggaagagatttaagtcgcttcagggtcaagggctccgagcgggaatcggcacagttggcctctctcattgatgaagatggagcaatggccgacgatgccattcgttacgctcttactatcggcccggagtctggagtacatcgtctggacatggatcgccgtttggtactgaccacctaccagacactaagggactatcagttttcattgtgcaggattgactggggattggtgatctttgacgaggcgcagaacatcaagaaccccaatgcagcgcagacgcgagcggcaaaaggactgaaggcggatttcaaactgctggccactggtacaccagtcgagaacagtctgggggatttctggtgcctaatggataccgcacagccgggcatccttggaggatggagccagttccgcgatagctggatcaaacccatcctttccgcagcagatgatgaaaaggatgaggtaaggcggaagattggcgcggggctacgcgaagctgttggcaggttcatgctccgtcgcatcaaggaagatcagcttaaggggcttcccagcaagaccatccatagcggtgtggagcagccgaagggcggccaactgctacacgcggctcatctttccgtttgtatgaagggtgctcaactgcaggcatacgatgcagtactcaatgattttcgtgcccgacgtgcgaccgaggacatgcgaggtactgcactggcggcgttggcacagttgcgagagatctctctgcaccctcgccttcgcgaagaagcaaaactgatggcaaacagtgccagcgaggcacgtgcgagcatggcgcagtcgggcaagttgacagtgcttttggagttacttgatcgtatccgagagaatgaagaaaaggtcattttgttcatggtcaccaagcggctccagagaatcctgaagctctggcttgatcagatctatggactggatgtagcaatcatcaacggtgatacggcggcagttgcaaagaaatctgacgagctgactcgcaagaaattgatcggtgtcttcgaatccaagcctggattcaacgtgatgatcatgtcaccagtagctgctggggttggattgacagtagtaggtgccaaccacgttgtacacttggagcgtcactggaaccctgcaaaggaagctcaggcatctgaccgggtttatcgaattggtcaaaagaaagacgtgcacattcatcttcctgctgtacgacacccacaatatgactcgttcgatgttcatctggatcgcctccttcgaggcaaattgatgctaaaggatgcggtcgtgacgcctgaagcggttagcgagagtgagatgattcaatccatgggactttga

SEQ ID NO: 7844 - DNA, 2352 bp, Pseudomonas stutzeri A1501
ttggtcatgatggatttgctgcaacacctgatccccgatttcgcccatatgttcagcgccaaccctaacggcatcagtgcctggttctggttggtcactgcactgatcttcgggttttcgctgttcttcctgatgctgcacttccggcatttccgggctcgtatgcgggcgttgcgctcgctgctggatggccaaagcaaagagacactggctgccaaccgacgagaaaccctgcacaaggcgcaggagctcaaagctacgaatgtcggcatgctctggcgcgagttcgatgagagccttgtgctttcatccgaccagcaaaagctgttcaacacattggatgccgagcatttcttcaatgcgcgcacactggcgagtggtctgaccgctagccgcctgctggccgcagcgcccagtttcctcgtggccgttggtgtgttgggtacctttgttggcctgacggtcgggcttgaggggctggtgggtacgtccgacgagatcgaggcgcttaaaggcggcatcaacaagctgatctccggcgctgctgtggcgttcatgacatctgtgtggggcgttgccttcagcctgctgctgaacatcatcgagaagatgttcgagcgtagtgcgctgaatgatattcagcggctgcagcacgatatcgactttctctacccacgcattcccgccgagcaatcgctggtgcatatcgcggaatacgggaaagagagcaaggaagcgctgcaggaactgcacgagcgtatcggtgacaagctgcaggaaaccctcaccggtatgaatgaggccatgcagacagcgctgaccgaggcgctgaacaacatcatggcgcccgctattcagactttggttagcactaccagccagcaatctacccaggtgctggaaaccctggttggtagcttcatggacggcatgacgtcggttggccgggagcagggcagccagatgcaacaggccgctgccgacgtgaacgcggccgtaagcggcatgagtgagcgactaaaccagctgttcaccagtttgagcgagcaacagggacggcagatggaggcggcgcagcagcagagcacccagttcgaagctcaattgcaacgcattgccggctctgcagatcagcggcaggaacagctggagcagcgtttcagcgagctgatggccggactgtcgagccagttgcaggggcaattgggctctgcgcagcgccgcgatgaagagcggcaggcgatgttcgagcgtttgctgagtgaatccagtgccaatcaggctgcgcttctggagaagttctccagttccactcaggaccagatgcgagtgatggccgaggcgggcaatgagcgccataacaacctggagaaggtgttctcccggttgatgatgaacctgaacacgcagctcgatacgcagatgggggccgccgagcagcgtgagcaggccagggcgcagcgccacgaggagcagcaagcggcggcactggcgcaacagcagcagctgatcggcaatctgggccagatcagccaacagcagattggcgccattgccgaagccgctgcgacgcaacagcgcaatctcgaggaaacggtcagcaagctgctcggcagtttcaatgagcaggtcagcgggtacggcgtgcaggcggagcagcgtgaacagagccgccagcagcgctgtaacgaacaattggaaaacatggctgcgcagcagcaggagttgctggcaggtatcgcgtccgccgttcaggttacccagcagcagagcaggcaaatggctgagcagcatcagcagctgatgacgcgcctgcaacaggctactgaagcggccgcgaccagcagcaagcacatggatagcagcgccaatcagttgggcctgctttctgccaaccttcgccaggccgctgatgcgctgggccagcgcctggaggcagtaacccagagcgtggaagctgcgagcacacaaaatgccgcgttggctgcacaactgcagggccaggcaagttcgctgtcgcagctgcaggcggcactactcgaaggcgcgcagcgcttcgagcaggccgcaagtgaagcacgcaatggctttggtgacatgaaacagacgcagcaggaattcctgtccggcgtaaggcatgaatttacaacgctgggtgagacgctgcgtgcccaagtggaggcagttgaaaagcaggctgaagagtggctgcgtagctacgcctccgaagtgcgtatgcagactgaggaccgcatgaacaagtggaacgaggtctcgcttgcctatgccgatcagatgcatcgcaacgtccaggcggtgagcgggattctggatgagctggaggcacgctga

SEQ ID NO: 7845 - DNA, 765 bp, Pseudomonas stutzeri A1501
atgcgctttcgcaagtcgcatgacgtggccgtcgatgaggaaaacccgtactggatgtccttctcggacattatgtcggcgctgctggtgatcttcattctggcctcggtgatcctgatcctgcagctgatggacattcagcagaagttggaggagcggcaggtccagttcgaacaggaaatcgaagagctgaaaaaggcggagcaagtgcgccgcaccatcctcgatgaggcagttgaggcactacgcaggcgcggcatcaaggtggaggtcagcgagaatcacacggtgctgagtattcccaacgaccttcttggcttcgataccggtgcctatgaaatccattcggcctatcaggcgcgagcgcttgagatcggcaaggtcatcaatgaggtgatctcgcgtgatgaccgggtggaattcctggacacgatttttatcgagggccacacggataatcgcccgttgccgggattcatgggcaaaggcaactgggggctttccacctttcgtgctatttcgctctggcagttctggggggacgccttggcgcgcgaggagcagttgtcgcgcctgaacaacaaggacggaaaaccgctgttctcggtcagcgggtatggcgaaacgcgtccggccgtggccgatcaggtcacggaggaagacttcaaacgtaatcgccgaatcgacattcgtttcaccatccgtcgtccggatagcgcccagtacgagcaagtcaaggagcggctgggggaggccaagccatga

SEQ ID NO: 7846 - DNA, 633 bp, Pseudomonas stutzeri A1501
atgaggctgcctccagtagagtttcctgcggccagctggggcgctcagatgctcgagcgctggactgtactggcaaaaaaggctgccactatggagacggaggccggaaacaatgatgcgtttgagcgcatgtgcgctgaactgcgtcggatggccttcacgctgcgctgtgatgtgctgccagagttgttaaagcgccggataacggctcgcgcgctgacttcgttgtggctcaacgacgaagtagtcgaattactcaacgcacgcttgctaaccaccttgctgagggcgcagcaaccacgtctcacccgtatgacgctgcagcaattggtacagctgtatttccgacgattcgatcggctggatgagaaggaagggctgcgcgagcttttggagcggagcctgttacagcagcttgacctaatcccgccctcgaaaatccagacatcaagggccgatccgctggttacgctcaagcgcgaggggcattggttgctgagcctcgatggtccacgtcatctcgctgaacgagtgcgtcaaggcggacgtgagcttggcgagacgttcatcgaactcggtctgcacggctttgatgatggccgatatggcgatatctgccgggcgcacttttag

SEQ ID NO: 7847 - DNA, 3039 bp, Pseudomonas stutzeri A1501
atgagacttttcgatgttctgaagtcgttgattggcgaacgtgatgtggcggtcggtagtcaggaggggtttgcgtcgagtgcagactccaacggagtcaatttttatcttcccgtccagacgttcaaagcgttgcaggaaggcaagggcaacgcgctgcagaaaattcagctgattgtcctgaacatgctctctgagcagggcatagcagagcatacggccaacggctttcatatcggcgctgaagatattgccggtatggacagtgagcaggccgatattctgcggctgccacggcggttcatggggcgctttcagacttccatcagcgggcgcacaggtaacagcggctttcgcgttgggcttgccgttgaagtggctgaaggcctcacacctttctcgcgcaaaggcccgtatttgtgtctgacgagtaccgagcgttactggcttacgccagctgagctgatggggctgatggcttgggaaaagcatgagtctctcgagcctgcacagcgaggggaggcggctaaccttcgtttgatggccgagctacagacagctgcccgaagcggtatgcgcatcgatctgagtcatttcgatcggcttgatgttgtcgttccggaaaatgttggcgtcattgcgacccgactgccagacggtagcctgatgctgtgcccgagtctgggggatggatcgacgcccgatcagctggagaagcgctggtcgcagctcgacatgagcgctgacgggggtgtgttgcgaatcgacaatcgtgtggtgctgctcgatcaggccaagatggacggcattcgcaatgtgctggtcaacaaacgaatcccgccagataaggtcgccgagttcatcgcctcgcctacggcctttctggatgctgcactggtaaatctcgaggtcggtttctcagtccgcgtagctggcattggcaagctgcagcatatggactttggcacgttggatacggctaagaatgattggtttgccttggataagcgccccgcgccagcggagatcatcccgaagttggttcagacgccggaggagttggagcgttttgaggaggtgctgcggtccgcgatagagcagggtgcgacgagtctcagttttgctggtgaggtcatcgacatttcagacgcgccgcttgtggcgcgtcaattggaacgggtgaaagagacgctcgagaagcccgagttgtcggagccgccggccgcagctgaagacctctttgacgagcccaaggagaaggttgctgtcattcttaaggatgccggcgaaatcaactcgacactactggcaaaagccagcaacgctcgcttactggaagcaccggactggtccgcttatgcgcggcagccattcccgcatcaggtcgaaggtattgagtggatgctcaggctgatgaacgccgcgttatctgacgatcatgatgacctctatcggctacagggcagcctgctcgccgacgatatggggctgggcaaaacatacatgtcgctggtcgcaatcggtgaatacatggcagcccagcgccgaagcgaaaagccgcaaaaaccagtcctggtagtcgcaccacttagcctgttggaaaactgggaagacgaagttggaaagacctttctaagcattccgttccgcgatctcgtggtgctgcaagctggacgagacttgaaccgctaccgcgtcaagggcgccgagagagagtctgttcaactggctgccctggccgatgatgacggcatgatggatgcccagagcattcgttatgcgttgaccattggcccggaggcgggtgctcaacgtctggatatggaccgtcgtttggttctaacaacgtaccagacgctgcgtgactaccagttttctctgtgcaggatcgactggggcatggtcattttcgacgaggcgcagaacatcaagaaccctaacgcactgcaaacccgtgcggcaaaggggttaaaggctgacttcaaattgttggccacaggcacgcccgtggagaacagcctcggcgacttctggtgtttgatggatacggctcagccagggttgtttggcagctgggaaaactaccgagacacttggatcaagccgattctctcggccggggaggaggagcgcgacgaggtccgtgttcgtctgggtgagcaactgcgcaaggcggtcgggccgttcatgctgcgtcgtgtgaaggaagaccagctcaaaggcctgcccagcaaaactatccgtagtggggtagagcaggtcgatcgaggcattcagcgttacgcgcctgagttgggtgtctcaatgcgcgggattcaactgcaggtgtatgacgatgtgctagatggataccgtgctcgacgcgccagcgcagatgacatgcgtggttcggctctagcggcgcttacgcagttgcgctccgtatcgttgcaccctcgtttggatgatgaaccatctctctacagtcgggacggccaccatgcgcgccagttgatgtccgagtcaggcaagctagccgtaatgctcaaactgctggacgaaattcgggataagggcgaaaaggtcatcctgttcatgatgactaagcgcctgcaaagggttctaaaactgtggcttgatcagatctacggcctagacattgccgttatcaacggagatacaaaagcggtagctaccaaagcggaggaaatgacccgtaagaagctcatttcagcatttgaagcgaagtcaggcttcaacgtactggtcatgtcgccggtcgcagcgggtgtagggttgacggttgtcggagctaaccacgttgttcacctggaacggcactggaacccagcaaaagaggcgcaggcctctgaccgtgtctatcgcatcgggcagcagaaggaggtatttatccatctgcccgccgtaacacatccgcaattcgattctttcgatgtgcatctggatcggctgctgcgcggaaagttgatgctcaaagatgctgtggtgacaccagaagctgtaagtgagagcgagatgatccactcgatggggctttag

SEQ ID NO: 7848 - DNA, 2346 bp, Pseudomonas stutzeri DSM 4166
atgatggatttgctgcaacacctgattcccgatttcgcccatatgttcagtgccaaccctaacgggatcagcgcctggttctggctggtcaccgcactgatcttcgggttttcgctgttcttcctgatgctgcatttccggcatttcaaagcgcgcatgcgagcactgcgctcgctgctggacgggcagagcaaggacaccctggctgccagccgaagagaaacgctgcacaaggcacaggaactgaaggcatccaatgtcggcatgctctggcgcgagttcgatgaaagtctcgtgcagtcgtccgaccagcaaaagctgttcaacactctggatgccgagcatttcttcaatgcgcgcacgctggccagtggtctgacggctagccgcctgctggctgcggcgcccagcttcctggtggcggtcggtgtgttgggtaccttcgttggtttaaccgtcgggcttgaggggctggtgggcacatccgatgagatcgaagcgctgaagggcggcatcaacaagctgatctccggcgctgctgtggcgttcatgacatctgtctggggcgttgccttcagcctgctgctgaacatcatcgagaagatgttcgagcgtagtgcgctgatcgatatccagcggctgcagcacgatatcgacttcctctatccgcgaattccggctgagcagtcgctggtgcacatcgcggaatacgggaaggagagcaaggaagcgctgcaggaattgcacgagcgcattggcgatcggctgcaggaaactctcaatggcatgaatgaggccatgcagacagcgctgaccgatgcactgaacaacatcatggctcccgctattcagactttggtgagcactaccagccagcaatctacccaggtgctggaaaccctggttggaagcttcatggacggtatgacgtcggttggccgggagcagggcagccagatgcaacaggccgctgccgacgtgaacgcggctgtaagcggcatgagtgagcgcctgaaccagctgttcaccagtttgagcgagcaacagggacggcagatggaggtggcgcagcagcagagcagccagttcgaagctcaattgcaacgcattgccgggtctgcagatcagcggcaggaacagctggagcagcgtttcagcgagctgatggccggactgtcgagccagttgcaggggcagttgggctctgcgcagcgccgcgatgaagagcggcaggcgatgttcgagcgtttgctgagtgagtccagtgccaatcaggcggcgcttctggagaagttctccagttccactcaggaccagatgcgagtgatggccgaggcgggcaatgagcggcataacaacctggagaaggtgttctcccggttgatgatgaacctgaacacgcagctcgatacgcagatgggagccgccgagcagcgtgagcaggccagggcacagcgccacgaggagcagcaagcggcggtactggcgcaacagcagcagctgatcggcaatctgggccagaccagccaacagcagattggcgccattgccgaagccgctgcgacgcaacagcgcaatctcgaggaaacggtcagcaagctgctcggcagtttcaatgagcaggtcagcgggtacggcgtgcaggcggagcagcgtgaacagagccgccagcagcgctttaacgaacaattggaaaacatggctgcgcagcagcgggagttgctggcaggtatcgcgtccgccgttcaggttacccagcagcagagcaggcaaatggctgagcagcatcagcagctgatgacgcgcctgcaacaggctactgaagcggccgcgaccagcagcaagcacatggatagcagcgccaatcagttgggcctgctttctgccaaccttcgccaggccgctgatgcgctgggccagcgcctggaggcagtaacccagggcgtggaagctgcgagcacgcagaatgccgcgttggctgcacaactgcagggccaggcaagttcgctgtcgcagctgcaggcagcactactcgaaggcgcgcagcgcttcgagcaggccgcaagtgaagcacgcaatggctttggtgacatgaaacagacgcagcaggaattcctgtccggcgtaaggcatgaatttacaacgctgggtgagacgctgcgtgcccaggtagaggcaattgaaaagcaggctgaagagtggctgcgtagctacgcctccgaagtgcgtacgcagactgaggaccgcatgaacaagtggaacgaggtctcgcttgcctatgccgatcagatgcatcgcaacgtccaggcggtgagcgggattctggatgagctggaggcacgctga

SEQ ID NO: 7849 - DNA, 765 bp, Pseudomonas stutzeri DSM 4166
atgcgctttcgcaagtcgcatgacgtggccgtcgatgaggaaaacccgtactggatgtccttctcggacattatgtcggcgctgctggtgatcttcattctggcctcggtgatcctgatcctgcagctgatggacattcagcagaagctggaggagcggcaggtccagttcgaacaggaaatcgaagagctgaaaaaggcggagcaagtgcgccgcaccatcctcgatgaggcagttgaggcactacgcaggcgcggcatcaaggtggaggtcagcgagaatcacacggtgctgagtattcccaacgaccttcttggcttcgataccggtgcctatgaaatccattcggcctatcaggcgcgagcgcttgagatcggcaaggtcatcaatgaggtgatctcgcgtgatgaccgagtggaattcctggacacgatttttatcgagggccacacggataatcgcccgttgcagggattcatgggcaaaggcaactgggggctttccacctttcgtgctatttcgctctggcagttctggggggacgccttggcgcgcgaggagcagttgtcgcgcctgaacaacaaggacggaaagccgctgttctcggtcagcgggtatggcgaaacacgtccggccgtggccgatcaggtcacggaggaagacttcaaacgtaatcgccgaatcgacattcgtttcaccatccgtcgtccggatagcgcccagtacgagcaggtcaaggagcggctgggggagaccaagccatga

SEQ ID NO: 7850 - DNA, 2256 bp, Pseudomonas stutzeri DSM 4166
atgagactgcctccagtcgagtttcctgtcgccggctggagcgctcagatgctcgagcgttggattgttctgacaaaaaaggcagccactatggagacggaggccggaaacaatgatgcgtttgagcgcatgtgcgctgaactgcgtcggatggccttcacgctgcgctgtgatgtgctgccagagttgttaaagcgccggataacggctcgcgcgctgacttcgttgtggctcaacgacgaagtagtcgaattactcaacgcacgcttgctaaccaccttgctgagggcgcagcaaccacgtctcacccgtatgacgctgcagcaattggtacagctgtatttccgacgattcgatcggctggatgagaaggaagggctgcgcgagcttttggagcggagcctgttacagcagcttgacctaatcccgccctcgaaaatccagacatcaagggccgatccgctggttacgctcaagcgcgaggggcattggttgctgagcctcgatggtccacgtcatctcgctgaacgagtgcgtcaaggcggacgtgagcttggcgagacgttcatcgaactcggtctgcacggctttgatgatggccgatatggcgatatctgccgggcgcacttttatctcgaaacgttgcgacacttgccccttggcgactctgatccagtgttggatgagctgctaaagccatccgttgccaaggcgccattcgaaggcgcgcggcgtatcggccatgttgcgcttgagatcctcattgatcgtgccggccaggaagccggcgaagtctggcagaactttatcctcaacctggcaggggaccctcgtatctccagctccgcggtgaacttccgggagtggtggcagccgttgggcgaagagcgcattcaaaaggttcggggctggttatccaaagaggacctgcggctgttcctgcaggccgttgagcaatacgggcttgaaacagccaatatggaaatgcagcggatgttccccgcccgcaagcgattccttgaagggctcttcaagctgaagttaattcgtaacactcgcctcctactgggcggcaaggcacaacagtcggtcaagcgaatcctgggcaaggacgttaagaccagcttcgcgcgaatggatgggccgatgaatgacaaggccgtgatctatctggactgcggtgacttccatctggttgagggctcacatagtttcaagatctgggtctacctggcagcgcctggcgaaaccctcagaacttatgagcgcaataccttcagtcatcaagacctgaccaccacggtccccgggacttataagaaactctaccctgggttgccttacgatgcttttgtgcacaccccacacgcctggcagaacaaggtcttcaccttcctggccgagaatggcattgctcttgatgtcgagcagcttctgagcgctgaggactatcgccttcagcttcgtaaattcgggatccctgccgtaagtgccaagcgcacggtggttcctgctccggcgaaagaatgggccaaagcggtagcgcgagcgccgacggctgctcaacaaggaactgaacacgctgcggcgctgccgtcacgcaacgccgatgtgccaaccccaccacggcgttcagctgatgtatcagtggctgcaaatggtgcggtgagttcaagcgccgttgcctccgggcgcgacaacccggttctgcaacgaacgaagctgccgccttttagctctctccagctggcggccctgcgttatctcgagactcatccacgttgcggtttctatgcgttgctggaagcagtaagcaaccagggcggcaatgtgttgaacgtgaaaacaatgttggagagcagcctctctcagtacgtccagcaggacgaagaggggaagtggttgctgtcgacccatggtgagcagttagtagccgagctggtccggtcggagccaccagacgcaagtcagagcgtgtcgagtgccgcaaatgccaatgcaagcgcaaatgcgggctcgagggtcgctaggctcgagccgtttgcgctggccgtattgcgttatttcgcggccaacccaggcgataaggttcgttatgcggcaaatgtacttgaagtcgacgcgaggctggtaaatcaggctctatacgggccattgaaagggatctgtacgcaggatgacaagtacggatggcagctgacgggcgtggctcaacgggagctggaagcgttcgaggctgaggggagagagcagtaa

SEQ ID NO: 7851 - DNA, 3039 bp, Pseudomonas stutzeri DSM 4166; identical to SEQ ID NO: 7847

SEQ ID NO: 7852 - DNA, 2346 bp, Pseudomonas stutzeri ATCC 14405 = CCUG 16156
atgatggatttgctgcaacacctgatccccgatttcgcccatatgttcagcgccaaccctaacggcatcagtgcctggttctggttggtcactgcactgatcttcgggttttcgctgttcttcctgatgctgcatttccggcatttcaaagcgcgcatgcgagcactgcgctcgctgctggacgggcagagcaaggacgccctggctgccagccgaagagaaacgctgcacaaggcgcaggagctgaaggcatccaatgtcggcatgctctggcgcgaattcgatgaaagcctcgtgcagtcgtccgaccagcaaaagctgttcaacactctggatgccgagcatttcttcaatgcgcgcacgctggcgagcggtctgactgccagccgcctgctggctgcggcgcccagcttcctggtggcggtcggtgtgttgggtaccttcgttggtttgaccgttgggcttgaggggctggtgggcacgtccgacgagatcgaagcgctgaagggcggcatcaacaagctgatctccggcgctgctgtggcgttcatgacatctgtgtggggcgttgccttcagcctgctgctgaacatcatcgagaagatgttcgagcgtagtgcgctgatcgatatccagaagttgcagcacgatatcgattttctctacccacgcattcccgccgagcaatcgctggtgcatatcgcggaatacgggaaggagagcaaggaagcgctgcaggaattgcacgagcgcattggcgatcggctgcaggaaaccctcaatggcatgaatgaggccatgcagacagcgctgaccgatgcgctgaacaacatcatggctcccgctattcagactttggttagcactaccagccagcaatctacccaggtgctggaaaccctggttggaagcttcatggacggcatgacgtcggttggccgggagcagggcagccagatgcaacaggccgctgccgacgtgaacgcggccgtaagcggcatgagtgagcgactaaaccagctgttcaccagtttgagcgagcaacagggacggcagatggaggcggcgcagcagcagagcacccagttcgaagctcaattgcaacgcattgccggctctgcagatcagcggcaggaacagctggagcagcgtttcagcgagctgatggccggactgtcgagccagttgcaggggcaattgggctctgcgcagcgccgcgatgaagagcggcaggcgatgttcgagcgtttgctgagtgaatccagtgccaatcaggctgcgcttctggagaagttctccagttccactcaggaccagatgcgagtgatggccgaggcgggcaatgagcgccataacaacctggagaaggtgttctcccggttgatgatgaacctgaacacgcagctcgatacgcagatgggggccgccgagcagcgtgagcaggccagggcgcagcgccacgaggagcagcaagcggcggcactggcgcaacagcagcagctgatcggcaatctgggccagaccagccaacagcagatcggcgccattgccgaatccgcggcgacgcaacagcgcaatctcgaggaaacgttcagcaagctgctcggcagtttcaatgagcaggtcagcgggtacggcgtgcaggcggagcagcgtgagcagagccgccagcagcgctttaacgaacaactggaaaacatggctgcgcagcagcaggaattgctggcaggtatcgcgtccgccgttcaggttacgcagcagcagagcaggcaaatggctgagcagcatcagcagctgatgacgcgcctgcaacaggctactgaagcggccgcgaccagtagcaagcacatggatagcagcgccaatcagttgggcctgctttctgccaaccttcgtcaggcctccgacgcgcttggccagcgcctggaggcagtaacccagagcgtggaagctgcgagcacacagaatggcgcgttggctgcacaactgcagggccaggcaagttcgctgtcgcagctgcaggcagcactactcgagggcgcgcagcgcttcgagcaggccgcaagcgaagcacgcaatggctttggtgacatgaaacaaactcagcaggaattcctgtccggcgtaaggcatgaatttacaacgctgggtgagacgctgcgtgcccaagtggaggcagttgaaaagcaggctgaagagtggctgcgcagctacgccaccgaagtgcgtacgcagactgaggaccgcatgaacaagtggaacgaggtctcgcttgcctatgccgatcagatgcatcgcaacgtccaggccgtcagcggcattttggatgagctggaggcccgctga

SEQ ID NO: 7853 - DNA, 765 bp, Pseudomonas stutzeri ATCC 14405 = CCUG 16156
atgcgctttcgcaagtcgcatgatgtggccgtcgatgaggaaaacccgtactggatgtccttctcggacattatgtcggcgctgctggtgatcttcattctggcctcggtgatcctgatcctgcagctgatggacattcagcagaagctggaggagcggcaggtccagttcgaacaggaaatcgaagagctgaaaaaggcggagcaagtgcgccgcaccatcctcgatgaggcagttgaggcactgcgcaggcgcggcatcaaggtggaggtcagcgagaatcacacggtgctgagtattcccaacgaccttcttggcttcgataccggtgcctatgaaatccattcggcctatcaggcgcgagcgcttgagatcggcaaggtcatcaatgaggtgatctcgcgtgatgaccgggtggaatttctggacacgatttttatcgagggccacacggataatcgcccgttgcagggattcatgggcaaaggcaactgggggctttccacctttcgtgctatttcgctctggcagttctggggcgacgccttggcgcgcgaggagcagttgtcgcgcctgaacaacaaggacggaaaaccgctgttctcggtcagcgggtatggcgaaacacgtccggccgtggccgatcaggtcacggaggaagacttcaaacgtaatcgccgaatcgacattcgtttcaccatccgtcgtccggatagcgcgcagtacgagcaagtcaaggagcggctgggggaggccaagccatga

SEQ ID NO: 7854 - DNA, 2256 bp, Pseudomonas stutzeri ATCC 14405 = CCUG 16156
atgaggctgcctccagtagagtttcctgcggccagctggggcgctcagatgctcgagcgctggactgtactggcaaaaaaggctgccactatggaggcgagtgtcggaaacaatgatgcctatgagcgcacgagcgccgaactgcatcgtatggctcaaacactgcgctttgatgcgctgccggagatgttaaagcgccggataacggctcggacgctgacctcgctgtggctcaaaaacgaagtaatcgaacttctaaatgcacgcttgctaaccaccatgctgagagcgcagcagccacgtcttacgccgatgacgctgcggcagctggcacagctgtattttcggcgattcgatcgattgggcgaaaaggaaggggtgcgcgagcttctggagcgaagcctgttacagcagcttgacctgataccgccgtcgaagatccagacatcgcgagccgatccactggttacgctcaagcgcgaggggcattggttgctaagcctcgatggtccacgttatctcgctgaacgagtacgtcaaggcggacgtgagcttggcgagacgttcatggagctcggtctgcacggctttgatgatggccgttatggtgatatctgcagggcgcacttttatctcgaaacgttacgacacttgccccttggcgagtccgatccggtgctggatgagttgcttaagcctacagtggccaaggcgccctttgaaggcacacggcgaatcggccatgttgcgcttgagattctgatcgaccgtgctggccaggaacccggcgaagtctggcagaacttcattcttaacttggctggcgatcctcgtatctccagctccgcggtgaacttccgggagtggtggcagccgttgggtgaagagcgcattcaaaaggttcggggctggttgtccaaagaggacctgcggctgttcctgcaggccgttgagcaatacgggcttgaaacagccaatacggaaatgcagcggatgttccccgcccgcaagcgattccttgaagggctcttcaagctgaagttaattcgtaacactcgcctcctactgggcggcaaggctcaacaatcggtcaagcggatcctgggtaaggacgttaagaccagcttcgcgcggatggatgggcagatgacggacaaggccgtcatttatctggactgcggtgacttccatctggtcgagggctcacatagtttcaaaatctgggtctacttggccgcgcctggtgaagccctaagaacttatgagcgcaataccttcagtcactacgacctgaccaccacggtccccggaacttataagaaactctaccctgggttgccttacgatgcttttgtgcacaccccacacgcctggcagaacaaagtcttcaccttcctagccgagaatggcattgctcttgatgtcgagcagcttctgagcgctgaggactaccgccttcagctccgtaaattcggaatccctgccgtaagtgcaaagcgcacggtggttcccgctccggcgaaagaaggagccaaagcggtaacgcgatcgccgaaggctgctcaacaaggaactgaacacgctgcggcgctgccgtcacgcaacgccgatgtgccaaccccaccagggcgttcagctgatgtatcagtggctgcaaatggtgcggtgagttcaagcgccgttgcctccgggcgcgacaacccggttctgcaacgaacgaagctgccgccttttagctcgctccagctggcggccctgcgttatctcgagactcatccacgttgcggtttctatgcgttgctggaagcagtaagcaaccagggcggcaatgtgttgaacgtgaaaacaatgttggagagcagcctctctcagtacgtccagcaggacgaagagaggaagtggttgctgtcgacccatggtgagcagttgttagccgagctggccaggtcggagccatcggatgcaagtcagagcgtgccgagcgcggcagatatgaacgcaaacgacaacgcaggctcgagggtcgctaggctagagccatttgcgctggccgtattgcgttatttcgcggccaacccaggcgataaggttcgttatgcggcaaatgtacttgaagtcgacgcgaggctggtaaatcaggctctatacgggccattgaatgggatctgtacgcaggatgacaagtacggatggcagctgacgggcgcggctcaacgggagctggaagcgttcgaggctgaggggagagagcagtaa

SEQ ID NO: 7855 - DNA, 3039 bp, Pseudomonas stutzeri ATCC 14405 = CCUG 16156
atgagacttttcgatgttctgaagtcgttgattggcgaacgtgatgtggcggtcggtagtcaggaggggtttgcgtcgagtgcagactccaacggagtcaatttttatcttcccgtccagacgttcaaagcgttgcaggaaggcaagggcaacgcgctgcagaaaattcagctgattgtcctgaacatgctcgctgagcagggcatagcagagcatacggccaacggctttcatatcggcgctgaagatattgccggtatggacagtgagcaggccgatattctgcggctgccacggcggttcacggggcgctttcagacttccatcagcgggcgcacaggtaacagcggctttcgcgttgggcttgccgttgaagtggctgaaggcgttacacctttctcgcgcaaaggcccgtatttatacctgacgagtaccgagcgctactggcttacgccagctgagctaatggggctgatggcttgggaaaagcatgaatctctcgatcctgcacagcgaggggaggcggctaaccttcgtttgatggccgagctacagacagctgcccgaagcggtatgcgcatcgatctgagtcatttcgatcggcttgatgttgtcgtgccggaaaatgttggcgtcattgcgacccgactgccagatggcagcctgatgctgtgcccgagtctgggggatggatcgacgcccgatcagctggagaagcgctggtcgcagctcgacatgagcgctggcgggggtgtgctgcgaatcgacaatcgtgtggtgttgctcgatcaggccaagatggacggcattcgcaatgtgctggccaacaaacgaatcccgccagataaggtcgccgagttcatcgcctcgcctacggcctttctggatgctgcactggtaaatctcgaggtcggtttctcggtccgcgtagctggcattggcaagctgcagcatatggactttggcgcgttggatacggctaagaatgactggtttgccttggataagcgccccgcaccggctgaaatcattgccaaggtggttcagacgccggaagaactgcagcgcttcgaggaagtattacaggccgcgttggaacagggtgcaacgagtctgagctttgccggcgaggtcatcgacatctcggacgtgccccttgttgcgcgtcaattggaacgggtgagggagacgttcgacaagtccgagctgacggaccaattcgacacactggaagacgactttgacgagctaaaggaaaaggttgccgttattcttaaagatgccggcgagatcaactcaacgctgctggcaaaagccagcaacgctcgtttgctggactcgccaaactggtccgcttatgcgcggcagccattcccgcatcaggtcgaaggtgttgagtggatgctcaggctgatgagcgtcgcgttatccgacgatcatgatgacctctatcgcctgcagggcagccttcttgccgatgacatggggctgggcaagacatacatgtcgctggtcgcaatcggtgaatacctggcggcccagcggcgtagcgaaaagccgcagaaaccagtcttggtagtcgcaccacttagtctgttggaaaactgggaagacgaagtaggaaagacattccacggcattccgttccgtgatctggtggtgctgcaatctggaagagatttaaacagttaccgcgtcaagggcgccgagcgggagtcggttcagcttgctgccttggccgatgatgacggcatgatggatgcccagagcattcgttatgcgttaaccattgggccagaggcgggtcctcagcgtctggatatggatcgtcgtttggttttaacaacgtaccagacgctgcgtgactaccagttttctctgtgcaggatcgactggggcatggtcattttcgacgaggcgcagaacatcaagaaccctaacgcactgcaaacccgtgcggcaaaggggttaaaggctgacttcaaattgttggccacaggcacgcccgtggagaacagcctcggcgacttctggtgtttgatggatacggctcagccagggttgtttggcagctgggaaaactaccgagacacttggatcaagccgattctctcggccggcgaggaggagcgcgacgaggtccgtgttcgtctgggtgagcaactgcgcaaggctgtcgggccgttcatgctgcgtcgcgtgaaggaagaccagctcaaaggcctgcccagcaaaactatccgtagtggggtagagcaggtcgatcgaggcattcagcgttacgcgcctgagttgggtgtctcaatgcgcgggattcaattgcaggtgtatgacgatgtgctagatggataccgtgctcgacgcgccagcgcagatgacatgcgtggttcggctctagcggcgcttacgcagttgcgctcggtatcgttgcaccctcgtttggatgatgaaccatcgctctacagtcgggatggccaccatgcgcggcagttgatgtccgagtccggcaagctagccgtgatgctcaaactgctggacgagattcgggataagggcgaaaaggtcatcctgttcatgatgaccaagcgcctgcaaagggttttgaaactgtggcttgatcagatctacggcctggacattgcagttatcaacggagatacaaaagcggtagctaccaaagcggaagaaatgactcgtaagaagctcatttcagcatttgaagcgaagtcaggattcaatctcttgatcatgtctccggtcgcagcgggtgtagggttgacggttgtcggagctaaccacgttgttcacctggaacggcactggaacccagcaaaagaggcgcaggcctctgaccgtgtctatcgcatcgggcagcagaaggaggtgtttattcatctgcccgccgtaacgcatccgcaattcgattctttcgatgtgcatctggatcggctgctgcgcggaaagttaatgctcaaggacgcggtggtgacaccggaagcggttagtgagagcgagatgatttactcaatggggctttag

SEQ ID NO: 7856 - DNA, 2346 bp, Pseudomonas stutzeri CCUG 29243
atgatggatttgctgcaacacctgatccccgatttcgcccatatgttcagtgccaaccctaacggcatcagcgcctggttctggttggtcaccgcactgatcttcgggttttcgctgttcttcttgatgctgcatttccggcatttcaaagcgcgcatgcgtgcactgcgctcgctgctggacgggcagagcaaggacaccctggctgccagccgaagagaaacgctgcacaaggcacaggaactgaaggcatccaatgtcggcatgctctggcgcgagttcgatgaaagtctcgtgcagtcgtccgaccagcaaaagctgttcaacactctggatgccgagcatttcttcaatgcgcgcacgctggccagtggtctgacggccagccgcctgctggccgcagcacccagtttcctggtggcggtcggtgtgttgggtaccttcgttggtttgaccgtcgggcttgaggggctggtgggcacgtccgacgagatcgaggcgctaaagggcggcatcaacaagctgatctccggcgctgctgtggcgttcatgacatctgtgtggggcgttgccttcagcctgctgctgaacatcatcgagaagatgttcgagcgtagtgcgctgaatgatatccagcggctgcagcacgatatcgactttctctacccacgcattcccgccgagcaatcgctggtgcatatcgcggaatacgggaaggagagcaaggaagcgctgcaggagttgcacgagcgcattggcgatcggctgcaggaaactctcaatggcatgaatgaggccatgcagacagcgctgaccgatgcactgaacaacatcatggctcccgctattcagactttggtgagcactaccagccagcaatctacccaggtgctggaaaccctggttggaagcttcatggacggtatgacgtcggttggtcgggagcagggcagccagatgcagcaggccgctgccgacgtgaacgcggccgtaagcggcatgagtgagcgcctgaaccagctgttcaccagtttgagcgagcaacagggacggcagatggaggtggcgcagcagcagagcagccagttcgaagctcaattgcaacgcattgccggctctgcagatcagcggcaggaacagctggagcagcgtttcagcgagctgatggccggactgtcgagccagttgcaggggcagttgggctctgcgcagcgccgcgatgaagagcggcaggcgatgttcgagcgtttgctgagtgagtccagtgccaatcaggcggcgcttctggggaagttctccagttccactcaggaccagatgcgagtgatggccgaggcgggcaatgagcgccataacaacctggagaaggtgttctcccggttgatgatgaacttgaacacgcagctcgatacgcagatgggggccgccgagcagcgtgagcaggccagggcacagcgccacgaggagcagcaagcggcggtactggcgcaacagcagcagctgatcggcaatctgggccagaccagccaacagcagattggcgccattgccgaagccgctgcgacgcaacagcgcaatctcgaggaaacggtcagcaagctgctcggcagtttcaatgagcaggtcagcgggtacggcgtgcaggcggagcagcgtgaacagagccgccagcagcgctttaacgaacaattggaaaacatggctgcgcagcagcaggagttgctggcaggtatcgcgtccgcggttcaggttacccagcagcagagcagacaaatggctgagcagcatcagcagctgatgacgcgcctgcaacaggctactgaagcggccgcgaccagtagcaagcacatggatagcagcgccaatcagttgggcctgctttctgccaaccttcgtcaggcctccgacgcgcttggccagcgcctggaggcagtaacccagagcgtggaagctgcgaccacacagaatggcgcgttggctgcacaactgcagggccaggcaagttcgctgtcgcagctgcaggcagcactactcgagggcgcgcagcgcttcgagcaggccgcaagcgaagcacgcaatggctttggtgacatgaaacaaactcagcaggaattcctgtccggtgtaaggcatgagttcacaacgctgggtgagacgctgcgtgcccaagtggaggcagttgaaaagcaggctgaagagtggctgcgtagctacgcctccgaagtgcggacgcagactgaggaccgcatgaacaagtggaacgaggtctcgcttgcctatgccgatcagatgcatcgcaacgtccaggccgtcagcggcattttggatgagctggaggcccgctga

SEQ ID NO: 7857 - DNA, 765 bp, Pseudomonas stutzeri CCUG 29243
atgcgctttcgcaagtcgcatgacgtggccgtcgatgaggaaaacccgtactggatgtccttctcggacattatgtcggcgctgctggtgatcttcattctggcctcggtgatcctgatcctgcagctgatggacattcagcagaagctggaggagcggcaggtccagttcgaacaggaaatcgaagagctgaaaaaggcggagcaagtgcgccgcactatcctcgatgaggcagttgaggcactacgccggcgcggcatcaaggtggaggtcagcgagaatcacacagtactgagtattcccaacgatcttcttggcttcgataccggtgcctatgaaatccattcggcctatcaggcgcgagcgcttgagatcggcaaggtcatcaatgaggtgatctcgcgtgatgaccgggtggaattcctggacacgatttttatcgagggccacacggataaccgtccgttgccgggattcatgggcaaaggcaactgggggctttccacctttcgtgctatttcgctttggcagttctggggtgacgccttggcgcgcgaggagcagttgtcgcgcctgaacaacaaggacggaaaaccgctgttctcggtcagcgggtatggcgaaacgcgtccggccgtggccaatcaggtcacggaggaagacttcaaacgtaatcgccgaatcgacattcgtttcaccatccgtcgtccggatagcgctcagtacgagcaagtcaaggagcggctggaggaggccaagccatga

SEQ ID NO: 7858 - DNA, 2259 bp, Pseudomonas stutzeri CCUG 29243
atgaggctgcctccagcagagtttcctgtcgccggctggagcgctcagatgctcgagcgttggattgttctgacaaaaaaggcagccactatggaggcgagtgtcggaaacaatgatgcctatgagcgcacgagcgccgaactgcatcgtatggctcaaacactgcgctttgatgcgctgccggagatgttaaagcgccggataacggctcggacgctgacctcgctgtggctcaaaaacgaagtaatcgaacttctaaatgcacgcttgctaaccaccatgctgagagcgcagcagccacgtcttacgccgatgacgctgcggcagctggcacagctgtattttcggcgattcgatcgattggacgaaaaggaaggggtgcgcgagcttctggagcgaagcctgttacagcagcttgacctgataccgccgtcgaagatccagacatcgcgagccgatccactggttacgctcaagcgcgaggggcattggttgctaagcctcgatggtccacgttatctcgctgaacgagtacgtcaaggcggacgtgagcttggcgagacgttcatggagctcggtctgcacggctttgatgatggccgttatggtgatatctgccgggtgcacttttatctcgaaacgttacgacacttgccccttggcgaggccgatccggtgcttgatgagttgcttaagcctacagtggccaaggcgccctttgaaggcacacggcgaatcggccatgttgcgcttgagattctgatcgaccgtgctggccaggaacccggcgaagtctggcagaacttcattcttaacttggctggcgatccgcgtatctctagcacgaacgaaaggtttgtagagtggtggcgcccgctcggtgaagagcggattcaaaaggttcggggctggttgtccaaagaggacctgcggctgttcctgcaggccgttgagcaatacgggcttgaaacagccaatacggaaatgcaacggatgttccccgcccgcaagcgattcctggaaggactgttcaagctcaagttgattcgtaacacccgacttttgctgggcggcaaggctcaacagtcggtcaagcgaatcctgggcaaggacgttaagaccagcttcgctcggatggatgggccgatgaatgacaaggccgttatctatctggactgcggtgacttccatctggttgagggctcgcatagtttcaagatctgggtctatctggccgcccctggcgaagccctcagaacttatgagcgcaataccttcagccactacgacctgaccaccacggtccccgggacttataagaaactctatccagggctgccctacaactcgttcgtgcacatcccacacgtctggcagaacaaagttttcacccttctagctgaaaacggcatcgcccttgatattgagcagcttctaagtccggaagattaccgccgccagctgagtaaattcggaatccctgccgtaaatgccaagcgcacgctggttcccgctccggcgaaagaaggggccaaagtgggaacgcgagcgccgacggctgctcaacaaggaactgaacgcgctgcggcgccgatgccacgcaacgccgatgtgccaaccccagcacggcgttcagccgatgttgaatcagtggctgcaaatggtgcgatgagatcaagcaccattgcctccgagcggaacaacccggttccgcaacaaacgaagctgccgcccttcagctcgctccaactggcggccctgcgttatctggagactcatccacgttgcggtttctatgcgttgctggacgctgtaagcaatcagggcggcaatgtgttgaacgtgaaaacgatgttggagagcagcctctctcagtacgtccagcaggacgaagaggggaattggttgctgtcgatccatggtgagcagttgttagccgaactggccaggtcggagccatcggatgcaagtcagagcgtgccgagtgcggcaaatatgaacgcaaacgaaaacgcaggctcgagggtcgctaggctagagccgtttgcgcttgccgtactgcgttatttcgcagccaatccaggcgataaggttcgttatgcggcgaacgttctggaggtcgacgcgaggctggtaaatcaggctctatacgggccattgaaagggatctgtacgcaggatgacaagtacggatggcagctgacgggcgcggctcaacgggagctggaagcgttcgaggctgaggggagagagcagtaa

SEQ ID NO: 7859 - DNA, 3039 bp, Pseudomonas stutzeri CCUG 29243
atgagacttttcgatgttttgaagtcgttgattggcgaacgtgatgtggcggtcggtagtcaggaggggtttgcgtcgactgcagactccaacggagtcaatttttatcttcccgtccagacgttcaaagcgttgcaggaaggcaaaggcaacgcgctgcagaaaattcagctgattgtcctgaacatgctcgctgagcagggcatagcagagcagacggccaacggcttccatatcggcgctgaagatattgccggtatggacagtgagcaggccgatattctgcggctgccacggcgattcactggccgctttcagacttccatcagcgggcgcacaggtaatagcggctttcgcgttgggattgccgttgaagtggctgaaggcgttacacctttctcgcgcaaaggcccgtatttatacctgacgagtaccgagcgctactggcttacgccagctgagttgatggggcttatggcttgggaaaagcacgagtcgctcgatccggcacagcgaggcgaggcggctaaccttcgcttgatggctgagctacagacagctgcccgaagcggtatgcgcatcgatctgagtcatttcaatcgactcgatgtggtcgttccggaaaacgttggcgtaatcgctacccgcatgccagacggtagcctgatgctgtgcccgagtctgggtgatggatcgacgcccgatcagcttgagaagcgctggtcgcagctcgacatgagcgctgacggtggggtgctgcggatcgacaatcgcgtggtattgctcgatcaggcgaagatggatggcattcgcaatgtgctggccaacaaacgaatcccgccggataaggttgccgagttcattgcctcgcctacggcttttctggatgctgcactgataaatctcgaggtcggcttctcggtccgcgtcgctggtattggcaagctgcagcacatggactttggcgcgttggatgcggccaagaatgattggtttgccctggataaacgccccgcaccggctgaaatcatcccgaagttggttcagacgccggaagaactacagcgcttcgaggaagtgttacaggccgcgttggaacagggtgcaacgagtttgagttttgccggtgaggtcatagacatctcggacgtgccccttgttgcgcgtcaattggaacgggtgaaacagacgttcgaccagcccgagcggacggaccagtccagcgcactggaagacgactttgacgagcccaaggaaagggtcgccgtcattcttaaggatgccggcgagatcaactcagcgctgctggcaaaagccagcaacgctcgcttgctggatgcgccaaactggtccgcttatgcgcggcagccattcccgcatcagatcgaaggtgtggagtggatgctcaggctgatgagcgccgcgttatccgacgatcatgatgacctatatcgtctgcagggcagccttcttgccgatgacatggggttgggcaagacatacatgtcgctggtcgcaatcggtgaatacctggcggcccagcggcgtagcgaaaagccgcaaaaaccagtcttggtagtcgcaccacttagtctgttagaaaactgggaagacgaagtagggaagactttccacagcattccgttccgtgatctggtggtgctgcaatctggaagagatttaaacagctaccgcgtcaaaggcgccgagcgggagtcggttcagctggctgccctggctgatgatgacgggatgatggatgcccaaagtattcgttatgcgttaaccattgggccagaggcgggtgctcagcgactggatatggatcgtcgtttggttttaacaacgtaccagacgctgcgtgactaccagttttcgttgtgtaagatcgactggggcatggtcattttcgacgaagcacagaacatcaagaaccctaacgcactgcaaacgcgtgcggcgaaggggctgaaggcagacttcaaattgttggccacaggcacgcctgtggagaacagcctcggcgacttctggtgcttgatggatacggctcagccagggttgtttggcagttgggagaactaccgagacacttggatcaagccgattctctccgccggtgaagaggagcgcgacgaggtccgtgttcgcctgggtgagcaactgcgtaaggcggttgggccgttcatgctgcgtcgcgtgaaggaagaccagctaaaaggcctgcccagcaaagcgatccgtagtggcgtagagcaagtagatcggggcatccagtgctacgcgcgtgagctggggacaactatgcggggcatccagctccaggtctacgacgatgtactagatggataccgtgctcgccgcgcaagcgcagatgacatgcgtgggtcggcgcttgcggcgcttacacagttgcgttctgtctcgctgcatcctcgcttggatgacgaaacgtcgctgtacagccgtgatggagagcatgcccgtcagttaatgtccgagtcaggcaagttggcagtgatgctcaagctgctggacgaaattcgggataagggtgaaaaggtcatccttttcatgatgaccaagcgcctgcaaagggttctgaaactgtggcttgatcagatatacggcctggacgtcgctatcattaacggcgataccaaagcggtagctaccaaagcggaagatatgacccgcaagaagctaatttcagcgtttgaagcgaaatctgggttcaatatgctgatcatgtcgccggttgctgcaggggtaggtttgaccgtagtcggggccaatcacgtggttcacctggagcggcactggaacccggctaaagaggcgcaggcctccgaccgtgtctatcgcatcgggcagcagaaggaggtttttatccatctgcccgccgtaatgcatccgcagttcgattctttcgatgtgcatctggatcggctgctgcgcggcaagttgatgctcaaggacgcagtggtgacccccgaagcggttagtgaaagcgagatgatttactcgatggggctttaa

SEQ ID NO: 7860 - DNA, 2049 bp, Pseudomonas stutzeri KOS6
ttgaagaagctcgcacggcaagtgcgtgaactcaagaagttgcagccagccaagcgccgtagcgaactggagcagttgttccacgagcatacgctggggcatgcctggcaggagtatgccgagacgctgcatgaccagttcgaggtgcatgagggcgagcggcgcttgttgtgctctcgcgcaactgccggcgcggggcatttctttaccgcccaaacggtggtggagacgccactaggcaccgagttttacaagcacttgccgggcatcctgacggggatcggtattgtcggcaccttcttcggcttgatgttgggcctgcagcacttcgaccccagcacacccgagcaggtcagctccagcgtcgatcagttgctcaaggacgtgctatttgccttcctcggctccttcttctcgatcttcgcttctattggcgtgacgctgaccgaaaagtggcgcctaggccgctgctacaagcatctggaatccctgactgagagtatcgacgggctgttcgacagcggcgtgggcgaggagtacctggcggagctggtgaagtcgagcaacgagagttcgatccagacccgtcagctcaaggacagcctggttaccgatctgcgtgagatgctgcaaaacctggtagatacccaggtgcgtgagaacctcaagttggccgattctctttcggcaagttaccgcgactctggtcaggtgttggccgagcagattggcggcgccatcgagaacagcctcaagtctcccctggaggccatcgccggagctgtgaataccgccagcggcgaccagagcaaccaggtgcagagcctgctcaccgatgtgctcacagcctttatgagtaagctggaaagtacctttggccagcagttcaacggtctgcatgagatgctggggcagtcggtcgcggctatgcagtccatgcagcagggcttcaatgagctggtcggcgacatgcgctcggcgagcgaggcttcatctcagaacagcgcgaagatgatcgcgcagctgctgtccgacatgcaggctgggcaaaacagcatgcaggccgggatgaacgagatgctggccagtctgcagacgtccatcgcgcgtatcggcagtgaaggggagggggctggtgagcggatggccaagcagttggagaagctgtttgccgatagcgaggcacgccagcaagccatggcggagaatctgcagatctttgtcgaatccctgcagcagagcattggccagggccagcaggaaaccatggcgaagatcgccggctcggtagatgtgctgggcgagcaattgggcggcctcttcaagcagcttgagcaaaaccgtacgcagatggaacaggccagcaagaccgcccaagtcgaactgcaccgtggtacacgcgaggtggttggcggtctggaagagcaggtgaaaaccctgctggatgccgtcgccgatcagcaaggcgcgatgcaggacagcctcaagctactcggtgcgcaaaccgagcaacacttgcagagcatgcaacaaggtgccgagaagatgcgcctggcagccgagcgcttcgacagcgccgggcagagcgtgagtaaagccggggaggcgactgcgagcgtactgggtgcgctgcagggcacgagcggcgatctggttggcgcttcccgcgaactgaccagtgtggtggccgactatcgcaataaccgcgaagcgctaaatcagacgcttgcggtcattcagggggtggttgccactactcagggggagtccgctgggcgcagccaatacctgcaggatctgaagctgcaaggcgagcggctgcagacgctcaatcgtgaagtgaacgactacctagagcagatcagtgccgtgctgggcaagggcttcaacgagtttagtgagggggtagatcgtagcctgcggctgacgctgggtagcctggatgccgagctgcataaggcgatgaccagcctggccggtggtgtcgaaggggtcaaggaaagcctggaagacttcagtgacatcatggagcgcgttcagcgccgctaa

SEQ ID NO: 7861 - DNA, 738 bp, Pseudomonas stutzeri KOS6
atgttcggcaaatcagccgctcccgctcgggcgcgtgacgagggcgagaagcctttctggatttcattcgccgaccttatgacggcgatgatgatcttgtttctggtggtgatggtggcctcgctgagctcggtgacgcagcgtattcagcaggctgagcaaggtgagaaacagcgcggtaaggacattgctaagctttgccaggatctcaaactgagggcgggagggcttaactccaccatcgtggtggactgccgggataaccgcattagcttcggtgaggctgggcgctttggccacaatcaatactttctcaacagccaggggcagcaggccctgcaggatgttgtgccgttgatcttggatgccgctgacagcgaagagggacgcaagtggctcaagcaggtggtgattgagggcttcaccgatacggacggctcttacctgtacaacctgcacctctcgctgcagcgctcggagtgggtgatgtgcagtctgctcgatagccgcagcccggtgcagaaagggctttcagctgagcgtcagcagcagattcgctccatgttcctggctggtggtgtgtcgttcaacaatgccaaggagagcaaggaggagagtcggcgggtggagctgcgcatgcagttcttcgggcttaaggaccaggagcatgaaggtcaggaaccggcgcttgagtttgcttatgcggcaaacgaaaagtgccagttggagatgcgctag

SEQ ID NO: 7862 - DNA, 1677 bp, Pseudomonas stutzeri KOS6
atgagccgggctctgtcgtctctgtcggcggccatcacttctggcttgcagcgccagaatgagcgcagcggcgatgccgggtttagtagcatggtggcgctgaaacgcgtcaacactgagctttctcggcgttttgaccaggtcgaaaaagccctggcaccgccccgcgagaaacgcttgctggctcttggcaagttcaagcgtgagcaggcgctgacttcatcggagtggcgcctggtttttgccgggctggctgatgacgatgaagtcagtgttccggtgctggaggacgatcacctgttcgaccgtgttcatcgggaggtggctggccgtatcgagcaacggacacttagccgccgcgactggctggcgctgtgtttcagctactttgcctacgatgagcacaaacctgacgacaacgcgaactggcgggtgctgcgtgacgatattgatcgcggcttcgatgctgtcaggcagcgtatcggtcgtgaaaaagagtggatgcgcattgttgccgagcatcgcgaactgttcggcgctcaggctggaacccgtctggcagaggagatattcgagggcagggcgcgtgatctttcctcactacaggccattgcccaggtgccggatggtagttggttgtggcagcggatttttgcggttctgctttcgcgcattttcctgctggatgacgaaaccttcctgaagcgcctaccggagttggtagctctggggcagctgaatacgcgctatctcaatcaggtgctaagtgcctgcctgactcgttatcaccgttcgcggtatcgcgagcagtcgtcctcgctactcaagcaggctgcgttggagcactggggcagcccacagatgcgttccaagcagaacgcatggttgcagtatgtggagcaacctgtttgcgcgatggtggttgcctggtttgccaaggaggatctggagcacttcttcaccttgctcaagggcgaggcggaggtcgaccagtcgcgcctgttttactggttacgctttgccaatcagatgagctacacgcggattgtgatgggaggtgatgcgtggcatgaccggggtagtgatttcgtggcttttcgtgagaagaacaaaggccgcttaagtcagctcgcgggagggcctagtcacaacaatgccgtggtgatgcagatcggcaattacttctttgtggagttttctggtaccggcaatgcttgctacgtctatcgtgccgatgccgcaccatttaatcctgataaaccggtgctggggctggcaactgagctgaagcagcaaggacgggcgctgaagcgtatgtcccactctccagccccgcggcgacccaacgtagtcgaagggtggctggagaagtttgatgatgagctccggacgctgggaatcgtcgcacagcgtccagcgtcatttacgcaaccccgcctttccggtgacaaacccgctgttcatacggctgcgtctgcacctggcacgggtgattcgctggacgtgcaggttaggtcgatgttgggcagtgtgccctataagaccttcgaccaccgatcgaaaagtggggtctaccaggttttgcttgccagggatgatgcggctgccaaaacagcgctgctgcgcctcggcttcaaggctgtgaaaaacaatgcactcatgttctggaggctttga

SEQ ID NO: 7863 - DNA, 3252 bp, Pseudomonas stutzeri KOS6
atgctcggccgatttttttccgggaaggatcgttctcaatctgccaagggggcagcgcctggtgcttaccagattgaggaacaaggtatttgttatgccttgagtctggccgatgacgatacaagctggcccgttgctgcctacctggaccagctcttcgaagaagactatgccagccagctgagtgatcgctggctgttgccttgggagtcaatctatcagctcttggatgatccggcgcacgctagcagccttcctttgcttggcttgcccgcgattgccaagctgcaaccgcagttggccagtaccgggggattgtcgggtccggatttcaaggtgtttgtccagtcctggcgcaattcggagacgggcagcccggttactttcgagcgtgttggcgccatggcgcgccatgctgcaaccactgagttgttgccgccagcggtctgggagctgttaaaggccattcgggatttgcatgccgctcagcagcaggctccgggagaggtcaccaaccaaatcggctgggccaatatccgtaagttggccaaacgcgctggtgcggtattggacggatttctcgacaagaccgtggtggttaggcctgagcacttgaagctgagaccacgcaaggccgtagtatccggtacgccgattatcgagttagatgtcgcgtttgacgggcagcctgacaattggttggccagtttcgatggttacaagcaggtgcaggataagtaccgggtgccgggcgccgatggttcggtgacgcacgtactcattgagccggatgtaaaggcggtgcttgagtctgtacgcgcattaccgggtcggcgtgtggccggtgatgaagcgctgtcactggtgcgcaacccctacagcgtgatcggggatgcagccgagaaggttgttgatgcggacgaatatgaggagcagctggccgatgcgggcatctacttccatcgttttcgcctggaaccttgtctaggtgaggacggcaagcatgttcggtcgattggtctgttccttgaacctatctcggccaagccgctacctgaagttgagctgcgcttcgattttgcccacgagttcgcgccatttgtgaatgagctgcaagtgaagttggcggctggtatgcccgcgggattctggcagggctatgagctggagctgagtgacttcgatctcgcgcagttggcaggggtcaatgagcttttgcgccactggcagcgccaggaggccgggcagacgtttgaggaagtgctggatttggcctcgtatggtgatcgcgttgtcggcataggtgaggcggagcgcattacatctccatttttggtgaaagaggcaacggaaaactggttgccggtcgatgtgaaagagctcgggatggatggcgatctgctcagtcagtgggatcctgctagccgtgaagattttgaagagtttgagcaccgcatcgaccaggcgcgtgtggcgggtgatgaacaagtatgtctaccgggtactgaaaccccgctacctttccaggtcgcggagcagctttatgaggcctggtcgaagaagcttaatccggtcgagcctaaatcacctgttgtgactgagcccgtcgctggccgtgcggtgctgcatatcgagcacaacattgaggaagcgacctatgcccagcgccgtgaggcggctctgttggcggggcggcatgccaatgcggatattccagagctgcttcgccccgaagttcagctgcgcgatcatcaaatgaaaggtgtggcatggatgcagcacctgtttggcttgtcaccggatcatgtcgcaggttgcttgcttgccgatgacatgggcttgggtaagaccattcaactgctgaccttcgttgtttggtatttggagcagaaccctcagggtaaaccggtcctgattgttgcccccgtttccctgttggataactgggagcgtgagctgcagcgattcttctatgcggatgtattgccggtattgaagctttatggtggagcgctcagcgctgttaagttcaagagggacgagattccggaggatctgcaggccaagggaataaaaaatcttctccggccgggttggatgggcgatgctcgaatcgtgctgaccacctatgaaaccttgcgagatcaggaactctccttggcacggcagcagtgggccatcgtgatctgcgacgaggcgcagaagatcaaaaacccggcggcgctgatcacgcaagcggcgaaagcaatcccctctcgattccgtatcgcctgcacgggtacgccggttgagaacacgctgatcgatttgtggtgtcttttcgactttattcagccgggcttcctgggggggctaaatcagttcggtcgggagtatcaacgccccattgaagcaggcttggagcgcgatacagcagcgcttgaacgcctgcgtgggcttatcgagccccagacattacggcgtaccaagcaggatgtggcgaaggatctcccggccaaaattgaggaccaggggtgccgcaagctgctgatgcacacgttacagcgcaatctctatttgtccgaggttgctcagtacacacagaagcagcagatgcaggaacaattggagcagcgagagagcggcatgctcggtttgctgcacaagctcaagttggtgtgcgcgcacccattcagcgtgcagcctgatccacgcttgagggaacactcgccgaagctgcaatggcttttaagcacactggataatattgcgcgttcgggaagcggcgataaggtcatccttttcaccgagttgcgggacgtccaacgtgaattgcaacatgcgattcaggaacgcttcggcttcaaacccacggtgatcaacggcgataccagcaccagcagtcagagtgcacagagccggcagcgacttatcgatcattttcaagagcagcctggcttttcggtgatcatcctctccactgttgcggttggatttggtgtgaacgtgcaggtagccaaccacgttatccatttcactcgctgctggaatccagccaaagaggatcaggccaccgatcgcgcgtaccggattggtcaggaaaaggacgtgtacgtctattacccgactgtgcgtgatgcgaggatacctacatttgaggcgacgctggatgagctgctacagaagcgacgcgcgttggcgcgggacatgctgcagggggcatctgagcttcaggcatctgagtttggggaactgttaagggcgcaaggatga

SEQ ID NO: 7864 - DNA, 2346 bp, Pseudomonas stutzeri B1SMN1; identical to SEQ ID NO: 7848

SEQ ID NO: 7865 - DNA, 765 bp, Pseudomonas stutzeri B1SMN1; identical to SEQ ID NO: 7849

SEQ ID NO: 7866 - DNA, 3039 bp, Pseudomonas stutzeri B1SMN1; identical to SEQ ID NO: 7847

SEQ ID NO: 7867 - DNA, 1980 bp, Pseudomonas syringae pv. actinidiae ICMP 19098
atggaaaaggtattcaacgctacgaagcttaagcatctctggaaagagtattcggaaacgctccacaaccagtttgagtatcacgaaggtgaggagcgcctggtgcgctctcgtgcaaccactgtcgcggcaaatttttttacaagtcaaagtgttgtcgatacaccgctggctactgagtttttcaagcacctgccgggcatcctgacgggtgtcggtattgtcgggactttctttggcctgatgctagggttgcagcactttgatccaagcacaccggagcttgtcaacgcgagcgtcgacaagctcctgaaggacgttctctttgccttcatcggttcagtcctttccatcatggcgtcgattatcgtcactgtctcggaaaagtggcgattggggcgctgttataagcaccttgaatcgctgaatgaggcgatcgatagcctatttggcagtggtgtgggcgaggaatatctggctgcgctcgtgcggtccagtgctgaaaattcgatccagactcgccagttgaaagacagtctggttacggaccttcgggaaatgctgcaaaacttggtcgatacgcaagtccgcgaaagtctcaagttggcagatacgttatctacgacctatcgtgattccgggcaactgttggcggatcaggtcagcaatgccattgaaaacagtttgaagtcaccattggaagcaattgctggagctgtacaggctgccagcggcgatcaatccggccaagtgcaaaacctgcttcaggatgttctggttgctttcatgaacaaactggaaggcaccttcggccagcagttcaacggcctgaatgaaatgatgggccaatctgtcgctgccatgcagtcaatgcagcaaggattctccagcctaattcaagacatgcgctcggcgagcgacaactcgaatcaaagcagctcggcaatgattgcacagctgcttgccgacatgcagaccggtcaaagcgccatgcaagctggcatgaacgagatgctggcaaatctgcagtcatccatagcccgtatcggcacggagggcgaagacgctggcgcgcgtatggcacagcagttggaaaaaatgttcgccgacagcgaggcgcgtcagatggcgatggccgaaaatcttcaatcgtttgtcgagtcaatccaaaaaaacatgggccaaggccagcaagaaaccatggccaagattgctggctctgtagaagtgcttggcgagcagctttctactgttttcaaaaaactggaaagtgggcgcgagcaaatggatcagtccactcgcgttgcacaagcagagcttcatcacggcactcgcgagttggtgggggggttggacgagcaggtcaaaacgctgctgcagtctgtcgcggaacaaaataaagcctcacaagacaacgtcaaggcattaagcgcgcaaaccgaacagcatctgcaaagcatgcaacttggtgcagacaaaatgagagccgcagcagagcgctttgaaaatgccggattgagtgtatcgaaggccagtgaatcgacggctagtttgctgggcactgttcaaggggctggtaccgagcttgctcaggcctcacgagagttgaacagtgtcgtcgcggactatcgcaacaaccgtgaatcgttgagcaaaacactaaccgtcatcgagggagtggtggctagcgcgcaagttgaggccagcggacgtgctcaatacctccaggatctgaagcaacaatcggaacgcatgcagtcgctcaatcgcgaggttcatgagtatctggaaaacatcagcggtgttttgggcgatggttttaaagagtttggcgacggcatggacagagcactccggcagacgctaggtagtcttgatacggagctggataaagctgttaaaagtctggctggcggcgtcgacggagtgaaggaaagcattgaagatttcggcgacatcatggaacgaatcaagcagtaa

SEQ ID NO: 7868 - DNA, 744 bp, Pseudomonas syringae pv. actinidiae ICMP 19098
atgtttggtaagcaaatgccttcggtggcccgagccaaggatgatgcggagaaaccgttctggatctcttttgcagacttgatgaccgcgatgatgatcctgtttctcgtcgtgatggttgcagctttgagctcggtcactcaaaggatcaaccagtcagagcagggcgagaaacagcgcagtcgcgacattagcgagctctgcgagcatttgcagctcaaggctaagggctcgaatgcaaccatcgttgtcgactgtaaggacaaccgcatcagtttcggtgaagcgggacgttttgggcataatcagtattcattgagcgacgagggtcaaagtgcccttcagggcgtagtcccgcttatccttgatgccgcggatagcgaagagggtcgcaagtggttcaaacaggtcgttattgaggggtttaccgataccgtcggctcatatttgtacaacctacacctatcattacagcgatccgagtgggtcatgtgcagcttgcttgatagtcggagccctctgcaaattggcctttccgctgagaggcagcagcagatcagattaatgtttctggcggggggcgtttctttcaacaacgcaaaagacaccaacgaggcaagccgccgagtcgagctgagaatgcagttctacggtttgaaggagaaagaggaagacctaaaatcagatgttccggtattcgccagtaccgtgtccgagaaatgccaattggcgatgacgcgatga

SEQ ID NO: 7869 - DNA, 1137 bp, Pseudomonas syringae pv. actinidiae ICMP 19098
atgcgcatcgtccagcatcataaggagctgttttccgaacaggcaggggagacgctcggtgagcagatgttcaacggcgagatcagtgatctctcggtgctgcaagcaatcgcgcagatacctaacagcagttggttatggcaccggatatttagcgtattgctgtctcgaatcttcgtcttggacgacgaagagttctcgaaacgattccccgacttcattgagatcggacgtcagcatccgacatacatgaatgcgctcctcagtgcctgcctgacacgttatcacgcagctacgtatcgggaaaaaccgtcgtcccttctcaagcagactgctttggataactggggcagcccacagattcgttcaaaacaaaacagctggctccagtacgtggagagagacgtttgtgcaatggtggtcgcgtggtttgcgaaagaagaccttgagcacttcttcaatctattgaaaggtgatgccgacgttgaccattcgcgtctttactattggcttcgttttgcaaatcagatgagctacacccgcattgtcatgggattagacgcttggggtgatcgaagtaaggacttcgttcattttcgtgagaaaaataagggccgtttcagtcgcctgggaggcgctcctagccacaacaatgccgtggtcatgcagatagggaattatttttttgtagagttttctggtacaggtaacgcctgctatgtgtatgaggcaattaagtcaccgttcaatccggacaaatctcaattagaacttggggagcttaaacaaccgcctcaggctttggcgcgcatgcgccactcaccggctcccagcagcccaactcgaatcgagggttggttgagcaaatttgatgatgaacttcagcgactaggcatatcgattcacacgcagtctggttttgtgccgagtccatcctcaaagcaacagctgatgagcttggacgaacaagtccgagatgccgtaaaaacggttagatacaaaatacacgactcccgcggcaagggtggcgccttccaagtccacttggacagtcatgaccactccgctgtagccgcgcttcaacgcttaggcttcaagcccgtcaaccatcagccactgagattctggaggcagtaa

SEQ ID NO: 7870 - DNA, 3249 bp, Pseudomonas syringae pv. actinidiae ICMP 19098
atgctcaagcgttttctatctggaaaaggcctgctgccgaagtccggtgagctcaataatttgccaacgtactcgatagaggagcagggattgtgcttcccgctgagccttgccgacagcactgagttttggccactggcaagttacctcgatcagctcgaagaggaagagttcgtatcccaactcagtgatcgatggctactaccgtgggacgagctttatcgactattgaatgacgaaggacacgtcagcagcgtaccgttactcggattgccaaagcagtcgaacttgacgccgcagctcaccagccaaggcagtcttgcttcgagcgatttcatggtatcgataggtgcttggagcgatcacgaatccgccgcgacagtgcaaactaaacgcacgggcgctgtcctcaggcatggcgataaaatcgagctgctgcctgaggcaacttaccaactggtgagtgctgttcggcagctccatttatcgcaacaagaaagccccggcgaacttaccaaccagatcggctgggccagcgtccgcaagctggcccgcaaggctggcgcaggcatggacggttttctcgacaaaaccgttgtggtcaggcccgataaccttcgtctcaatccacgtaaatcgagcgtaggcaatacgccagtcatcgagctggaacctactttcgacgggcagcctgaaaattggttggaaagtttcgatgcccacaaacaagtgcaggatcgttatcgggtcattggggctgacggatcactgacccatgtgctgatcgagccggaagtaaaatcggtactcgattatgtgcgttcactgcacggacgccgggtggcgggcgacgatgcgctttcatttatccggaatccttatagcgctttgggtgatagcgccagtcaggtgttggacgctgacacctatgaaagcgacctggcggacgctggtattttctttcaccgttttcatcttgagcccgagctcaacgataccggtctacgcattcagcgtattaacctgacccttcagcccatttcgtcaacgcctcaagcatcaatagagctgccgttcaacgaagcctatgagtttgctcccctcgtgcatgagcttcatttgaagctggctgcaggcatgccggcgggcttttggcagggttacgagcttgaattaagcgacttcgatttacgccagttggcaggcatcagtgagttgctcaagcgctggcagaacgaagcggctggcgcggagttcgacgcagtgttggatttgtcgctttatggcgatcgcgtcactggcatcggcgaagcggagcgcatcacgtcaccgtttctggtcaaagaggcgacagaaaactggttacctaaagacctcgcggatttgggcatcgacgccgaaatcctcggacgctgggatccgttagatagggctcagtttgacgagttcgagcaacggctgaacagggctcgcgcggcagctgatgacacggtgctgatgtcactctccgacacgccgctttccatcgctgcggcagagcagctgtttgatacttggtccaaaaagatatccacacccgtggccaagatttcaagtcttgaagaaaaagtaggtcgagcggtactccaaattgggcataacatcgacgagccaacgtacgttcaagtacgtcaggaggccctacgagcagccctcgatgctcagcctgagctgccgagcctgttaagacccgaagtcatcttgagagaacatcagttacagggtgttgcatggcttcaacatctcttccggctttcgccgacagacgtctcaggttgcttgctcgccgatgacatgggcctgggcaaaaccatacaactgctgacttttctggtctggtatttggaacaatatcctcaagataagccgaccttgatcgttgcgcctgtttcattgctcgataattgggagcgagagctgcaccgtttcttctttgctgacgcactcccagtcctgaagctttacggctcggcattgagcgcggtgaagttcaagaaagctgagattcccgctgacttgaaggctaagggtatcaagaacctacttcgtccaggctggattggcggtgcgcgcatcgtactgacaacctatgaaacgcttcgtgaccaagagttctcgctcgctcgccaacaatggtcgatcgtcgtatgcgacgaagctcagaaactgaagaaccctgccgctctggtgactcaggcaatcaaagctgttcctgctcgattccgagtcgcttgcaccgggacaccagtagaaaactccctgattgatctttggtgcctgttcgacttcatccagccaggctttcttggcgggttgaaccagtttggccgcgagtaccagcgacccatcgaagctgctattgaacgagactacgtcgccctagaacgcttgcgcgtgctaattgaacctcaaactctgcgccgcaccaaacaggacattgctaaagatctacccgctaaaatcgaagacaagggttgccgttcactgtcgatgcacggtctacagagaaatctttacctctcggaaatttctgcctacagccagaagcaacagatcgaagaacatcttgatcagaaaacctccggcatgctcggcctgctgcacaagcttaaactcatctgtgctcacccctatagcgttcaaccggacaagcgcctgcgtgagaactcgccgaagctgcgctggctgatcgatacccttgagtccattaaaaaatccgggaagggtgacaaagtcattctctttaccgaactgcgcgatatccagcgtgaactccaacacgctattcaggagtatttcggattccgcgcaaccgtgattaacggcgacacaagcaccagcagccagagcgcgaacaaccgccaaaaactgatcgaccagttccaggataaaccgggtttttcggtaatcatcctctcgactattgccgttggctttggtgtcaacgttcaagctgccaatcacgtcatccacttcacccgatgctggaatccggctaaggaagatcaagccaccgaccgtgcttatcggatcggtcaggagaaagatgtctacgtgtattacccgacagtgcgcgatgcagcgatgccgacgtttgagtcgacgctggatgagctgttgagcaagagacgagcgttggcgagggacatgttgagtggttcgggggaaattcaagccagtgacttcgaacgagtgctcggggtcagttga

SEQ ID NO: 7871 - DNA, 1980 bp, Pseudomonas syringae pv. actinidiae ICMP 19096; identical to SEQ ID NO: 7867

SEQ ID NO: 7872 - DNA, 744 bp, Pseudomonas syringae pv. actinidiae ICMP 19096; identical to SEQ ID NO: 7868

SEQ ID NO: 7873 - DNA, 1557 bp, Pseudomonas syringae pv. actinidiae ICMP 19096
ttggctcgctttcctcgattggaggctgccagtgccgatttatacaaccggtttgagcgggccgagaaagcattgccaccgcctcaggaaaagcgtagagccgccatcaataaattcaggaatgtcctgcctctgacatcctcagagtggcgcatggtttttgccggtcttgcagataaaagcgagagcgtaggacccattcttgaggacgagcaactttatggccgaatccatatcgaggtcagtcagcggatcgaaaagcagcgcctgagccgccgcgattggctggcgctttgtttcagctacttcggttacgagtccgatacgcccgacacgaatcccgtctggtgcttgttgcaaggcgacatccgcaagggtttcgcttgtgtaaaggctcaacaaactcgtgaaaaagaatggatgcgcatcgtccagcatcataaggagctgttttccgaacaggcaggggagacgctcggtgagcagatgttcaacggcgagatcagtgatctctcggtgctgcaagcaatcgcgcagatacctaacagcagttggttatggcaccggatatttagcgtattgctgtctcgaatcttcgtcttggacgacgaagagttctcgaaacgattccccgacttcattgagatcggacgtcagcatccgacatacatgaatgcgctcctcagtgcctgcctgacacgttatcacgcagctacgtatcgggaaaaaccgtcgtcccttctcaagcagactgctttggataactggggcagcccacagattcgttcaaaacaaaacagctggctccagtacgtggagagagacgtttgtgcaatggtggtcgcgtggtttgcgaaagaagaccttgagcacttcttcaatctattgaaaggtgatgccgacgttgaccattcgcgtctttactattggcttcgttttgcaaatcagatgagctacacccgcattgtcatgggattagacgcttggggtgatcgaagtaaggacttcgttcattttcgtgagaaaaataagggccgtttcagtcgcctgggaggcgctcctagccacaacaatgccgtggtcatgcagatagggaattatttttttgtagagttttctggtacaggtaacgcctgctatgtgtatgaggcaattaagtcaccgttcaatccggacaaatctcaattagaacttggggagcttaaacaaccgcctcaggctttggcgcgcatgcgccactcaccggctcccagcagcccaactcgaatcgagggttggttgagcaaatttgatgatgaacttcagcgactaggcatatcgattcacacgcagtctggttttgtgccgagtccatcctcaaagcaacagctgatgagcttggacgaacaagtccgagatgccgtaaaaacggttagatacaaaatacacgactcccgcggcaagggtggcgccttccaagtccacttggacagtcatgaccactccgctgtagccgcgcttcaacgcttaggcttcaagcccgtcaaccatcagccactgagattctggaggcagtaa

SEQ ID NO: 7874 - DNA, 532 bp, Pseudomonas syringae pv. actinidiae ICMP 19096
atgctcaagcgttttctatctggaaaaggcctgctgccgaagtccggtgagctcaataatttgccaacgtactcgatagaggagcagggattgtgcttcccgctgagccttgccgacagcactgagttttggccactggcaagttacctcgatcagctcgaagaggaagagttcgtatcccaactcagtgatcgatggctactaccgtgggacgagctttatcgactattgaatgacgaaggacacgtcagcagcgtaccgttactcggattgccaaagcagtcgaacttgacgccgcagctcaccagccaaggcagtcttgcttcgagcgatttcatggtatcgataggtgcttggagcgatcacgaatccgccgcgacagtgcaaactaaacgcacgggcgctgtcctcaggcatggcgataaaatcgagctgctgcctgaggcaacttaccaactggtgagtgctgttcggcagctccatttatcgcaacaagaaagccccggcgaacttaccaaccagatcggctggg

SEQ ID NO: 7875 - DNA, 1980 bp, Pseudomonas syringae pv. actinidiae ICMP 19094; identical to SEQ ID NO: 7867

SEQ ID NO: 7876 - DNA, 744 bp, Pseudomonas syringae pv. actinidiae ICMP 19094; identical to SEQ ID NO: 7868

SEQ ID NO: 7877 - DNA, 1137 bp, Pseudomonas syringae pv. actinidiae ICMP 19094; identical to SEQ ID NO: 7869

SEQ ID NO: 7878 - DNA, 550 bp, Pseudomonas syringae pv. actinidiae ICMP 19094
atgctcaagcgttttctatctggaaaaggcctgctgccgaagtccggtgagctcaataatttgccaacgtactcgatagaggagcagggattgtgcttcccgctgagccttgccgacagcactgagttttggccactggcaagttacctcgatcagctcgaagaggaagagttcgtatcccaactcagtgatcgatggctactaccgtgggacgagctttatcgactattgaatgacgaaggacacgtcagcagcgtaccgttactcggattgccaaagcagtcgaacttgacgccgcagctcaccagccaaggcagtcttgcttcgagcgatttcatggtatcgataggtgcttggagcgatcacgaatccgccgcgacagtgcaaactaaacgcacgggcgctgtcctcaggcatggcgataaaatcgagctgctgcctgaggcaacttaccaactggtgagtgctgttcggcagctccatttatcgcaacaagaaagccccggcgaacttaccaaccagatcggctgggccagcgtccgcaagctgg

SEQ ID NO: 7879 - DNA, 1980 bp, Pseudomonas syringae pv. actinidiae ICMP 19095; identical to SEQ ID NO: 7867

SEQ ID NO: 7880 - DNA, 744 bp, Pseudomonas syringae pv. actinidiae ICMP 19095; identical to SEQ ID NO: 7868

SEQ ID NO: 7881 - DNA, 1638 bp, Pseudomonas syringae pv. actinidiae ICMP 19095
atgacaagtgcattagccaagctgtcatcagctatagcgcttgggctcaatagtcgtagatttgcgatcagctctgaaccgttggctcgctttcctcgattggaggctgccagtgccgatttatacaaccggtttgagcgggccgagaaagcattgccaccgcctcaggaaaagcgtagagccgccatcaataaattcaggaatgtcctgcctctgacatcctcagagtggcgcatggtttttgccggtcttgcagataaaagcgagagcgtaggacccattcttgaggacgagcaactttatggccgaatccatatcgaggtcagtcagcggatcgaaaagcagcgcctgagccgccgcgattggctggcgctttgtttcagctacttcggttacgagtccgatacgcccgacacgaatcccgtctggtgcttgttgcaaggcgacatccgcaagggtttcgcttgtgtaaaggctcaacaaactcgtgaaaaagaatggatgcgcatcgtccagcatcataaggagctgttttccgaacaggcaggggagacgctcggtgagcagatgttcaacggcgagatcagtgatctctcggtgctgcaagcaatcgcgcagatacctaacagcagttggttatggcaccggatatttagcgtattgctgtctcgaatcttcgtcttggacgacgaagagttctcgaaacgattccccgacttcattgagatcggacgtcagcatccgacatacatgaatgcgctcctcagtgcctgcctgacacgttatcacgcagctacgtatcgggaaaaaccgtcgtcccttctcaagcagactgctttggataactggggcagcccacagattcgttcaaaacaaaacagctggctccagtacgtggagagagacgtttgtgcaatggtggtcgcgtggtttgcgaaagaagaccttgagcacttcttcaatctattgaaaggtgatgccgacgttgaccattcgcgtctttactattggcttcgttttgcaaatcagatgagctacacccgcattgtcatgggattagacgcttggggtgatcgaagtaaggacttcgttcattttcgtgagaaaaataagggccgtttcagtcgcctgggaggcgctcctagccacaacaatgccgtggtcatgcagatagggaattatttttttgtagagttttctggtacaggtaacgcctgctatgtgtatgaggcaattaagtcaccgttcaatccggacaaatctcaattagaacttggggagcttaaacaaccgcctcaggctttggcgcgcatgcgccactcaccggctcccagcagcccaactcgaatcgagggttggttgagcaaatttgatgatgaacttcagcgactaggcatatcgattcacacgcagtctggttttgtgccgagtccatcctcaaagcaacagctgatgagcttggacgaacaagtccgagatgccgtaaaaacggttagatacaaaatacacgactcccgcggcaagggtggcgccttccaagtccacttggacagtcatgaccactccgctgtagccgcgcttcaacgcttaggcttcaagcccgtcaaccatcagccactgagattctggaggcagtaa

SEQ ID NO: 7882 - DNA, 553 bp, Pseudomonas syringae pv. actinidiae ICMP 19095
atgctcaagcgttttctatctggaaaaggcctgctgccgaagtccggtgagctcaataatttgccaacgtactcgatagaggagcagggattgtgcttcccgctgagccttgccgacagcactgagttttggccactggcaagttacctcgatcagctcgaagaggaagagttcgtatcccaactcagtgatcgatggctactaccgtgggacgagctttatcgactattgaatgacgaaggacacgtcagcagcgtaccgttactcggattgccaaagcagtcgaacttgacgccgcagctcaccagccaaggcagtcttgcttcgagcgatttcatggtatcgataggtgcttggagcgatcacgaatccgccgcgacagtgcaaactaaacgcacgggcgctgtcctcaggcatggcgataaaatcgagctgctgcctgaggcaacttaccaactggtgagtgctgttcggcagctccatttatcgcaacaagaaagccccggcgaacttaccaaccagatcggctgggccagcgtccgcaagctggccc

SEQ ID NO: 7883 - DNA, 1980 bp, Pseudomonas syringae pv. actinidiae ICMP 18883; identical to SEQ ID NO: 7867

SEQ ID NO: 7884 - DNA, 744 bp, Pseudomonas syringae pv. actinidiae ICMP 18883; identical to SEQ ID NO: 7868

SEQ ID NO: 7885 - DNA, 1137 bp, Pseudomonas syringae pv. actinidiae ICMP 18883; identical to SEQ ID NO: 7869

SEQ ID NO: 7886 - DNA, 2787 bp, Pseudomonas syringae pv. actinidiae ICMP 18883
atgagttcgccaacctggggcgggctagacccgcagcgtgtctcgcactggatcaactttgagcgcaatgacaccgcttggcattacgcgccggataatcgtgaatcgatggcggccaaacaaaccgaaggcgtggcttacctgtggaacttgcttgctgccaatggtgttgcactgctggccgatgaggtcggcatgggtaagacttttcaggcgcttggtgtggcggctttgttgtggaaggtgaagcccgatgcgcgtgtgctggtcatggccccaggccgggatatttgtcggcattggcgacgggaattcgaaacttttgtgcgcgagcattaccgcgaggccgaccacagtgtgaaaagcagtgtggacggtggaccggtgccctcggtgcaagaatgttatcgactggacaatctggtgaatgcagttgagcggggactcgggcatttgtacctgacgaccattcattccctcagtggactggtggagaaaaaggacaagtctgacggagctggtgcggccaaagttgcggctgggattattcatcagcggctcaaaagcgcgctgggtgagtccggcttcgatctgatcatcgtagatgaggcgcattacctgcgaaacctgaatggtggttcccagagggtcagtgctgcgcgcgcactttttggtgccgaaggtagccgactgggtgcgaagaatttgctgttgacggcaactccgagccactctcggttgatcgatgtgcagagtattctcagctacttcactgagattgatccggaaggcgagctggcagtgctcagtggttcggctagaaccaaagcattgttggagaagtttgctcttcgacggctgcggctgatggaaggggctggggggctgtacagtaaacgccactatcggcatgagaaagccatacctgctggctttgagggacggccgaatgcggagatgttcttcgcgctgtatcagaaaaggctggtggcggatctgcgcaagcagaaagaaaacaagagccttatgtacggctaccttgagggctttgagtcgatgggccatctcccagctttggctcagagcagcgatggcgacgaggttacagagattgtggacaaagctgctgaggacttttccacggccagcgatacagagcttttacgcgagcttacgggtgattaccgcaaacagtttggtacttttcccgaccatcccaaatacggcgcgctgattgatcagtgtgtgcccgagggcctgtatggccaggataagatgctgcatgaccataagcatctgatttttgtgcgacgtattccctcggtccgcgaactgactcagcgggtcaatgagcgttatgacgagctactggcaggcataattgttcaggcatggggcatacccttaaatgaccctcgggtggatgtttggcggaagacgggctggtcgcgggcgtcttatgaccagctcatctccggacttgatcacgcgtttgtcatggacgaggctgcagaagtcgttggcgacgacgaggacagtgaggaggatagcggccagctggcatctcgcattgctgaactgtttgtggttaagagggagctgggtggccaaaccgactgtgtaaattcacgtttgcgcttcagcaagtcggagagtgtattttcactgtttctggagccagcatctgactaccaggaggctggttatggaggctattacacccagatagatgcgaagagggctgactatgcaaatgcagctaaatttgctcgttttcaacattggggcaatcaggcgcagctcaagttagctatcggtgatcgtgtgcagccggacggcaagtttgatcaacccatgtttagcgtttggtcgctgctggtacccaggttacccgatttgcttcgacaaaagctcaggcgttgggcagagtcggataaggctgttgcggaaaactttggaaattatctcaaagctggcttcctgcatgcgagtccggtgattgtcgaactttatgggtggtttgttgagttccgacgcggtaggcgcgacaggaatgtgcatagcagttaccggggtttttatcagtgggtgagcggcagaattgaggggtcgttgatgctgcgctacttcattgctgcgcttgaaaccttcgatcagctgtgcggcaaaattattgatcacggtctcaatcgctgggatcaggagtggcgaagccttaaaggtctgaccagtccgggcttgtatgccagtggagagaatagtaatagtcggcagcggttgatccttggcttcaacagtccgttctatcccaatgtgctggtgtctacttctgtgctccaggagggagtcaatttgcacatgcagtgtcatcagattcatcactacgggctggctgggtcgcccggtgacaatgagcagcgggtcgggcgccttgatcgtttgttcggttgcgtcaaccagcgtttgaaacacgccggcaataccgatctgagcattcattatcccttcctgcaggggtcggttgatgaggatcaggtcgcttcgttcatcgcgcgcaaacaccaagttgaaaaacaaatggatgcatgcgttcaggccaattttgacaagcagatgcggttggacaatacgcaggagtggaaggagttcttgcagacgccggttggtcgagggcagacgttaatcaatgacccctacggcgctagttttgcgcagggcgatctgtccaaaaactatgagccttatttcgaatctatcctcggagtgttgccgctgaccgaaaactga

SEQ ID NO: 7887 - DNA, 1980 bp, Pseudomonas syringae pv. actinidiae ICMP 19099; identical to SEQ ID NO: 7867

SEQ ID NO: 7888 - DNA, 744 bp, Pseudomonas syringae pv. actinidiae ICMP 19099; identical to SEQ ID NO: 7868

SEQ ID NO: 7889 - DNA, 1638 bp, Pseudomonas syringae pv. actinidiae ICMP 19099; identical to SEQ ID NO: 7881

SEQ ID NO: 7890 - DNA, 3249 bp, Pseudomonas syringae pv. actinidiae ICMP 19099; identical to SEQ ID NO: 7870

SEQ ID NO: 7891 - DNA, 1980 bp, Pseudomonas syringae pv. actinidiae ICMP 19100; identical to SEQ ID NO: 7867

SEQ ID NO: 7892 - DNA, 744 bp, Pseudomonas syringae pv. actinidiae ICMP 19100; identical to SEQ ID NO: 7868

SEQ ID NO: 7893 - DNA, 1137 bp, Pseudomonas syringae pv. actinidiae ICMP 19100; identical to SEQ ID NO: 7869

SEQ ID NO: 7894 - DNA, 3249 bp, Pseudomonas syringae pv. actinidiae ICMP 19100; identical to SEQ ID NO: 7870

SEQ ID NO: 7895 - DNA, 1980 bp, Pseudomonas syringae pv. actinidiae ICMP 18804; identical to SEQ ID NO: 7867

SEQ ID NO: 7896 - DNA, 744 bp, Pseudomonas syringae pv. actinidiae ICMP 18804; identical to SEQ ID NO: 7868

SEQ ID NO: 7897 - DNA, 1638 bp, Pseudomonas syringae pv. actinidiae ICMP 18804; identical to SEQ ID NO: 7881

SEQ ID NO: 7898 - DNA, 3249 bp, Pseudomonas syringae pv. actinidiae ICMP 18804; identical to SEQ ID NO: 7870

SEQ ID NO: 7899 - DNA, 2193 bp, Pseudomonas syringae
atggatttttcgacgctgttgcatctatggggtgcagcaagctccgagcagctgatcgcgccaataacggtagttggcttcgttttcattttgtgcgcttggtactttgtccgttatttttgtccatccttcaaacttagcagtcagctgaaaaaactgactaaacgtgtgcacggtgtgaaagcgctcgccccgtctcaacggcgctctgaattggagcaactgttcaatggaagcaagctggagcattcttggcacgaatacgctgaaacgctgcacgaccagtttgagtttcaagaaggcgaacaggttctggtccggtcgcgcgccaccgccggagccgcgcattttttctcacctcaaagcgtggttgataccccgctgggaaccgagttttataaacacctgcctggtattttgaccggcatcggtattgtcggaaccttcttcggcttgatgctaggcctacagcattttgatccaagcacccctgagcaggtaaatgccagcgtcgataagctgctcaaggacgtgttgtttgcgttcatcggctcctttatttcaatcatggcctctatagccgtcacgattactgaaaagtggcgtctgggccaatgctacaggcttcttgaagcgttcaacgaaaccatcgacgggcttttcgacagcggtgtcggtgaggaatatctagcggagcttgtgcgctcgagtgctgaaagctccgtgcaaacccgtcagctcaaggacagcctggtaaccgatctgcgggaaatgctgcagaacctcgttgatacccaagtccgcgaaagcctcaaattagcggataccttgtcaacgacttaccgtgactctgggcagttgttggccgatcaggtaagcagtgcgattgagaacagtctcaaatccccccttgaagctattgcgggtgcggttcaggccgccagtggcgaccagtcagggcaagtacagaaccttcttcaggatgttctagttgccttcatgaataagctggaaggtacgttcggccaacagttcaacggtctacacgaactgatgggtcagtccgttgccgcaatgcagtcgatgcagcaaggcttttcgacgctgatccaagatatgcgttcggctagcgagtcctcgacccaaaacagctcgactatgatcgctcagttactctctgatatgcaggccggacagaacgccatgcaagcggggatgaacgagatgctcgccaatctccaggcttcggttgcccgtatcggcaacgaaggggagggggcaggtgctcgaatggccgagcagttggagaagttgtttgctcaaagtgaggctcgccaacaggcaatggctgagaatctccaggcttttgttgagtcgatcaagcagaacatcggccaaggtcaacaggaaaccatggcgaaaattgcgggctccgttgaggtgctgggtgagcaactctcggcagtcttcaagcaattggagcacggccagcagcagatggatcaaaccacccgcgctgcacaggctgacctgcatcaaggcacccgtgacttggtgggcggtcttgacgaacaggtcaaggcgttgctgcaaacagtgtcagagcaacagaaatctgcacaggacaccgttaaggcattgagtgcccaaacagagcagcatttgcagagcatgcagctaggcgcagacaagatgcgggcggcggctgagcggtttgaaacggccggacaaagcgttgcgcgtgccagtgagtcgactgcggggctgatgggcacagtccagggcgcaggtactgagcttgcacaggcatcacgtgagttgaacaccgtggttgcggactatcgaaacaatcgtgaagcgctggcgaaaactctcgcggtcatcgaaggggttgtcgcaagcgcacaaggggaggccagcggccgcagccagtatctccaggacctgaaggttcaaagcgagcgaatgcaggcgcttaaccgtgaagtttatgaatacctggaaaacattagtggtgtgttgggtaacggctttaaagagttcggtgatggtatggatcggaccttgagacaaacgctgggtagtctggatgccgagctcgataaagcagtcaagagcctcgctggcggtgtagaaggggtcaaggaaagtctcgaagacttcggcgacatcatggaacgaatcaggcagtaa

SEQ ID NO: 7900 - DNA, 744 bp, Pseudomonas syringae
atgtttggtaagcaaatgccttcggttgtccgttcaaaagacgagggagagaagcctttctggatctccttcgctgatttgatgaccgcgatgatgattctgtttcttgtggtcatggtggcggctttgagttctgtgacgcagcgtattaaccaggcggagcagggagagaagcagcgcagcaaggacattagtcagatctgtgaacatctgagccttaaggcgaagactgccagtaagaccatcgtggtgaactgcaaagataaccggattagcttcggcgatgcaggccgctttgggcataaccagtacgcgctgagcaacgatggtcagtcggcgcttcaagaggttgtgccgatgattctggacgcggccaacagtgaggtaggccgtaaatggttcaaacaggttgtgattgagggatcgacagacactgatggctcctacctctataacctgcacctttcactgcagcgttcagaatgggtgatgtgcagtctgctcgatagccgcagcccgctccaggtcggattgtcgccggagcaccaacagcaaatcagatcgattttcctggcgggcggtgtgtcgttcaacaatgcaaaggacaccaaagaagaaagccggcgagtggagttgcgcatgcagttctttggcttgaaggaaaaggaggacaacctcaagccagaggtaccggtgttcaataacactgatatggaaaagtgtcagttggcgatgagccgatga

SEQ ID NO: 7901 - DNA, 1629 bp, Pseudomonas syringae
atgactagcccaatcgcgaggctttccgccgctattaacctgagtctgttggcacatcgcacggggccggcgcctgaaccgttggcgcgattcccccgtctgggggctgcgggaattgatctttacgaaagattcgaacgcgctgaaaaagctttgccgccacctcaggaaaagcgccgcgctgcgataaacaaattccgcaatgtactcccactcaacgcctcagaatggcgtttggtttttgccggtctctcggacaagagtgagcgagtcggaccgatactggacgatgaccagcttttttaccgagtgcataaagaaatccatcaccgcattgaaaaacggaggctgagccgccgagattggttggcgctgtgctttagctactttgggtacgaggccgccacgcctgatcagaacgccaattggtgtgtgttgcgggaagacgttcagcttggcttcgaatgcgtcagaggtcagcaaaaacgcgagaaggaatgggtgcatatcgtccagcaacatcaggagcttttttccgagcaggcaggtgccaggctgggtaaccagatgttcaagggagagatcagcgacctttcggcattgcagacgattgcgcagatccctgacagcagttggctgtggcgaaggatctttaacgtacttatctctcgtatttttatgttggatgacgccgagttttctcagcgcttagccgaccttgtcgacatcggccggcagcatccgcggtacatgaacgacattctgagtgcatgcctgtcgcgttatcacttggcagcgtatcgagagaaaccttcgtcgctgctcaaacaggtcgccctcgacaactggggcagccctcagatccgttccagacaaaacagttggctgcagtacgttgaaaaagatgtctgtgcaatggtcgttgcgtggttcgcgaaggaagatcttgagcacttcttcaacctgttgaagggagactccgaggtcgatcaatcgcgtctgcattattggctgcgatttgccaaccaaatgagctacacccgaattgttatgggggcggatgcgtggaatgaccgcgggcgggacttcgtccatttccgtgagaagaataaagggcgcttgagtaagctggtaggcggtcctgggcacaacaatgctgtagtcatgcagattgggaactactttttcgtagagttctccggtacaggcaatgcctgctatgtgtacaaagcagatgattcgccattcaacccagacaaatcccaccttgagcttaccgccgagctgaagcaggcaaatcgtgcgctggatcgaatgcggcattcacctgcaccgagccgcccaaaccgtatagagggttggctgagcaaattcgatgactctctagggaaattgggcatttgcgcgcagagtcaggccggcacgccagggtcatccaaacccatggctttcgaagaccaagtccgtgacgctctaaagtcggtcaagcacaaagtctatgaccaacgcgcgcgcggtggcgcgtttcaggtccagcttgatgacaatgatcaggatgccgttgcagcgctccaacgcctgggcttcaagcccgtcaatcaccagccactcaggttttggagacagtaa

SEQ ID NO: 7902 - DNA, 3249 bp, Pseudomonas syringae
atgctcaagcgtttgctgaaaggcatcggccggcagccgaattcggcggcagaaaatactgagcctgttttttccattgaggagcaggggatttgttatcccctgagcttggcggagaatgcgcagtcctggccgctggcaagctatttggatcagttggaagaggaggagttcgtctctcagctcagcgatcgttggttgctgacgtgggacgagctttatcggcttcttgatgagctagagcacttaacaagtctgccgctattggggttgccgccagagacagccctcatccctcaattgagtagccaaggcagtcttgcctctgacgacttcaaggtcgctgtcagtggatggcgcgacccgcagtccaatgcaaatgtgcaggtgcagcgtacaggtgccatcgtccagcgccacggaataatggaaattctgcccgagtcgtcgtggaaactgaccggtgcggtacggcaactttatctggctcagcaaaatgagccgggtgaagtaactaaccagattggctgggctagcatcaggaagttggcgcgcaaggctggtgccggtatggatggcttcttggataagaccgtcgttatcaaacctgaaagcttgcgactcaacccgcgaaaatcgacagtaggcaatataccggttatcgaactggaacccacctttgaaggccagccggcaaactggcttgaaagtttcgacggcgccaatcaggttcaggatcgatatcgggtgactggtgatgatggatcgctgacacacgtgctgattgatcccgaagtcaaatctgtattggactatgtgcgctcgttgcccgggcgtcgggtcgctggggacgatgctctttctttcgtccgcaacccttacagcgcactcggcgaaagtgccgcgcaagtgttggatgccgagacttatgaagacgacctggccgaggctgggattttctttcatcgctttcatctggagcccaaactggatgaagcgggacagcgcatcgagcaggtaaatctgactctcgaaccgatctcgccaacgccgcaagcgcccatcgaagttgaattcaaagcggcctatgagctcgcgccgttcgtgcatgaattgcaactgaagttagccgctggaatgccagctggtttctggcagggctatgagctggaactcagcgattttgatttgcgccagttggcaggcatcaacgatctgcttaagcgttggcaaaacgaagcggccggtattgagttcgactcagtcctagacctgtctctttacggggaccgtgtgactggcatcggggaagcggaaagaattacttcgcctttcctcgtcaaggaggcgaccgagaactggttgccgaaggatgtggcggcgctgggcattgacgcaaaaatttttgggcgttgggatccatccgaccgtgctcaatttgaagcgtttgagcagcggctggacgaagctcgcgctgccggtgatgaaacggtctgtttgccagagtccgaaacaccgctgtcgattgccgccgccgagcaactgtttaatgcctggtccaagaagatcgcccctgtcgagaccggcctggtccagcaacaggaaaaagttggtcgcgccgtactgcaaatcggccacaacatcgacgaaccgacctacgttgagattcgccaagcagcattacgcgccgctttggatgcaataccagagttacccagcttgctcaagcctgaggtcgtattgcgtgagcaccagcttcaaggcgtcgcgtggttgcagcatttgttccgcttgtcccccgcggacgtgtcaggttgcttgctcgctgatgacatggggcttgggaaaacgatccagttgctcaccttccttgtctggtacctggaaaaatatccacaagacaaaccgacacttatcgtcgccccagtttcgttgcttgataactgggagcgtgagcttcatcggttcttcttcgctgatgcgctaccagtgttgaagctgtatggctcagccttgagtgcagtgaagttcaagaaggaagaaatacctgctgacttgaaagcaaaaggcatcaagaatttgctgcgcccaggttgggtgggcggcgcccgaatcgtcctgacgacttacgagacacttcgcgatcaggagttttccctggcgcgccagcagtggtcgatcgtcgtgtgcgatgaagcgcagaagctgaagaaccccgcggcactagtgactcaagcgatcaaagccattcctgcgagatttcgagtggcgtgtaccggtacgcctgtcgagaacaccctgatcgatctctggtgtctgttcgacttcattcaaccaggttttctaggtggtttgaaccagttcggtcgcgagtatcagcgcccaatcgaagccgcgttggagcgtgacacggttgccctggagcgccttcgagggctcatcgatccgcagactttgcgccgaaccaagcaggacattgccaaagacctgcccgccaaaatcgaagacacagcatgccgttcacttagcatgcatgccttgcaacgcaatctgtacctgtccgaaatatccgcgtacagccagaagcagcagattgaagaacagctcgatcaaaagacctccggcatgctcgggttgctgcacaagctcaagctcatttgtgctcatccttacagcgttcagccagacaagcgattgcgcgacaactcgccgaagctgcaatggttgatgcagacccttgagtcgatcaaaagagctggaaatggcgacaagatcattgtctttaccgagttgcgtgatattcagcgggagttgcagcactcaatccaggagcatttcgggtttcgggcaaccgtcatcaacggcgataccagtaccagcagccagagtgcgaatagccggcagcggctgatcgaccaattccaggagctgccgggattctcagtcatcattctgtcgaccatcgctgtcgggtttggggtgaacgtgcaggcagccaaccacgtcattcacttcacccgttgctggaacccggccaaggaagatcaagcaactgacagggcttatcggattgggcaggagaaggatgtctatgtgtactacccgacggttcgtgatgcgcagatgccgacgttcgaagcgacactcgatgagttgctgagtaagcggcgggcgttggcgcgggacatgttgagtggggcttcggatattcaggcttcggactttgaggcgttgctgaaaacacgctga

SEQ ID NO: 7903 - DNA, 2193 bp, Pseudomonas syringae pv. actinidiae ICMP 19497
atggacttttcgacgttattaaagctatgggccgacgccagcactgcgcagcttatggcaccgcgggtggtcatggttgcagtggcggttttgtgcctttggtttgtcggaaaatacttaatcccgtcgttcgcgttgagcagaagactcaaatctcttactcgtagcgttaataccattaaagaaaaatcggccgatcaactccagagagagatggaaaaggtattcaacgctacgaagcttaagcatctctggaaagagtattcggaaacgctccacaaccagtttgagtatcacgaaggtgaggagcgcctggtgcgctctcgtgcaaccactgtcgcggcaaatttttttacaagtcaaagtgttgtcgatacaccgctggctactgagtttttcaagcacctgccgggcatcctgacgggtgtcggtattgtcgggactttctttggcctgatgctagggttgcagcactttgatccaagcacaccggagcttgtcaacgcgagcgtcgacaagctcctgaaggacgttctctttgccttcatcggttcagtcctttccatcatggcgtcgattatcgtcactgtctcggaaaagtggcgattggggcgctgttataagcaccttgaatcgctgaatgaggcgatcgatagcctatttggcagtggtgtgggcgaggaatatctggctgcgctcgtgcggtccagtgctgaaaattcgatccagactcgccagttgaaagacagtctggttacggaccttcgggaaatgctgcaaaacttggtcgatacgcaagtccgcgaaagtctcaagttggcagatacgttatctacgacctatcgtgattccgggcaactgttggcggatcaggtcagcaatgccattgaaaacagtttgaagtcaccattggaagcaattgctggagctgtacaggctgccagcggcgatcaatccggccaagtgcaaaacctgcttcaggatgttctggttgctttcatgaacaaactggaaggcaccttcggccagcagttcaacggcctgaatgaaatgatgggccaatctgtcgctgccatgcagtcaatgcagcaaggattctccagcctaattcaagacatgcgctcggcgagcgacaactcgaatcaaagcagctcggcaatgattgcacagctgcttgccgacatgcagaccggtcaaagcgccatgcaagctggcatgaacgagatgctggcaaatctgcagtcatccatagcccgtatcggcacggagggcgaagacgctggcgcgcgtatggcacagcagttggaaaaaatgttcgccgacagcgaggcgcgtcagatggcgatggccgaaaatcttcaatcgtttgtcgagtcaatccaaaaaaacatgggccaaggccagcaagaaaccatggccaagattgctggctctgtagaagtgcttggcgagcagctttctactgttttcaaaaaactggaaagtgggcgcgagcaaatggatcagtccactcgcgttgcacaagcagagcttcatcacggcactcgcgagttggtgggggggttggacgagcaggtcaaaacgctgctgcagtctgtcgcggaacaaaataaagcctcacaagacaacgtcaaggcattaagcgcgcaaaccgaacagcatctgcaaagcatgcaacttggtgcagacaaaatgagagccgcagcagagcgctttgaaaatgccggattgagtgtatcgaaggccagtgaatcgacggctagtttgctgggcactgttcaaggggctggtaccgagcttgctcaggcctcacgagagttgaacagtgtcgtcgcggactatcgcaacaaccgtgaatcgttgagcaaaacactaaccgtcatcgagggagtggtggctagcgcgcaagttgaggccagcggacgtgctcaatacctccaggatctgaagcaacaatcggaacgcatgcagtcgctcaatcgcgaggttcatgagtatctggaaaacatcagcggtgttttgggcgatggttttaaagagtttggcgacggcatggacagagcactccggcagacgctaggtagtcttgatacggagctggataaagctgttaaaagtctggctggcggcgtcgacggagtgaaggaaagcattgaagatttcggcgacatcatggaacgaatcaagcagtaa

SEQ ID NO: 7904 - DNA, 744 bp, Pseudomonas syringae pv. actinidiae ICMP 19497; identical to SEQ ID NO: 7868

SEQ ID NO: 7905 - DNA, 1638 bp, Pseudomonas syringae pv. actinidiae ICMP 19497; identical to SEQ ID NO: 7881

SEQ ID NO: 7906 - DNA, 3249 bp, Pseudomonas syringae pv. actinidiae ICMP 19497; identical to SEQ ID NO: 7870

SEQ ID NO: 7907 - DNA, 1890 bp, Xanthomonas campestris pv. campestris str. ATCC 33913
atgaacgtgctttggatcgcggcgactggcgattggctacatgctctgattgcgtcgatcatcgcagtcctttttctctgttttctcttctttgtcttgttccgggcgagcgcgcttctggtgtcattgaagcgactcggtaatgctgttcggctgctgacagggaaatcgccccccctcgtcaagcgggaactcagcaagctctttgccaacagtcgcctccagccgaactgggccgagtacgaggacacgttgcatgagcagaccgccaatcaaggtattgatcgagaaatcgtagccgttcgtgcaaccgtccccgcagaatcgttcttcaatgcggagctggtggttgatagcacgctgcacacagagttcttcaagcatcttcctgggatttttaccgggctcggaatcatcgcgaccttcagtgggctcattgcaggcttacaaagcttcgacgtcaaggcggtagagccggacgcgctgaaagcaagtctcggcggtcttttcggccacgttggcagtgcgtttcttctttctgcggttgctattggtctcgcgatgatctgcacgatcgtcgaaaaaatcctctatgcagcaaacgtgcatgcgatcacgtcgatcgcgctggcgctggatggtcttttcaagtctggtgtcggcgaggaatacctttccaaattggtgaggtcttctgaagatggtgctgtacagacaaagcagctcaaggaaagcctggttgaagatctgaaggcgcttttgaccaatttgaccgagcggcaaattgaagcaacacatcagctctcgaacgagattggtgcaagtctggagacgagcctacaggtgccgctccaaaagattgccgacacggtgcagctcgcaagccaggatcagtctgcttcggcgggcaagatgatcgagaacttgatggacaccttcatggcccagatgcgcgacacgatgggttctcagatgggagatctgagcggcatgatgcagcaaagtgccgcatcaatcatgcgcgtcgaagagagtctccgcagacttgtagacgatatgcagagcgccactcacgcgtcttctgagggcatccagcgcgcaatggcggagctcctgtcgtcgctcgcatcacatgagcgccagcaatcagagacgctgggcggcgctcaggtccagatgctgacccatgttcagagcgcagtagagaggatggcatctgctcaggccgctggcgcgaaccaagtcggcgaggctgctgcggatgcaacgcgtcgaattgttgaagcttccgctgaggtgcagaaggcgggcgaagagtcttctcgccgagcagcagagcttacagaaagcattcacgacgtgacgcttgagtccattcgtaaacttgagagcggcgctgcccaggtcgcatcgatgatggcggcgttgaacgaagtggtcgatcgattggcgagaaccagtgggtcgctggccggcctgcatgagcaatctggacagctaggttcgaggttggatcagagttcgaccagcctccggaccagtactgacacgctagctattgcctctcaagcactgtctcaagccagcgtccgtgtcgaaggtgtttccagcttgatgacgaccgaggcgagtgcgcgcgaggcaacgctaaaagatatccagctggcgctgagtaagggtcaggaagctgcgcgcgagtttggcgaatattcggacatgctcaccgtcaagcttggtgatgcgatggagcaattcggctctaagaccggcgctgtgctgaaccatctcatgactgattttgataaggagctcgggaacgcggtactcatgctgcgcgatatcgttgaacgtatgtccctaatcgccgcatcggacgagcgtaggggataa

SEQ ID NO: 7908 - DNA, 717 bp, Xanthomonas campestris pv. campestris str. ATCC 33913
atgtttgggagcatggcccggggtcggcgccggaataaagatgatggagagaagccattctggatcagctatgcagatttgatgacggcgatgatggtgttgtttctgagtgccatggcggtcacgatcgctgctgtaacgagagtagtggaggggcctgcggagatcagagcacgggagattcaatcggtctgtgagcaattaggtcgagatctatcgggcgtatccgaaattcagatcaactgcgccgatcaacgcatttccttcccaaccgtcgggacgtttggttttaatagctatcggttgccggcagaggctgacggtgcgctcgcacagttagttcccgctgttctaaatgctgctgacggagagctgggaaagaaatggttgaaacaggtcgtcgtggagggatataccgacaccaagggcggctatctctacaaccttcatctaagtctgcagcggtccgaatgggtgctttgcctcttgatggacccatcaaagaacaagagtctcgctctgagtgatgagcagctgtctcgagtgcgaaagttgttcctggctggcggcgtgtctttcaataaccagagaacgacggctgatgagagtcgccgagtcgagttgagaattcagttttacggcgttgatgagcctcattcagcgcatttggacactggatcagatttcatggcaggcgcggataggtgccagctctga

SEQ ID NO: 7909 - DNA, 1476 bp, Xanthomonas campestris pv. campestris str. ATCC 33913
ttgtttaaaaaatcgctgggtagactgctcaacgaaggcgcgaatgctttgagtgcgcgggatgacatgatccttgcgtctcaatttgttgcgagctcggaacttctctgtggacagtcaatcgctgccaggcaagatcttagcgttccactcatccagcggtggcgaaaggggattggagattctttacttggtccgttgctctggcgcactgtcttcgtcggatatttccttctaggtgaaagtgcagagagggaggtctacagagatttccttcagaagacgttgccgaagttgaaggcccagaaggttccgcccggatggctgccaacagttgaagagcataaggaggtattcggcctaaagcccctcgcgcgctatgtgactgagtgggcggccggcgatgagcgtggattggatgcgctgtcggatcatgtggaaatacccggtagcagttggttctgggccgaattcgtgggcaacgcgctcgcgaagttggaaggcatgaacgacattgagttcgagcggagttccctgcgatatctgagccttttatatcgatttcctagtcagcaggacgctgtccttgccgcgttggtcgaacgtgcagccgggtcaccggacaacttgctgaatcagaagattctggagtgtgtggtcgacgcttggggtaatccacagcttgagctaagcgaccggtctcatcgttggtcacaggtgtcggacgacgcgaggcaatggatatgtcgttgcttggccgaagaagacttgactgacttctttgagttgatcaaaagttcttccaaggcactaagcgccatggataagcggcgattcgagtattggaagcgattcaccgggcgaatgcagttcactaagcttgttttagggccatcgtttaggtcaacgacgaatgccgacataggccgcttcattaagaaacgaagagggcgcctgggatggttggccagctcaacatcaatgaacatcgccatgttgatgaagcttggggaacattggtttgtcgagttcgcggagacgggtaatgcatgctatggctatcaacaaataacgctgccgttcaaggttggcgataagactttatcgcttcatcagcttaaagatcagcgaatagcaacatacaggcttccacacagcgggccatgggagtctgagtttgaccgaacactagctcgcgtcggcatctggcccaacggagtgcaacagggtgggcgatcgccggcaaagagagcgaccaacgcgccgtctgccatagctgacgttgatcagcttcttccttcgttgccggcacaccttgcgcgggagctttcattggcacgcaaggcgattgtcgataaccgtaataaaggcggcagctactggattgagcttggctctaaaccttccagcgagctgattgaggcaatgaatgtggctggattcagatttgcagcaagccgagggttctatcgatga

SEQ ID NO: 7910 - DNA, 3198 bp, Xanthomonas campestris pv. campestris str. ATCC 33913
atgaagcttcgcttctggaaaggagaaagccccgagaccattcccatggatgctcctgagttctctgctgaatcaagcggttggaaaggaacggcacaagagaagagcactcatccgggcgcgatctatctcttgcagcttgccgacgagagatttgcgcttaaagatggagctgggtacctgatcccatgggagaagctttattcgcttctttccgatagcgaccacgtatcaagcttgcatctgctgaagttgccgcagacctctaggctacgccccgcgattcggtcgcacgggacaccaaccgacacaaattttcgagtcacgctggaagcgtggatcgcggaaagtggcgaggagcttctggctgaacgtcttggcgcggtgttgaccatgcctgggcaggatctgttgctgccgcagtcagcttttacgctcctagaggcaatggctgagctcgcacagtgcggtgaagactgggatgcggaccgccgtatgttgcaaatgggcaaggtccaagaggccgccaggtgggccggggcgacgatggatcgctatttggagcactcaccggtcgttgtcgctaacaagcttgagatcaatttgaagcagcacgaagctgccgaagcccagatcgtagaggttgagccacgccctattggcgcgccggagggctggctttcacaatttgatcgctatcaatcggtccgtggtcgttatgacgttacggatgccgaaggcggcatgagtcacgttgtgctttcaagtcaggtgcgcgaggttggtcaacagatcaaatcgatgccagggcggcgcttggctggcaagcaagccgacgcgtttatgcataacccatatgccgtccttggcgaagctgcagcgcaggtcatctctccggagcgtttcgctgaagcaaaacgtacggccggcatcgatgagtgggaacttgagctccagcctgcggacgttgacggtagttgggatgcagtgctggttgattcggtcggcaagagtgagagcgtgttcgtcggaagttttcatgcttccgaattcgattcgctgctggaagaggcaagtggatctgagggacttggtgttgcccgatggaagaagcatcgggttttgctctctggtctgacacttgaaagcctcgcacgtctccggcaggcccacttcaaggaggcggttggcagcgtgatcggtgtcgagacgctttttgacctggctcactacagcgatcgcgtcgtgggtttcgatggaaagcccatcatcgtgccaaaagtccaaggcagttcgcccgctgaagactggattaagggtgccggagagttcgttgcggtagatcctgctacaggaactgcaacggaagggcgccttagcaccaatgatgttcaggagttcggcgagcgtgttgatttagccgagcgtgagggccacatcaatgttgcagtccccgggattgaaaaggaaattccaacgcccgaagcacgggcatggatgaaggagctcactaagccagctggcgaaaagcgaattgagagcctaaagaatcccgcgcccgcggaaaagctgtcgctcagaatcctccacaacattgaggagcttgagtacccaagcgaggaaactgagcaggcgcgagtgaaggacgtctatgaagcgcctgctgcgcttcgtccggaagttgcactgaaagatcaccaggtcgaaggcgtcgcttggatgcaagggcgtatgcgacagcgaggtgacggtgtgcgaggtgtgttgctcgccgacgatatgggcctcggcaagacgctgcaggcgctgacgctgatggcttggtatcggcagactgcgccggcgccgaagccgtgcctgatcgtggcccccgtatccctactggaaaattggaaagcggagatcgccaaatttcttgacgggaggcagggcgcaacactcacactctacggcgagcacttggcccttcacaggctgagcgcacgtgagatcgggcctgaacttagagaattgggcgtcaagaaagctcttaatcctggctttgcgcatggcgcagcgttcgtgttgacgacatacgagaccttgcgcgattaccagctgtccatggcgcgggagaagtggggtgtactcgtttgcgacgaagcccagaagattaagacaccatctgccatggtgactcgatctgccaaggcgatgcaggctgatttcaaaatagcttgtacgggtacgccagtggagaactcacttgcggatctctggtgtctcttcgatttcttccagccaggtttgctcgactccctgactaagttcaccaaggtgttcaggcaacagattgagctcaggtctgaggggcacgagcaaaaggtcgaggtattgcgcgagcaaatttcgccctgggtccttcggcggatgaaggctgaagttgcagatctcaagccgaaaactgaattgccctgcgagctcgcgatgtcagccaaacagcgcggtctttatgccgcggctgccagacgattccgcgaaacagttgactctggcgagggtggcgatactgctgctttaagcctgctccatcaactcaggcagatttgcgccaatcctcttgctgccgcggatgatcggtccgaatttctgtcgctagacgaacatctacgtcattcaccaaagttggcatggctgatcgaaaagctacaagagattcaggccacaggcgaaaaggtcattgtcttcacggaattccgcgacatccagcggctgatccagcgcgccattgccagccggttgagctatcaagcttccatcgtcaatgggagcacgagcgtggaagccggggcagatgactcgcgccagataattattgacgctttccaggccaagccggattttggagtgatcgtgctctccacaaccgccgtgggctttggcgtgaacatccaggccgcaaatcatgtcatccatttcacccgtccctggaacccggctaaggaagaccaagcgacagatcgcgcttaccgaattgggcaggaaaaggaggttttcgtttattacccaaccgtgttgggggatggctttgagagttttgaagaacgtgttgccaagcggcttgcgacgaagcgtaagttatcgaacgatatgttggccccggagcaggggcttactctggaagagttctcggatttgtctctcggcttttccgagtaa

SEQ ID NO: 7911 - DNA, 1890 bp, Xanthomonas campestris pv. campestris str. 8004
atgaacgtgctttggatcgcggcgactggcgattggctacatgctctgattgcgtcgatcatcgcagtcctttttctctgttttctcttctttgtcttgttccgggcgagcgcgcttctggtgtcattgaagcgactcggtaatgctgttcggctgctgacagggaaatcgccccccctcgtcaagcgggaactcagcaagctctttgccaacagtcgcctccagccgaactgggccgagtacgaggacacgttgcatgagcagaccgccaatcaaggtattgatcgagaaatcgtagccgttcgtgcaaccgtccccgcagaatcgttcttcaatgcggagctggtggttgatagcacgctgcacacagagttcttcaagcatcttcctgggatttttaccgggctcggaatcatcgcgaccttcagtgggctcattgcaggcttacaaagcttcgacgtcaaggcggtagagccggacgcgctgaaagcaagtctcggcggtcttttcggccacgttggcagtgcgtttcttctttctgcggttgctattggtctcgcgatgatctgcacgatcgtcgaaaaaatcctctatgcagcaaacgtgcatgcgatcacgtcgatcgcgctggcgctggatggtcttttcaagtctggtgtcggcgaggaatacctttccaaattggtgaggtcttctgaagatggtgctgtacagacaaagcagctcaaggaaagcctggttgaagatctgaaggcgcttttgaccaatttgaccgagcggcaaattgaagcaacacatcagctctcgaacgagattggtgcaagtctggagacgagcctacaggtgccgctccaaaagattgccgacacggtgcagctcgcaagccaggatcagtctgcttcggcgggcaagatgatcgagaacttgatggacaccttcatggcccagatgcgcgacacgatgggttctcagatgggagatctgagcggcatgatgcagcaaagtgccgcatcaatcatgcgcgtcgaagagagtctccgcagacttgtagacgatatgcagagcgccactcacgcgtcttctgagggcatccagcgcgcaatggcggagctcctgtcgtcgctcgcatcacatgagcgccagcaatcagagacgctgggcggcgctcaggtccagatgctgacccatgttcagagcgcagtagagaggatggcatctgctcaggccgctggcgcgaaccaagtcggcgaggctgctgcggatgcaacgcgtcgaattgttgaagcttccgctgaggtgcagaaggcgggcgaagagtcttctcgccgagcagcagagcttacagaaagcattcacgacgtgacgcttgagtccattcgtaaacttgagagcggcgctgcccaggtcgcatcgatgatggcggcgttgaacgaagtggtcgatcgattggcgagaaccagtgggtcgctggccggcctgcatgagcaatctggacagctaggttcgaggttggatcagagttcgaccagcctccggaccagtactgacacgctagctattgcctctcaagcactgtctcaagccagcgtccgtgtcgaaggtgtttccagcttgatgacgaccgaggcgagtgcgcgcgaggcaacgctaaaagatatccagctggcgctgagtaagggtcaggaagctgcgcgcgagtttggcgaatattcggacatgctcaccgtcaagcttggtgatgcgatggagcaattcggctctaagaccggcgctgtgctgaaccatctcatgactgattttgataaggagctcgggaacgcggtactcatgctgcgcgatatcgttgaacgtatgtccctaatcgccgcatcggacgagcgtaggagataa

SEQ ID NO: 7912 - DNA, 717 bp, Xanthomonas campestris pv. campestris str. 8004; identical to SEQ ID NO: 7908

SEQ ID NO: 7913 - DNA, 1476 bp, Xanthomonas campestris pv. campestris str. 8004; identical to SEQ ID NO: 7909

SEQ ID NO: 7914 - DNA, 3198 bp, Xanthomonas campestris pv. campestris str. 8004; identical to SEQ ID NO: 7910

SEQ ID NO: 7915 - DNA, 1890 bp, Xanthomonas campestris pv. campestris
atgaacgtgctttggatcgcggcgactggcgattggctacatgctctgattgcgtcgatcatcgcagtcctttttctctgttttctcttctttgtcttgttccgggcgagcgcgcttctggtgtcattgaagcgactcggtaatgctgttcggctgctgacagggaaatcgccccccctcgtcaagcgggaactcagcaagctctttgccaacagtcgcctccagccgaactgggccgagtacgaggacacgttgcatgagcagaccgccaatcaaggtattgatcgagaaatcgtagccgttcgtgcaaccgtccccgcagaatcgttcttcaatgcggagctggtggttgatagcacgctgcacacagagttcttcaagcatcttcctgggatttttaccgggctcggaatcatcgcgaccttcagtgggctcattgcaggcttacaaagcttcgacgtcaaggcggtagagccggacgcgctgaaagcaagtctcggcggtcttttcggccacgttggcagtgcgtttcttctttctgcggttgctattggtctcgcgawsatctgcamrmwcskmkawmawmwmcycyrkrcwsyaaacswgsmygckatcasgkcgrksgsgckkssgctggatggtcttttcaagtctggtgtcggcgaggaatacctttccaaattggtgaggtcttctgaagatggtgctgtacagacaaagcagctcaaggaaagcctggttgaagatctgaaggcgcttttgaccaatttgaccgagcggcaaattgaagcaacacatcagctctcgaacgagattggtgcaagtctggagacgagcctacaggtgccgctccaaaagattgccgacacggtgcagctcgcaagccaggatcagtctgcttcggcgggcaagatgatcgagaacttgatggacaccttcatggcccagatgcgcgacacgatgggttctcagatgggagatctgagcggcatgatgcagcaaagtgccgcatcaatcatgcgcgtcgaagagagtctccgcagacttgtagacgatatgcagagcgccactcacgcgtcttctgagggcatccagcgcgcaatggcggagctcctgtcgtcgctcgcatcacatgagcgccagcaatcagagacgctgggcggcgctcaggtccagatgctgacccatgttcagagcgcagtagagaggatggcatctgctcaggccgctggcgcgaaccaagtcggcgaggctgctgcggatgcaacgcgtcgaattgttgaagcttccgctgaggtgcagaaggcgggcgaagagtcttctcgccgagcagcagagcttacagaaagcattcacgacgtgacgcttgagtccattcgtaaacttgagagcggcgctgcccaggtcgcatcgatgatggcggcgttgaacgaagtggtcgatcgattggcgagaaccagtgggtcgctggccggcctgcatgagcaatctggacagctaggttcgaggttggatcagagttcgaccagcctccggaccagtactgacacgctagctattgcctctcaagcactgtctcaagccagcgtccgtgtcgaaggtgtttccagcttgatgacgaccgaggcgagtgcgcgcgaggcaacgctaaaagatatccagctggcgctgagtaagggtcaggaagctgcgcgcgagtttggcgaatattcggacatgctcaccgtcaagcttggtgatgcgatggagcaattcggctctaagaccggcgctgtgctgaaccatctcatgactgattttgataaggagctcgggaacgcggtactcatgctgcgcgatatcgttgaacgtatgtccctaatcgccgcatcggacgagcgtaggggataa

SEQ ID NO: 7916 - DNA, 717 bp, Xanthomonas campestris pv. campestris; identical to SEQ ID NO: 7908

SEQ ID NO: 7917 - DNA, 1476 bp, Xanthomonas campestris pv. campestris
ttgtttaaaaaatcgctgggtagactgctcaacgaaggcgcgaatgctttgagtgcgcgggatgacatgatccttgcgtctcaatttgttgcgagctcggaacttctctgtggacagtcaatcgctgccaggcaagatcttagcgttccactcatccagcggtggcgaaaggggattggagattctttacttggtccgttgctctggcgcactgtcttcgtcggatatttccttctaggtgaaagtgcagagagggaggtctacagagatttccttcagaagacgttgccgaagttgaaggcccagaaggttccgcccggatggctgccaacagttgaagagcataaggaggtattcggcctaaagcccctcgcgcgctatgtgactgagtgggcggccggcgatgagcgtggattggatgcgctgtcggatcatgtggaaatacccggtagcagttggttctgggccgaattcgtgggcaacgcgctcgcgaagttggaaggcatgaacgacattgagttcgagcggagttccctgcgatatctgagccttttatctcgatttcctagtcagcaggacgctgtccttgccgcgttggtcgaacgtgcagccgggtcaccggacaacttgctgaatcagaagattctggagtgtgtggtcgacgcttggggtaatccacagcttgagctaagcgaccggtctcatcgttggtcacaggtgtcggacgacgcgaggcaatggatatgtcgttgcttggccgaagaagacttgactgacttctttgagttgatcaaaagttcttccaaggcactaagcgccatggataagcggcgattcgagtattggaagcgattcaccgggcgaatgcagttcactaagcttgttttagggccatcgtttaggtcaacgacgaatgccgacataggccgcttcattaagaaacgaagagggcgcctgggatggttggccagctcaacatcaatgaacatcgccatgttgatgaagcttggggaacattggtttgtcgagttcgcggagacgggtaatgcatgctatggctatcaacaaataacgctgccgttcaaggttggcgataagactttatcgcttcatcagcttaaagatcagcgaatagcaacatacaggcttccacacagcgggccatgggagtctgagtttgaccgaacactagctcgcgtcggcatctggcccaacggagtgcaacagggtgggcgatcgccggcaaagagagcgaccaacgcgccgtctgccatagctgacgttgatcagcttcttccttcgttgccggcacaccttgcgcgggagctttcattggcacgcaaggcgattgtcgataaccgtaataaaggcggcagctactggattgagcttggctctaaaccttccagcgagctgattgaggcaatgaatgtggctggattcagatttgcagcaagccgagggttctatcgatga

SEQ ID NO: 7918 - DNA, 1926 bp, Xanthomonas campestris pv. campestris
gtgccaaaagtccaaggcagttcgcccgctgaagactggattaagggtgccggagagttcgttgcggtagatcctgctacaggaactgcaacggaagggcgccttagcaccaatgatgttcaggagttcggcgagcgtgttgatttagccgagcgtgagggccacatcaatgttgcagtccccgggattgaaaaggaaattccaacgcccgaagcacgggcatggatgaaggagctcactaagccagctggcgaaaagcgaattgagagcctaaagaatcccgcgcccgcggaaaagctgtcgctcagaatcctccacaacattgaggagcttgagtacccaagcgaggaaactgagcaggcgcgagtgaaggacgtctatgaagcgcctgctgcgcttcgtccggaagttgcactgaaagatcaccaggtcgaaggcgtcgcttggatgcaagggcgtatgcgacagcgaggtgacggtgtgcgaggtgtgttgctcgccgacgatatgggcctcggcaagacgctgcaggcgctgacgctgatggcttggtatcggcagactgcgccggcgccgaagccgtgcctgatcgtggcccccgtatccctactggaaaattggaaagcggagatcgccaaatttcttgacgggaggcagggcgcaacactcacactctacggcgagcacttggcccttcacaggctgagcgcacgtgagatcgggcctgaacttagagaattgggcgtcaagaaagctcttaatcctggctttgcgcatggcgcagcgttcgtgttgacgacatacgagaccttgcgcgattaccagctgtccatggcgcgggagaagtggggtgtactcgtttgcgacgaagcccagaagattaagacaccatctgccatggtgactcgatctgccaaggcgatgcaggctgatttcaaaatagcttgtacgggtacgccagtggagaactcacttgcggatctctggtgtctcttcgatttcttccagccaggtttgctcgactccctgactaagttcaccaaggtgttcaggcaacagattgagctcaggtctgaggggcacgagcaaaaggtcgaggtattgcgcgagcaaatttcgccctgggtccttcggcggatgaaggctgaagttgcagatctcaagccgaaaactgaattgccctgcgagctcgcgatgtcagccaaacagcgcggtctttatgccgcggctgccagacgattccgcgaaacagttgactctggcgagggtggcgatactgctgctttaagcctgctccatcaactcaggcagatttgcgccaatcctcttgctgccgcggatgatcggtccgaatttctgtcgctagacgaacatctacgtcattcaccaaagttggcatggctgatcgaaaagctacaagagattcaggccacaggcgaaaaggtcattgtcttcacggaattccgcgacatccagcggctgatccagcgcgccattgccagccggttgagctatcaagcttccatcgtcaatgggagcacgagcgtggaagccggggcagatgactcgcgccagataattattgacgctttccaggccaagccggattttggagtgatcgtgctctccacaaccgccgtgggctttggcgtgaacatccaggccgcaaatcatgtcatccatttcacccgtccctggaacccggctaaggaagaccaagcgacagatcgcgcttaccgaattgggcaggaaaaggaggttttcgtttattacccaaccgtgttgggggatggctttgagagttttgaagaacgtgttgccaagcggcttgcgacgaagcgtaagttatcgaacgatatgttggccccggagcaggggcttactctggaagagttctcggatttgtctctcggcttttccgagtaa

SEQ ID NO: 7919 - DNA, 1446 bp, Sinorhizobium fredii NGR234
ttggatatcgtgttcacggcgggcatctttgcgcgcgatcttgtcttggcgctagcctcgttgctgaagcaaccgccggcgcctggtctgttcagtctctttctcgtcatcttgttggtgatagcgaccctttggttctgggcggtcgtccggagaagagtgggcttgcttaggcgagcaacgaagctcgtgcggaagagccgtgggccagaggaatttcgggagcggttccaggaaacctacgacgaattgacgtcctggtcgggagcggatgccggtcggttggcggacacctgggacgaatttcgcgagaccaccatcgaatcccaagggcagaccggcattcggaacgctatccgtccgtcagtcttctttaatctcgaggagatgggcttcagcgtttcgggctggcgggtcgtgccgagcctcttcgtctcggtcgggctggcggcaacattcctcggtcttatcgccgccctccaggaaacgggcaacagcctcagtgcaggcggcgaccaggccgcggtgatgaaggcgcttacacagcttctgaccgttgcgtctgccaaattcatcatgtcgctcaccggactgctctgttcgatcgtcttcaccgttgttatgcgcgtgcgcagcagcgggcttgaacaggaaatgcggactcttacgcacgcgatagagacgcggatgagtttcgtcagtctcgaggaccttgccgagaagcagctgaaggctatcgtcgagcagcgcgatcatatgcagaagctcaatcacgagctcatcgctgccatctccgaaccactgcagaaagccgcggcatccggcatcaatcatgtcgacgagatggtgcaatcgctggcgggatctttgacgcaaggcctggtcggtgcgatgtcggcaacgagcgaaaggctagaagcggcctctggtcgcttggaaggacttgccgccactctcagcggggcagcccaagaattctctcaagccgccgagcgtacagccgtgggtctggatggtgcggcgagacggctcgagctggtctccgacaatctagcgagagccggcaatgggcttgcccaggctgcggtgcccgtcgcggagtcggcgaacaagaccgccgaagctacccagcagatcgcctcctcgagcatcaacatggtggagagcgcacgccagaccatgtcgtcggagcgtgagatggtggtagcagcagccaattccattcgagaacacatcaaaagcttcgagacgcgggccgcggcttacgacggacagttggccgctgccttcaggacgtttacggagcagatctcgcgatcgatcggcgaagtcgaaaatcacgcgaataatgtccatggccagtatacggaagcgctttcgaccctccaaggggtgatcgagaatgcgaaggcgttcacacctgagagcgcgaggccgtcggcatga

SEQ ID NO: 7920 - DNA, 930 bp, Sinorhizobium fredii NGR234
atgaggggtaggggaggcgcgcgccgtcaggaggaagaggaagaatcggtcttcatatcgatggccgacatgacgatcagctttctgttcattctgatgatcctgctggctttcttcgcgagccagttcaacgtctccgataccgtgcctcgtcccctgtacgacagcctgaaagacgagaaagaccgcatccaacgtgacattgatgcgatcgctgagattgtcgaggccaacggtcgtccggtggtgacggcgacccgggagatgaaggacgagctcgaacgtctgcgcaagcttctcaacactcccgagaaggcaaacaaaatggaggtctataactcggcagtcgccgacgcccgaaagaatctgctcacaagcctgaaaagcgagatcaacagccgcatacccggcgtgaatgtcgcagtcagtgcgaattacgacgcgcttcaattcgcgggagatggactgttcgactccggcaaagaagtgccgactaccgtcggggcggttcgcatgcggcagattgcggaagtcctggaccaaaaccttggctgctattcactgggttcgaggagagccttcactgaaaactgcaatccggcttttgcactgattgactcgttgcaagtcgagggacatacggacagcgtcggtagcgaggtcctgaacatggacctcagtgccaagcgagctgcgtctatctacgcacttatgattgagcaaaagccggatctcgtgctttatcagaaccgggacgagcagccggtcttgtcggtcgccggctttgggaagggacggcccatacagcagaacgagacagagagcggcagagacgctaaccgccgtatcgaccttcgcttcatcatggtggtcccgtccaaggagacagatatcgctgacatacggcgggcgctctcgggggagccttga

SEQ ID NO: 7921 - DNA, 1314 bp, Sinorhizobium fredii NGR234
gtgtcactcctggaaacgcttcgtgcgatgcctcatcgcaaaaagttcgagggcaagagcatcgaaggcttgagccaggcggtgcaagctgtcttccaagcctttccggagttcagtcgggtctctcctgctacgctcgagcaaatgaaagccaagatcgcggcggccgttcgtgactgggaatgggggagcgtcactgtcggggaagtcgggatgctggcgagcgctgcctttgggcgtgccgaggaactcgacacgcagacactcagtttcgtgcgacgggaagtccaagccacaaccaatccggtgcttctcgacgcggctgctgaagggtatttcgcgggatggtcacgcggcggtcaactgacgcgatggctggccagcatcatgcaggaacggtcgtcacatctgtcgaagcgctggcagagtgttttcgtatccatcccgcaggcgcttgatgcaaaccacgctcccgagcaccttgccgagcgaatggtcatggagcctgacccgtatcgatggctggcgggggcaggcgtcgcctcgcctcactcgggtaacctgatgcaggaactgcatcaggcttggttgcggacgctccccgagatcaagactgatgcgcaggtcgcgcacgtgttccgatggatactgcccgaaggtcgagcgagggcgagcgataaaatggccgccagtgccattgagaagttactgagtccgtggctccacaaaatgcctgaacaggaataccggaaggcactcctggatcgtataacggatgcatacggagatcctcgaaataagcgcccggagttctggtctcttgtcagtgcgccgtgtcgaggcgtgttggtgcgatggcttgccggggcgagtatggatgccctgttgtcggtaatcacgaaatcgactgccaatcatatgtggccgccacggcatgatttttggaaggggctcttcaaccgtggccttgtcgacgaggcatgggtggcgttgtcgcccgctgcggctgccattgctcaagacatgttcgccaaatccgtaaacgccgcaagcatggcagcaggtaggcagacatcgaaagctcgcaaagatacctgtctgctcgtaatgcgtataggtcgatacatcgtggtcgaagggtcacatgactatcgtgtccacatgttctcggacgcagatagtcgcgcgccgaaattgtatcaggcgagctatgacgctgaggctcttatccttggggccggccatcccgacacaagaattcatgatcaacccggacattggaagagatgggtggaggagcgggtggtccgatga

SEQ ID NO: 7922 - DNA, 3219 bp, Sinorhizobium fredii NGR234
atgatcaagtttgattttcgagccgatagccaagccgcgtacgtcaccgttgcgccggaaaaaagaggatggcttgccgcattccggcgccgtgaggcggtcgatctgcgggctctgacgaaggcggagcgcgccacagcgttggccgttgctcgcctgaggcatctggatccattgggtgagctgcatcagatagccgagaatggtctcgttatccgccatccgctggtggcgcagctggactcgaacaccgcttcagctcttgggcttccccgtttgatgaccggttatgttttcaaggcgaaacttgccgggaccgttggaagctctgacttcggcattgattggtggtgggaaaagaacggtcggacggttgccttgccgcttcagggagcttttctcggctccgctgcgcagatgatgcgactgccaagccagatctattccgccatcgagcaggcgaatgccctcaaggagcgatcatcggttaccgatcattggctggaattggggaagttccgccgcctgtttgacgcgtcggatgaaccagcatcgcgggagaacctggaaggattcctgcgcaacctttcggtggttacctgtgactcggtcggtatcgcgttcgatgccgaagatgagacgaagttcttcccgcttcctttcgtcggttcgcctgaaccggatcccgacagagacaccgccgatgtcgccgccctcaaaggccgcgagctgaatgaatttcgtgacggggccattcgacgaggagctcagccggcctaccgggttgccgacggcaagttcctgatagttgatcgctccgccgcacctgtccttgatgccatcgcaaggaatgcaaaggcagatgaagcggggcgacgcgcatttattgcagacgctggccggataatacaatcggcgatcgagcgtcagatggaagacgacgggcgcataaccgccctcatgagcccggctgccagggcagaaagggtcgagcaggaaacttctcgagtgtggatcgagaccaccgaatgggtgtctcgcgtcctcggcgtcgccaaatggcaggtgacggaaatcgaagggatgcagagttcagggacgaaatggttgaattcctccatcgatgctgagctggccgatcgtctttctcagatcgaggatgaacagctagcagaagtcgtcgaggccctccgtaccgcaatcgccgagcacacacctttgatcacgcacgaggttggcgacatacctgcgatcgccgaagtccttgaagcgctgtcgagacggttggctgagtacttgaggcagaagccaatcgatgcaccttctgtttcgctggatgcatacctgccggtgacgcacgacaacttctgggaggtcgacttcaaggccgcggtacgcccgcggggaaacgaggcagagttcaagtttcccgaagccgtcaggaccgcactgcagccccatcagctgacctcgctcaaatggcaggttgcggcttggcaggcaggtattcccggcgttctgaacgccgatgagcaagggttgggaaaaacgcttcagacgctgtcattcgtggcatggctcagggctgagatggatgccggcgccgttccgcaccgacctttccttgttgtggctccaacgtcgctgcttctgaactgggaagcggagatagatcgacacctctccgctcaggctctcggaattccggtgcggttgtatggctcccatttggccgagttcaaaaaggaaggtctctcggggcaagacatccgcgagggcgaagcattgctggacctggacaagatccggtctctcgagaatggcgcgcccgttgtgataaccacctaccagacgctcgcgaacttcgcgatcagcctgatggatctccaatgcgcggtggcgattttcgatgagatccagttcgtcaaaaacccggtgacaatgcgagccaaggcggcaaaatcgctcaatgcggatttccggatcggactgaccgggacaccgatcgagaacgcgaccaaagacctctgggcgttgatggaccaactcttccctggggcgctcggtgcattggcgcagttcaaacgggtcttcggtctccccacggaagagaatatgtcggcccttcaccacgctttgttctcagggcagcatgagcgtccgcccttagcgctcaggcgattgaagaccgatgccgcccctgggctgcccacaaaggtgcggatcttgcatcctcgcgagatgtccgaacctcagatgctgagatacgacgaggctcgccgcaagggcggcatgatgctcgcgctccttcatcacatccggcggatatcgttgcatcccggtctgctggaaggcgaaaccacagaggagttcagcgcttcggcggcacgcgtcgacgcggcgatggacattctgcgtcatatcaaatcaaagggcgagcgtgctcttgtattcgtcgagaaccgagatgtccaagcctggttcgccgaagttgtgcggttggaattcaatctcgacactgtgatgatcatcaacggcgacacgaccatcgacgcccgtaaggaaatcaccgaccgcttccaacgacacctaacgaacgacggtgggttcgacgtcctggtgcttggaccaagagccgcaggcaccgggctgacactcaccgcagccaatcatgtcattcacctgagccgttggtggaaccccgcagtcgaagagcagtgcaatgaccgcacccaccgcatcggtcaaacgaagcctgttacggttcatattccgctcgcagttcacacacggctgggcgcgggctctttcgactgtcttctgcagcgcctcatgaagcggaaacgtacgatcgcagatcgcgttctctggccagccgaggccaccgagagcgagactaggatgctctacgacgcggtcgtcgaagcttcggatgtagaggttgggagcgaagcgctggagttggatggcgtactcgagggcagaaccgacctgaccgccgagatgctggacgggaatgcaatccgcatacgtcctcggcgcggcggagcgtcaattgtcgtctcgagtggccggactgtcccatcgagttccatccgttccgataccgatgccgccgttgtatcgatgcaggtgcatggggttggcaaggagatgccggtcccgcattccagactgacgaccggtacgctttggccagagttcgtcctgcctgagtaa

SEQ ID NO: 7923 - DNA, 2028 bp, Mesorhizobium loti
atgtttagttcagtgcttgagctggggaccttggtaaaggacctggttctttccgctgcgtcatttctgactggcgatgcggcgccggggatcgtggtgatcgtgctgctgattgcgctcgcggtcattctagcgtcggcgttgctcaccttccagaagcggattggctcgatcaaacgtttgcgccgcgaactcggcagtggcgactcgcccctgcttcaaggccgcgagaaaatcagcgcgtggttcaatagccagaagggaggcaaagagcaggaagctctgcgcgaagcttggagcgaattcgacgagacgctgttcatcgacaattcgagcggccaaccggtgcttcgcaattcagtgcgtccatcggcattcttcaacatcgacgatctgcatttcggccagggcttctatcgaatctggcctgggctgttcgtctcgatcggtcttgcactcaccttccttgggctgatcgccgcgctgaatgcgctgtcaggagagcgcatcgacgagacggcaatggccaacctgctacggatcgcatcggccaagttcatcatgtcgctgacggggctggtctgttcgatcgtgttgacgattgccctccggatcttcgtcggaagccttgatgaacagttgcatgggctttgcaggacagttgaaggtcggatcaatttcgccagcctggagcagattgcagtcgatcagctccgtgcaacgatcgaaagtcgcgagcaccagcggcaacttaccctgcaaatgatcgcggagatcggtggccctctgaaaactgagctgccgcaggccatttcgtcctcaatcacaacggccttgcagcccatcatggacaaggtgagtcaacaaggcaccgatagcattgcgacaatggcgacggacctgtcgcagcaggtaacacaaggcgtcgccggtgcgcttgggcaggcaagtgagcacttggcgcgggctggcgataagatcagccaattggccgaccgcatggatcaatcctccggccgcatgggcagcgaaatggagacagcgatcgcccgtgtcgcacaagcggtggatgagctgcgcggagctatgtcggcttcagcgcaatctgcatccggtgttttcagccagggcgcagagcaactacttggcgttatgaaccggacgttggaaagcattcgcgacaacaccagcgagggcgctcgagcgatttcggccgcggcggcggatatgcgtgacgctgctaccagcattcgtagtgaaattgaggtcgcagcgcgcaatggcgctgatgcggcaaaggctcgcctggaactcgcgggcgaagatgctggcaaggcgattggcgcagctgggcagacaatgctggatgctttcagcaaggcgggtgccgaaataaccggaatgactcaagcgctttcttcgagggcgggcgatgatttgatagccccgatcgagtcgatcgcacggcagctcgacggcatggtcagttcgctcaccggcggcgtcgaccaaatgcgtagactcgcggatgccgtgcgcgacggggcatcggccagttctgaagccgcaggcgcattccgcggagcttcccaggaactcgtcgccgcagccgcgccggtccgcgcgacctcggagcgcatcgagggcacgctgcgccagtttgcggacgggacgcgggatgctgtcgcgactgtcagggagagctcgcgcgcgaccgcagaagcggccgcccagacgttggaggcggcgcgcgaaacgattgccgcggagcgccagggcgtcgaaagctcgcttgtcgcggtgacgacgatgctcgagcggctgcgcggtcaaggtgatcgccttgacacgattgacgaaaagcttggccatgcgttcgatctttactccagccagacagaacaggcgatgcaggcggttcgcacccacgtccagactatggcggttcaattgaacacggcgttgtcgacgcttcaaacgattcttgacggactgcaggagttccagccgcagcaggcgcacggctga

SEQ ID NO: 7924 - DNA, 972 bp, Mesorhizobium loti
atgcgtgccacccccatgcgtcgtcgccggcacgaggaagaggaagagtcggccttcgtgtccatgacggacatgacggttggcttcctcttcatcgtcatcctgctgcttgccttcttcgcgagccaatacaatccgtcagagatggtgcctcgtcccgaatacgagcaggtcttgaacgaacgcgacgcattagctgtagaactcaaacgcttgcagcaacgcatcgcgcaactggaaacggagcgcgacacggccattgcagcccgcgaaagggcggataaagaaattgtcaagctgaagacccggattgcgaagctcgaggctgaactggaaaggctaaaaaagccaaatccgctcgaagcctatatcaacagcagcatggaggctcggcggcgcatccttcagcagttgcgtgaccatatcgcgctcgactttccagatctccagctgatgctgagcgaggagtccctccgcttccagggcgaagggcttttcaagcggggggagtatacgcttctcccagaccggctgcgccttgtgcaggtattggcagatcgcctgcacgaaatactgccttgctacacactgggcgatgatgccagattcgacacgaactgcaattcggggttcgcccttatcgaagccgtccagatcgaaggccatacagactccgacggtgacgatatggcaaatctcgtgctgtccaccaatcgcgccacgaccacgtttcgtgcgatgaccacgcaccaagtgaagttgttgaactaccgcaacttccagcaacagccggtcttgtcggtggctggctatggccggatgcgtccgatcgcttcgaacgacacagtcgagcacaaggcatcgaaccgacgcatagacctgcgcattatcatgcacgttccccgagacaccgatgagatcgataaggtgcgcgatgcgctgcttattggatctcggatgaatccacagtga

SEQ ID NO: 7925 - DNA, 1242 bp, Mesorhizobium loti
ttgatcgagcggaacatccgtcgggttcttgacagatacgacgcacccgacaaacctccggaacgggacgctgagcggctcttctccgagatgctgcgtagaatcagagaacacgattggcgcaaggtgccaatgagtttcgtgacgcgcgtagcttctctcgtctatgcggcaacacaccggtttcgtgatgatctggccgacattcgccgcttcctgtgcgccgagattcgcgcagcgacgcggcatggttttcttaacccgatggtgcggatctatatcgagagctacgagacaggcaaagcccatacgatggagttagctgaagcgctgcaacactctcgctccaggatcggagctcgttggcagcctctcctggagaacgtcccggagttgctcgacgcacacaatgcgccctcggcgcttgccgccaaaatggaccgtatgccggacccttggcatggccttcggtcgttgggattgcatcagccacatgcgcccggcctaatggacgcggctcatctcgagtttctcaatgtcatcgagccgcaactcacatcgcttggtgaaattgagcgattgctggggtggcttaaaccggatgatcgtgcgctcagacaggttggggcaggtaaggcgatcgaagttctgctgggccactggcggacacgcaaccctcccgcagagattcagagcttgctggtcgatcgattgacgcagctctacagtcatcctcgtgtgaaccctcaccctgcctggaatgaggtcgatccagctttggttcagatcttcctccgctggctaatgggtgcggatatacggttcttgttccgagttctaacggaagtcgaacgcggtcacatgtgggccgacagggagaagttctggtggacactccatgagcagggccgcatcgatgaagtctggatcgccttcaacgatgatggacaccgtgcggcgctgtcgaagctgcccacagatgcccgtcaaaatggacggcgtttcggcaggcaggtcggcgaccgcgacaagtctctactcgtcatgcgtatccgcaacaaaatcgtcattgaagggacattcaacttcaaagtccatttcttcaaggctgatcagccacgcacccctgagctttatcgaccgcgttatgacgtggcagatatccggaacctcccaaacgtcgatgcgatcgcgcacttgggcgactggcaatcccgtgttctgatggccctgtcccgatga

SEQ ID NO: 7926 - DNA, 2172 bp, Mesorhizobium loti
atgttcgtgttcttcaattgggtaacgcgatcagtactattctggctgatcgctgctgccgcggttctcctggcggcaagagagttgccattcatcaatctacctttggtgtggagcaccattctgggcgctacagccgggaacatcgagtccatcagcaaaccggcattcgcatacgggctggccggcggtctcttcttcaccggtatcggtttcgcggctgccttctacatttgccacgttttaccggtccagatcgcgctgtggcgtgcgacggttcaggtcacccgggccaagggcaaggaccgagggcgggacgccattcgcaaagccttcgcctcaaacttcgagaatctgcgccagactctcgagcgaaattcattgatcgggcatgcgtggctcgaattcgaggagacgctgttcaacaccgacggcgacagagcgattggcaacacggtccggccgcagacttttttcaatctggcgctggcccgcgagaggttgagcggcctcaagatgatgaatgcggtgcccggctattttgtaggcgttgggctgcttctcactttcatcggcctagtcttcgcgctttataaggccggggcggccgcaaatgccggcgacgccgacaagatggcccaagagatgggcgcgcttctgcagatcgccactttcaagttctcaacctcgatcgcgggtcttggtgcctccatcgtcttgtccgtcttttttcgttggtattttgtcttggtggaaagtgcattcgagcgattcaacgccacgctcgagcgtggcctgctttataccgcgccacaatcgatatcattggaaatgaacaggaccctgcaggatcagttgatgcaactgaaggacattactcaaggtgagtttttcaatcgcatggggtccgagctcgcaccgaggctgaacgccgcgatggttgaagcgatggctccggtgaccgaccagataggaaacgccgttggtagcctgactgcgaacagccaggatggcgtgcagcagatgctgcacaaattcaccgactccttgcaacacggcgctgggacggaacttcgcgagctcgcagcaaccctgaagcagctgcagatgtccattgtcgaaatgcagggtgggctgcgcggcagcggcgacgagtttgcaaccaagctgtccgatgcggcagacaatctgaaccgcatggtggagcgcgcgggccaaagcttcgagacgagctcgggtcaaagccgcgatgcgttggctacagtcatggatttgctccgccagacaatggagaaagccacggcggaaatagacactgcactcggcacagcagccagcggcgcgtccaccaaactcgaggcggccatgggccttgttatggacaagctcgacaagcggatcggcgagctgggagatggccttcaaacgatgcagaggaccatgggagaacacggagacgcggccagaagacagatcgaagtctcggtttcgcaatccaccgacatgcaaaaagctgttttggcggagatggaagccacagttcagggcatatcgggtcggattcgcagcgcggtcgacgatgccgtcgcttcagtgggtaggcgatttgatgagcttgccgcttccatgcgagcgatcgagggcgcattggccggtcagaaggcggcgctcgagggagcatccagcgaagccagaaagacagcggaagcgctcggaaagagtgcccaaagcgttcaggtagccaccgcgccgcttatcagcgtcggcgatcgcttctcgtcggccacggagaagatgacggagggggtcacagcgacgctcgacgcgctcaagctggcacagtcagagatggccgggctcgccgctgatctctcggccaccaacaagtcatccggcgacttctggaacaattttgcaggcaagttcgatgacgtggacacggcgctcggccaagccgtgtcggtgctgtctagatccacgagcgaccagcaacaaaggcttgaaacacacgtgcagagcgtggacaggggcctgtcggaagcgatcggcaagctttcgggcattctgacccagatgtccgacagcgcggagtccatcgccgatagtctggaagccgcgagggcgggtggtgctttgagcagctccaacggtgcgcgcgggacccagcaatga

SEQ ID NO: 7927 - DNA, 909 bp, Mesorhizobium loti
atgatcgtcgccgagcccgatcaccgagccgtgtctcacgccgaggaggacgagaactatttcgtgtcgatgaccgacatgatggtcgggatcctgtttatcttcatcatcatgctgatggtatttgcgctgcattttcgacagcagacggatgagaccgtgaagttgacagcggagcagcagcagcaactgcaaaaagcaaacgagttggcagagcaaatagctcaactgcgccgccagatagtagccgagatcgccgagttgaacaaagctgaccaggcgcgtgccaggctgctggagaaaattcagcgcaaactggacgaagtgggcctcaaggtcacgatcgagcgagagaccggagtactacgacttacggaagaggccatacgcttctcgcccgacagctcggtgctggacgacactgcaaaacgcaatgtcgacgctgtggcaaaggtccttcttgatgtgctcgccaactatgccgcctgcccggataccgagacctgcccaggcgcctccggctacgttgtcgaaacggtctttatcgaaggtcacaccgataggaccggggatgacagccggaactggcagctttccacggaaagagcggtcaacacctatcgcaggatcgtcgacaatttcccaggtctgcgcaagctgcgtaattccgatcatcgtgagatactgtcggtttccggctatgcgtacacgcgcccggcgaccgagcaggacgatagcgaaggcttccgcatcaatcgcaggatcgatctgcgttttgtaatggaagccgatcgacgcgaaagattgacagaagtcctcgatcttctggacaagatggaaaagaaggtcgacgagttgagcccgaccggcacatctgtcatctcaactgctccgacggcaaggccataa

SEQ ID NO: 7928 - DNA, 1383 bp, Mesorhizobium loti
ttgagcgcacatctcaaggaggcaatcgcggaattggtcatacgacacggcgtgccggcacgtccgtcgacgcctgcgcagatcgagatcaccgcgggcaagctgcgcgagaccgaccgtgacgcaccgcggacaaaggactatgacgccatatccgaacagttggccctgacactttcaaaaggcgataggattacaggcaggcaggcacgcgacggcgcatggtgcctttggcagacccggttcgcgatcgcggcggatccagcgacgctcaagccttttctcggtcagcttcgtgagttgaagcacaagggtgcctccagggcgctggctctttcctatctgatcagcttccacgaggatcgaccgggcctttcagccgtggccgccacgctgcgcgaccttgccgccgtcgccggaaagccgtttgacacgctggaggagaagttccggatattcgacatcaacgacgggccgcggctaataggcgaggcagcgttggcgcagcgaaagtcgccccgcatcgtgctggcagagcaaggactacagatggaactcgtgctcggtggcggctttgttgagccgtgcgcccggcgggtgcttgagcgcgtcgcggaagacaaaaggcttccttcactcgaacgcatcgatttcgtgaaactgatttcggttaatggcgaaacgaagcggctgaactttcctggccacaaggacctcgtcgccaatgcattgttgctgccatatgcaaaccaaagaccagatgaggtcattcgcgacaggacacttgacctgctgatttcgctcgaaggcgtcggtgatccccgcacgcgaagcggaaattgggcaagcatgccacgctctcgtgacatcgcggtctcctggttgacggagcaggcccttcggcaattcttggacgttgtcgaagaggtcaacccaaacgagtattggcactatcgacggacgttctgggaagcaatgcacgacggcgatgccatttcggccgcatgggtcgtgatggaccgcgaaggggctcgagaggcacgacggcggttcggcaagaacaccggttttgcccagttcacctccggcgccgtgcaggccggacatgccgtcttgctgctgcgtatcggcgagggcgtttgtgcggagtggagcttcaacggcaaatgccggttctggcaggacgcgcaacgtcagggtgctccgcgcctttatgacgatggctacgacgccgaattcttgcgcacaggtaccaggtatccgccgatgctcgagatcacacactatcctcacactgggccgaacgcctggcagcacctagctgctcggcagatccagggtatgactggtatgcgattttcacccaaggagtacatgccgtga

SEQ ID NO: 7929 - DNA, 2913 bp, Mesorhizobium loti
ttgcttggcacccaagtcgtcgagacgtcgttttggccgaagctgacaggcaaggagggcgctgctgcgcgctatctgctggcgctggcagatagtggcgaggctgacatctcggccaccgaggtattggttgcgcaccctgcgattgcggcattgcctgcctccgtggcggaggctttcagattgcctccactaggcactctttcagtgacgttggcgtttcaagggatcatgaccgatccgagggcccgcattcgcgtcagctggtatgatgccgacactcgcagaataaggattgaaagaaccggagcactggcccggtggggtgccttggagggccgcctgtcggggactctctatgcactgaccgaggctattgatcgctacaacgcaactgagaattccggttcggacatacggatcgctgcttgggcgccggtgcaaaatgcattgaagatggccaccggacaggaggtagttaccgaagatcgtttccttaccagcctcacgatctatcaagcaggggcggttgcgctggatgtcttcgcgaccccctatgggccagatttcctccctgttgttatgggtcgagagaagtcggcaacccttaatgacgatgcgcccgccccggaaggaaccgagctcgcgccagcggcatcagatctcgtctcggacgctctgttgcctgagccgctccaaagacgtttcgcccgggaactcttcgctgccgaaaccaccagtcgggatgcctatgttctcgatcgaaacacctaccttgttgtcgatccagcgctcaaatccgccttagatgtcatccgcacgaaacgttccgcgccgcgagaagagcgtatttcatttctgaagaatcccaggatcgaaattgcacaggcgctcggcgacgaaacaggtgagatggcgcagacgctgctggtcgaaacttggcagtattcggagcgcattctcggcctcggcgtctgggagccgcctgccatgccttggcttaagaacaaggccggccaatggttgcccgagcgctttcccgtcaggatcggcgaccagatcgtcgaaatggatcagcggattttcgacgatctcaggaccgcaatggctgccgcggatcagcaaggcgacagcaaaatccaattgggtgatcggacactcaaggtcccggaggtccaggatgcctttgaacggcttggtctcgaccgtcagggaaatgcgccaactcaggccgttgaggaagaaaatcggctagaacaacctcaaagggacccgcaaccgggtgaacaagagcgcctcatcattcaacaaaattttgaaggcaaggaatttgccgtttcctacaacgccaggcagaccgtcgcaggcgacgaatttcctccaacagatgttgtcacgacaagaccaaaaccacatcaaagggacggctttgattggctggtcggcagctaccggacaggctggccaggggtgctcctcgccgacgacatgggcctgggaaagacctttcaggctctagccttcctggtgtgggtcagacagatccggagcaagctcggcatcgatgctggcgcgcaaaagaagccgatgctgattgtggcaccgacagcgcttttgcgtaactgggtcgaggaatccgaccgacatctggcgccgcaagcgttgggcgagcgcatagatgcattcggttcggccttgcgtcacctcaagatggaaaggctcgagcactggaccgccgaaactgcgcttgacgtcgccaggttgcgctcggccgactggatactgacgacctacgagacactcgccgactaccatcgggcatttgcgcgcgtcccgttcagtgtggccgtctttgacgaagcgcagaagatcaagtcgcctggctcgatcaacactcagtccgcaaaggctatgaatgtcgaattcgtgctggccctcacagggacgcccatcgagaaccgtcttgccgacttgtggtgcattatggaccgcgtcgttccgggctatctcggggatcttaagggcttcgtccagtgctacgagaacggcgacggggacgaccttcgacgattgaaagccagccttgatcagccgccaaggccagacaccccgccggtgctactgaggcggatgaaggcggaaatcctggagggcttgccaaaacgcgaggtctcaaaaaggcagatgccaatgccgccgcaacaggcggaagcctatgcggcggcggtgtttcgggcacaaaccggcggcacaagccagggcgagatgttacgggcgattcatgcattccggggcatatcattgcatccagccgggggctctggctgcgatccgctcgacatgacctcggtgcgggattggatctcaaaatcggcgcgcatgatccatgctgtcaaagttctggagcacctaaacacaatcggcgagaaggcattggtgtttgttgaagaccttgaggtccagaaggtttttgcagctgcgatcgccactcatttgcaaatgccacgccagccggcgatcatcaacggggctatcccgggagaaaagcggcttgagattgtagaacggtttcagtcctcaagcttacgtttcgacgtgcttgtgctctcgcccaaagctgctggcatcggtctcacgatcactgccgcaaaccacgtgatccatctgtcgcggtggtggaatccggccgtggaagaccagtgcaacgatcgctgttatcgcatcgggcagcaaaggccggtcactgtccatgtgccaattgcagtccatccggaatttggcgagacctctttcgatcagacactcgacgcattgttggaacgaaagcgccagctctcacgcgacatgcttgtgccacctgtagaggatggcgatgtggaagccctcttcggcagaacgctcggaagggtctga

SEQ ID NO: 7930 - DNA, 2034 bp, Neorhizobium galegae bv. orientalis
gtgcagatcatcatttcgatcggggacatttttcgtacatttattttgcacgtcgcgggactgctaacacatgaatccgcgcccgggttcattgctttcctccttctactgtcactgctcatcgcatccttcgcgttctggagaagggtgaacaaacagagacgagccattctgtggctgaagagagagatatcggccagtgccgacgaactcgagttcagccgcaacatcgatgcgcttggcgcgaagatcgctgagaacgcaaaatctccgcagcagcgccagcttgcccacgcatggacggaatatcgcgagacctttgttccccacgaggaagacggtaacataatacttcgcaatgccgtccgaccgtccacgttcctgaatgtcgaggaactggggtttggtgccggagcctggcggatcgcgcccggtttgttcgtgacgatcgggttgtttctgaccttcctcggattgatctccgcgctgaacaccatgtctcagggcgaggaaatcaacagcgcgacgatgaggacgctgctgagcattgcttcggcgaagttcatcatgtcgctgacaggcctgttctgctcgatcatcttcaccgtcgtgtttcgtcgcgtttacggcgggctgctcagagcggcccatgacctgtgcgaggcgatcgaaaagaagctaacctatatcagcctagaagcgcttgcgtccgagcagcttcaggctattcgcgaacagcgtgagcactttcgcctcatcggcatggagttggtctcggaacttggacgtccgcttcgtgaggaactgccaaaggcgatctctgcgtccatcagcgacgcgatggctccaatgatggaccgggtcggaaaactcggcgcggaaggcgtcggcgatctggtttccggcctgtctaacaaactcaccgacacagtcggccttgccctgtctgacgcaagccagcgtctctccgaagccggaatgaagatcggacagcttgccgaccgcatggaccagagttccggccgcatgggctcggaaatggaaacggcgacgatgcgggtcgcgcaggcagtcgaggagctcaggaactcgatggccgcgaccacccagtcggctggaggggcttttacgcagggcgcagaacggctgctcgatgtcatgaaccagacgttggagggcatccgcagcaataccggggaaggcgctcgggccatgtctgctgccgcaggcgaaatgcgcgctgctgccgaatcgtttcgctcggaaatcgaggctgcggcgaaatccggcaccgaggccgccaatgcacaaattcaggccgcgacgtcagatgcaagcggctcgattagcacggccggccagaacgtcgtcgatgccttcggcaggaccagcgcggagattactcgcatttccgagcaggccgcgatgaaggcaggccaggagctgatggcaccactggagagcatcgcagggcagttgaaggagatgatagcgggcctaaaccagggcaatgccgacttgcgccgaatggccgatggagtgcgagcaggtgccgatgcatcgtccgaggccgcgggcacattccgttccgcatccggcgatctcatttctgcagcaacgccaatccggtctattgccgagcggatcgacacatcgatacggcagctcaccgacagtacgcaacacgtcgccagtgtcgtctcccgaacggcagaaacgaccgcggaatcggccgcagcggcccttgatgccgcagaaaagatattggggcaggagcggcttgcgatcgagaccacgatgtccggtttgaaaactctcgttgatcagatgcgcggtcagggcgatcgtctcgatgagatggatagcaagctgggtaatgcattcgaaatttatactgatcaggtcgcacgcgccatcgacgggatgtttggccatgtacgggcaatgcaggaacaattggcaccagcgctcgacacgatgcattcgatagtcgagcaggccgagcagtttgcgccgcaatcgcggagagtgtga

SEQ ID NO: 7931 - DNA, 981 bp, Neorhizobium galegae bv. orientalis
atgcgcggcggcttcagggttcagcatcaggaagaagaagaggagagcgcgttcgtgtccatgacggacatgactgtcagcttcctgttcatcgtcatgcttcttctggcattcttcgcaagccagtacagcgaaaacgatactgtcagcaggacgatccacgaagaggtcctggcagaacgagatacggccctagaggaaataaagaagctgcgcgcgctcgtctccgaaaaggagaaacgtatcgaggagcagtccgtcgaaatcgaaaaacagcgggatgagatcgctcagcttcagcaaaaaatcgccgaactggaggaggtcatcgcgaaatcgaaaaagcccgatcctctcgaagcttatctgacacggtcggcggcagagcgacgtcgaattctcgagaccctccgtaaccagttgaaggtcgattttcctgacctgcaggtcgttatcagcgaggaaagcgacgcgctccgtttccagggcgaaggtctttttgacaggggcatcagcacgttgaaagccgacagaagagcggtcgtcgaaaagattgccgcgcgcctcgagcagatactgccttgctatacgttgggtccgaagaagtcgtggaatgcggaatgcaatccaagcctgtccatcatcgaggcattgcagatcgaagggcacacggactcggacggaacgccagacagcaacctgaatctctccacggcgcgggccaattctacgttcaccacaatgaccgcaagcaagccgggactggtggatttccagaattttcgcaaccagcccgttctttccgttgccggatatggccagatgcgacccatccgaaagaacgatacgcttgagggcaaggcgaccaaccgcagggtcgatctgcggattatcatgtacagcccgagccgatcagacgaaatagagcggattcgcagttctctcgaaaagagcgacggggtggcgaatgggaatccttga

SEQ ID NO: 7932 - DNA, 1170 bp, Neorhizobium galegae bv. orientalis
atgcttgtcgccgaggttaaccgccgcttccagagcgacgactggaacgacacgccgatgtcacttgtcacctcggcggcaagagcgctcttcgatgcggagcggcgtgagcgaccggacctcgccgacctccggaggttctattacgacgagtgccgtgtttcgacgcggatgggatttctcggcgccatggcatcgatttatatcggtagctatgttcctgctgctcgccacaccctcgagctatcggaagcgcttcgcgaggcacgtggtcgtttgggcggacgctggaaaaacctgctggagcacatccccgagatactcgatccattcactgcacatgaagctgtcgcccgaaagatgctcccgatggacgatccatggagtggcctgaaaagcttgggtctccgcagcccgcatgcaaatggtttgatggaccacgcacacctcgcctatatccggtcaatcgcaccggagctgaagagccgcgaaggcatggcaaggctatttggatggctgaagcccgacaatcaggaagcaaagctcacggtttcggcggacgcaatttccgcttgccttggccactggacgcaggcggtaccgccggaggacgaccagcgttatctcctcgaaaacctgatcgggctttatggcgatccgcgggtccagcgcagcggcgcttggacgggcgtgtccgagcagttgatgagcgtcatcctccgatggctgacccgcgagaacatccgcttcttcctcgacatcgtatcggctgtcgaagaaagccatatgtgggagccgcggcgaaaattctggctcggtctccaccagcaaggtcggatagatgccgcatgggttgccttcagtgaccgagcggctcgagaagcccgatcgaaaagtaaacagtccggcagtcgaggaacgcttcgctttggtcgccagatcgccggagggggccgcagtaatacgtcacttctgatcttgaaggtggggcgcaagatcgtcgtcgagggctcgcacagctataaagtccatgttttcgacgcaacgaatctgcgggctccggccctttacggtgacaactacgattgcgatgacatccgagacattccgggagccagggcgaagtctcaccagggctactgggaaggttgggtgctggaaaacatctga

SEQ ID NO: 7933 - DNA, 3102 bp, Neorhizobium galegae bv. orientalis
ttggaatttgatgtctcattcgaccaaagcgcggtcaccgttgcccttcgtgaaaaacggcatgggtttcttagccgactgacgtccagaaagtcgacgaccgatctcgacagcctcccgatcgaggagcgcgatcttctctttgcagtcgccgatgtccgtgcgatcggcgacgagatcggtgcgccagcccgcatcacctcgaacgccatcgttctcgatcaccgccttgtcgccgctcttgatgcccggacagcaaacattctgggtttgccggcggtggtcgatctggtcctgaagaccgacgtcgaaggcattgtcggagccagtaacttccgactaaggcatgaatggctgcgcaacgggcagcgacaatttccaaagaggaccggctctattctggaaacagccaacgggttacgccgcgttccattgtggatgatggacgcgatcgaaacgtcggaagcgcatcggcccggcaacggcgattcaaccgactgggaagccttggcccgcttcaggcagatgcttgacccgggcgccgatggcgaaaacaaaggccctgccgctcggctttccatgaccgattttctcagcggtcttcaagtccggatggcggacagtttttccatttcgccccgtacttcgtctgactttgacgtcgttccattttcgtcccagcgcctggaacgtgatctgagcggcttcgacgaagtttccgaagacatgggcgaaatccagaacaccgatctcggtatcttccagaaccgggttcgcgaacgcggcgctctccccgcctatcggctttcgcccggtagctacctcgtcgttgaccgctcggcggcacccgccctgcaggtgatggcagagatgcagcatgcgcctgcggcagaacgtcaggacttcatccgcaatccgggcctgaagatatcgaacgccgtagaagcttcgcttcgagcccaaggcaagcttgaaggtctttcaccccaagccgagcaggagatgatcgaggccgcggcaggcagcctgatcgtcgagacaaaggaattttccgaacgcgtgacgggcgtcgtgaccttcgagaagatcgcgctcgacatcgcggaaggcagcggtacgacctggctacctgaagaattcagccgaaaacttggagaggctctcggtgcgatgccacgctccgaacttgaggcgctacgggagagagtatcgtctgcaatcgagcacgagaaagccgcgatcgagctgggcgagctttcgataccggccaggcctgaaatgctgagcgtgatagacaatcatctctccgccgccatcgacaacgacgacagtgataaggacggtgacaaggcggacgaagggaagcgaggccccgtcgtgctcgacactgcggtcaacttcgaagaagtttcctggcacgcgaaattgacaccaagagcggcggcgtctggttccggcattccggtttccatcaggacacccctgaaacctcatcaggtcgagagcctgcagtggcagatcgaagcctggaaggcgggcctccccggcgtgctgaatgcggacgaacagggtttggggaaaacgcttcaaacgatcgccttcctgacctggctgaaatcgcatatggcggagaaagacgcggggaacaaaggtccggttcttgtcgtcgcgccgacatccctactcgaaaactgggaacaggaggtctcccgccatcttcacgatcctggtttggggcatctcatccggctctatgggagcagcctcggcggccgaaagctggttggcgcaaagggtcgcgataccgacagcggcgacgccaaactcgacctgagttcccttcacgaggcaatcgaagagggccgagcgcatagattctggcttctgacgacctataccaccctgaccaattatcagcattcattggggcgcatcccgttctccgcgatcgtcttcgacgaaattcaggcgttgaaaaaccccgtcagcctgagagctgtcgccggaagagcaatgaatgctgactttcgcattggtctgacaggtacgccgatcgaaaatgctgcgaccgatctctggtcgataatggatcagctcgcaccaggctcgctcgacagcctgcgtgacttccacgggaaatacaaggaaccgacgtcggagaacatgaccgatctccatgcacgcgttttccgccccaacaaggattgcccaccactggcactgcggcgcctcaaggacgaagtcgcgtccgatctacccaaaaagtcgcgcagaattcatcccagactgatgccggaaggccaggccattgcctacgacgatgccaaactgaaattggcaacaggcggccttggcgctcagctgaagatgctgcatcacattcgtaccgtgtcggtccatccgtccgtccagtcggcgtggagtgacgaagacttcatttcggcatcggggcgtctgaccgccgtcatggatattctgcgccgtgtgcatgcgcagggcgagagggccctcgtcttcatcgagcacaggcagatgcagtaccgtttcgtcgagctggtaagagctgagttcaagctccagagggtcgacctgatcaacggcgacacgccaattccgcagcgtcaggcgatcgtaaaccggttccagcggcacctggaagacgatcgagggtttgatctccttgtgttgggaccgaaggctgctggcactgggctgacgctcacggcggccacgcatgtcatccatctttcccgctggtggaatccagctgtcgaagagcagtgcaatgaccgtgtgcatcgtatcgggcagacaaaccccgtaacggtccacatccctatggcggtacatgcttcttaccaggaccaatcctttgattgcctccttcagagcctgatgatgcgcaagcggcgccttgccagttcagcgctttggccgatgggtgacacacaggatgatgtcgcggcacttcagcgcctgatgagtgcggagaaaacagccgacaaccgcgatccggtgaaagccgcgatgcagggaatgtttgatcgggacaaactgaggcttcccgcagccgaggccgacggatcgctggcaatcgattga

SEQ ID NO: 7934 - DNA, 2058 bp, Methylobacterium extorquens CM4
atgttcgagttggttcttggtttcggaatcgcggcgcgcgacgcgatcctagccgtggcggggctgctgaagagcgaggccgtccctgggctcatcgccgtcgcgctcgtcctggcgctcgcattccttatcgtcctctacgcccgtagcatcgccgtacgcgtggcggcggtgcggggcttgcgccacgtggtgcgccgggccgccgacgaggcctcgttcgggcaatccatcgccgacctcgacgcggaggtgttgcgctctggcagccggggcgcgcgcaagcagatcgccaccgcctgggacaagtaccgcgagacgctcgtcgagcacgacgaggacggcgcaatcatcctgcgcaactcggtgcggccggcggtcttcttcaacgccgacgacctcggcttcggctccggcttctggcgggcggtgccgggcctgttcgtgacgatcggcctattcctgacctttctgggcctgatctcggcgctcggcgcgatggacctctcggcgccggacaaggtgcagagttcgctgcgcgaattgctgctggtcgcctcggcgaagttcatcatgtcgctgaccggcctcctgtgctcgatcgtgttcacggtcgtcttgcgctgggggatcggcagcatcgagggcgcgctgcacacgctctgcgccgagatcgagaagcgcctcagcttcatcagcctggagaacctcgcggccgagcaactgcgggcgacccgcgagcagcgggagcactttcgcctgatcggcctcgagctagtcgccgaactcggtcgacccctgcgtgaggagattccggccgcgatctcggcctcgatcaacgcgacgatgggcccactgctgcagcaggtcggccagctcggcaccgatcacatgggcagcatggtcaaggacctctcggcccgcttttccgacgatgttggccgcgccctggcgcaggcgagcgagcgcctggttcaggcgggcgaccgcatcggcgagctgtccacgcgcatggaccagagttccggccgcatggggtcggagatggacgccgccgtcgcccgcctcgcgcaggcggtcgatgatctgcgggacacgatgagcgccaccgccgcctccgcgaacggtgccttcaccgacggggcggaccgcctcctcggcgccatgaaccagaccctccaggaaatccgcgacaacacccgcgcgggggccgaggccatgggggcggctgccgccgatatgcgaggagcggcggaagggttccgcacggagctggaggcggccacacgctcgggcgcgaccgaggctgcggcccggatgcaggcggccggttcggatgcgagcgcgcaaatcagtgccgccgggtcgaccgtcgtgcaggccttcggtcgcacggcgggcgagatcgccgaggcgacgcgggaggtcggcgcgcgggcggcccaggacctgctcgctccgctggacagcatcgccgggcggctgcgcgagaccgccgacggcgtcgcggccgcagtgggcggggtcgggcgcctgggcgacggggtgcgcgcgagcgccgaggcggccgagcgcgcggccggcgcgttccggggctcgtcggaagccctgataacagcctccgcgcccctgcgcgccaccaccgagcggatcgagtccagcatccgccagctcgcggacgcgacgcagcacgtcgccggaacggtgagccgctcggccgagcagaccgcccgcagcgccgcggacgcgctcgccgccgcgcagaccgcgctcggcggacacgctggcgcgatcgaggcgtcgctggcgggcgtcggccacgtggtggatcgcctaaaaggccagggcgcgcaactcgacaccctcgacgagaagctcggcgccgccttcgacgtctacgccgcgagggtcgccacggcggtggacacgctgtccgactacgtgcgccggatgcagtccgaactcgcaccggcccttgatacgctgcgcgccgtcgttgagcaggccgagcagttcatccccgagagccgggtcgccgccggacggcgggggccctga

SEQ ID NO: 7935 - DNA, 891 bp, Methylobacterium extorquens CM4
atgcgcggcgcgacccgccgtctcgcccatgaggaagaggaggaatccgcgttcgtctcgatgacggacctcacggtgagcttcttgttcatcgtgatcatcctgctcgccttcttcgcctcgcagcttaaggacgaccaaacggttccgctcccggagtaccggcagatcgagcgtgagcgcgaccggctggctaccgagaacgcggacctcagccgcgaggtggcgcgcctggaggatgagttgcgcaaggagcgcacgaaccgcctccagacctacctctccgcggtatcgagcgagcgcgaccggatcctgcggaccttgcgcgaccggctcgtcgtggatttccccgagctcgagaatatcgtgagcatcgagaccggcgcgctgcgcttcaagggagacggattgttcaagaccgacaggtggcagcttgccgaggacaagcgtcgcgtcgtcacggcgatcgcgacccgcctgaacgagctgctgccctgctacaccttcggcaaggcggcgcgctggcaggcgtcgtgcaacgccgccggcgcggtgatcgaggcggtgcagatcgaggggcacaccgatgcctccggccaggaccggtcgaatttcagcctctcaaccgaacgggcggtcgagaccctcttcgccatgatcgggcgcgagcccgccctgctcgacaaccgcaacagcgcggggcagccggttctctccgtatccgggtacggacgccttcgccccgtcgcggacaacacctccgagcgcggcagggccacgaaccggcgcatcgacctgcggatcatcatgtacacgccgcatagcgtcgaggaggtcgagcggatcaaggacgacctccagcgcggtctggccgggacggtgctgcaatga

SEQ ID NO: 7936 - DNA, 1317 bp, Methylobacterium extorquens CM4
atgagcctggacgacacccttgcgcggctgcgccccccggaaccgcccgttctgccgaacctcaagaccttcgcggctgccgcggaacggatcctacaccgctggccggacgtcgcgccggacccgcccgagcgcgaccgtgagcagcttgtgctgcgcatggaggcgcatcgcgtcgaggagcggtgggacggggtgcgaatgtcactcgtgacggccgcggcgcgggccgtctttgacgcgacgaggcgcggcaggcccgacctcgccgacctgcgcggcttctatctcgctgagattcgggcctcacaccggaccacattcctgggggcaatggtctcggtctatcttgagagtttcgcgccggacgcaccccacacgcgggccctcgccgaggccttgagcggggcacgcgatcgattgggtgcgcgctggcgcaccctggtcgagggtatcccggaggtgttccggccggacctcgcccccgaggcgatcgcgcgccggatggtggggatgcggagtccctggcccgagttgaaggcgctggggctgcgcgctccccacgcgccgggcctgatggatttcgtccatgacgcctatgtcgcgcggctcaagccccatctgacggtgcgagccgagattgagcagctgctgtcgtggctgaaaccggacgatcaggccgtggcgcgctcgtcgggggcgcccgcggcgatcgaggccttgcttggccattggcggaccggcaatccacccgaggccgacatcgacctcatcacgcgctccctcgtcgcgttctacggcgatccgcgcgtgcagcagggcggggcctgggcgagcgtcgcctcggattgcctcgcggtgatcctgcgctggctcaccggcaaggacatccgcttcttcatggacgtcgtctcggccgtggaggatagccacatgtgggagccgcggcggcgcttctggctcaagctgcacgcgcagcgccggatcgacgccgcctgggtcgccttctcgccgagcggtgccgaatacgcgcgacgcctgctcaagaccggcgaggtgcggggcgtggtgagctacggccagcagacggccggctactcccgagccaacacctcgctcctcattctgaagtgcggcaacaggatcgtcgtcgaagggtctcacagctacaaggtgcacatcttccgtgaagggcatccgcacgcgccggccctttatcagcgcgcctacgattgcgagcagatccgtctggtgcccggcgcggagtcgcgatcgcatctcggcgactggcagggatgggtcgaggagcggatctga

SEQ ID NO: 7937 - DNA, 3102 bp, Methylobacterium extorquens CM4
atggtgtcgcccgccctcgacttcgccttcgatccgcaaggcatcacgctctcccgcccgacgcgggtcggcctcctcgggcgactggggttcgggcgggatcgccgcgaactcgatcgcctgccgctcgccgaacgcacgctgctccttgcgatcgccgacctgcgggccgcggccgccgagaagcccactgagctcctggagatcacgcccgagcacatccgcctctcgcatcggctggcagcggccctggacgcggagacggccgcgtcgctcgggttgcccccggtggtcgatctgtcgctgcgcacggatgccgagggcgtgctcgggtcgccctcgttccgcctgcaccacgagtgggttaagaacggccagcgccagaccgtccaacgggtgggcgccatcctcaagacctcggcgggcccgcgtcggctgcccgaatggctgatggatgcggtggcggtctccgagggcttcgagtccggacggagcgagagccagcactggaacgcgctggcgcggttccgacaactgctcgaccccggtatcaggattgcggagccgacggcggcagcgcgcgtctcgatgacggactttctggccggcctggaggtccgaatcgcagatcgtttcgctctctcgccgaccgccgaggacgatttcgacgtcgtcccgttctcgggtcgtgaactcgcccaggcaggctacgacgaggccgcggtcggcgtcccagagggggcgggcgagctcgcgggcccgctcctgcgcggctttcaggaacgcgtgcggtcacggggggcgctctcggcctaccggctcgggccgggcaacttccttgtcatcgatcccgcggccgcaccggcgctgtccgtgatggcccggatgcagcacgcccccgccgcggagcggaaggccttcctgcgcaacccgcgccccctcgtcacgcaggcagtcgaagcggctctgcgcggcgcgggccaactcgatggcctcgacgcggtcggcgaggaagatgccatcgaggccgccgccctcccgctgttcgtcgagacgcaggaatatgcggaccgggtgacgggcatcggcgtgttccgcaagcccgatctagagatcggcccgggcagcggcacgacctggctgccagaggccttcgccgagaaactccaaagcgctctcgcggccctgagtccggcggaactcgacgacctgcaccggcgggtctcccgggcgatgtcggccggcgatgcgaccgtaccgctggccgggttcgacttgccggctcgggccgaggcgctggcgctcatcaggcagtaccgcgggggcgaggcgaccgaggacgccactgaggaggagaagggatcgtccgagcccgtcgtcctcgagaccgtcgacaatttcgacgaactgaagtgggtcgcgcggttgaagccgcgttccgcgacggggaacgaagacgtcccgtcgctcatccgcacggacctcaaggcgcatcagcgcgcgagcttcgaatggcaggtcgcggcttggaaggccggcctgccgggcatcctcaacgccgacgagcaagggctcgggaagacgctccagacgatcgcgttcctggcctggctcaaacagcacgcggccgatccgcgggcgctgcaacgggggccggtgctcgtcgtcgccccgacctcgctcctcgagaactgggagcaggaggtcgcccgccacacccgggaaccgggcctcgggcacctgatccgcctctatggctccgggatcggtgcgcgaaagcacgccggcgcgtccggtcgcgacatcgatgctggggagagcaagctcgacctcgccttcctgcacgaggcgctggcggagggccgggcccaccgctcctggatcctcacgacctacacgaccctggtcaactaccagcacagcctccgggagatccctttcagcgccgtcgtcttcgacgagatccaggcgctgaagaaccccgcgagcctgcgcgccgccgcggcccgggccgttcgggcggacttccgcatcggcttgacgggcacgccgatcgagaacgccgcggtcgatctgtgggcgatcatggatcagctggcgccgggctcactcgacagcctccccgaattccgggcccgatacggcacgcctgacgcgaccaacatggcggagcttcatcgccgcgtgttcacgtccacgccgccggcacagcccctcgcactgcggcggatcaaggacgtggtcgcgcgcgacctgcccgagaaggcccggcgcctgcatccgcgagcgatgccggagcgtcaggccgcggcctacgaggacgcccaattcaagctggcgcagggcggcgcgggggctgcgttcaagatgctgcaccacatccgcaccgtgtcggttcaccccaatctcgacggggcagagacggattccgccttcctcgaggcatcggcgcggctcagcgccgtgttcgagatcctcggcgtaatcgccgaacggcgcgagcgcgcgctcgtcttcgtcgagcatcgccgcatgcagcaccgacttgtcgaactcgcccgggcgcgcttcaacctgccgcgcgtcgatctcatcaacggcgacacgccgatctcgcggcgccaagccatcgtcaaccgcttccaacgccatcttgaaggggagccggcgttcgatgtcctcgtcctcggcccgaaggcggcgggcacgggtctgacgctcaccgccgccacgcacgtcatccacctgtcgcgctggtggaaccccgcggtcgaggagcagtgcaacgatcgcgtccatcggctcggccagacccgacccgtcaccatccacgtgccgatggcgatccacgcgggctatcgggaaggctccttcgattgcctgctccacggcctgatgcaccgcaagcgcaggctggcggcctcggcgctatggccgatgggtgacacgcaggcggatgtcggcgaactcacgcgcctgctcgacagtgccgcgaagcgggagggcgcagaccccgtgcgcagcgcgatcgcggccatgttcgcgcgggacgggctggaagcccccgtctgggagcaggacggatcgatccgggtctcgtga

SEQ ID NO: 7938 - DNA, 1974 bp, Legionella pneumophila str. Lens
ttgacatccggtgacaataatttgttggcaccattatctttattaaaagagaatgaatattttatgattaatccagaatatatatttaccctaataacaaaagactcaacagtttatttcttcgtctcattcattttcgcaatcgctttaattccattttggcaagccacctatacaataggcaaagtaaatcgagctataaagaaagcaaatgaactaattaaatcattgggaaatgaatcaccttctaaattctataatgaatttgagaacataaaagctcaattgaatggcattgattatttgaaaaatatttggggagaattcattggtagcacttattatttaacaaataataatacacaacaaattaactccaataaaattttcctatcacatcgtccctcctattattttaataaagaatctgtgcttggatcacaattgaatctaaatcagtttttttccttccctaattatttgattggattaggcttagcttttacttttattggattagcagctgcattgcatatagcacaatcaggtctcgcaaatggcgaaggccaaacggcattaagtgagctacttaaagttgcttcagttaaatttttcagttctataacaggtatcggttgcagtttgattatatcttttatacaaaaaatacgtattaaaggatttcaaaataatttgaataatttctgtgggttgctagagaaatgtacagaatacaaacctgctgaaaaattgatctttgaaagtatacaggaagaaaaaactcacactttagcgttgcaaagtatggcaaatgatatctctatcggaattggagatgtcctaaataatcaacttcctgctagtgtagcaaatgccttggctccattagctgatgaaataagagctcttgctcaaaaattttctggaagcaacgaaaatgccctggagaaggtacttaatgaatttcttgatcaactacgtaaaagttctggtgatgagatgcaagggctcattgacggtgtaaatactctaaaagattcccttcttcgactagttgaaaatatggaaaccatgggtaaatcatttggttctaatacaaaagactctaccgaccggctaatggcctcccttgatgcatttacgtcgactttcacacctgtacaacaaggtattggaaaatttggacagtctcttgattctcttgaaaacatcgcaagaagtattcaacaggcaagtggcaacattactggtgccgctgatattagcaatcaaagcatgtctaaccttgcaggtacagttactcaaattaccgaaaacttaactccaattcaggatcttttgaatgtgattaatctttcattgaaaaaagttgatgaatcatcggaaaaccttcatggggcagggagaaccatagcatcagctgcagatgggtttaaaaattctgcagaatccattgagcaagcaagtaatagatttgatcaaaaaattaataaatttgaagttgtaatagatggaatctcaggaacagcaaatgttcttgaacgagcttcaaacaacgtgagtaatgccattaaaccactatctgaaacttcagaaggattaactaaagttattcatgcaattcaagaaaccgaatcaagaatacatggaagtcaaaaacaactctctgatttattaattaatcttgaaaacttcactgagaaactaccctctcttttatctcaatatgaagagcgcttcagcaaagtagatcaagatcttgcaaacgcctttggagagttagctaaaggaagcgacgaattcagaactagcataagtcaatttgtaatatcatttgatcaacaatttgacaaagcaatacgacaacttagcggtgttattcaagaccttcaagaagagcgagaaaacgctgaactaacaacaaacaattaccataaagcagagtatgtagatgcagacaccagaatcgcatga

SEQ ID NO: 7939 - DNA, 705 bp, Legionella pneumophila str. Lens
atgcagacaccagaatcgcatgatgaaagctatttcgcatcattcacggatatgcttgttggaattattttcatatttattattttgctaatgattgtggcaaataactttcaaagtgcaacaaaaaaagtgactgaaattaacgaatcaagagacaaaattctaaaagaaatagaacaatctcttaaacaagaaggtgtttcagttactattgatattgagcaaggagtccttcgtttaccagaaagtattctttttggtgttgaccaatatcaagttaatgaagaaggtaaaatagcgctttcaaagttagcatctgttcttgaaaaatacttaccctgtatggcagtaactgaagaaaaattcaaatctcaatgtgaatctttaaatctgactagccgtgatgggctggatgcagttttcattgaaggtcatactgattctacgggttcatccgaacacaattggtatttatcagctagaagagccatttcagtttttaatgagttaatcgacgccaaacctttacttaatgttggtcttaaaaatattaatggtatacccatattaaatgtgagcggatatgaagcaagaagaccaattgatcctaacaatttaagtgtgaacagacgaattgaacttagatttattatgcgatcccctactccgcaagacataaagagattgaaacatgccattggataa

SEQ ID NO: 7940 - DNA, 1449 bp, Legionella pneumophila str. Lens
atgccattggataatcttgcgaatacaaaagaacaattaaaacattttttcaaacttaacaaacttaatgtttctaagaatctactaaccttgcctacgattctacatacagtgaaagaactagaaaaaaaatttgcagttactgatcattcaccttcaatagttgagatcgagaaaatttattttcgatttgctcaagcaatagaaaataaagaattaacttctatatcgaatcgcgaatggaggatgtcaccatatattttttggtatcaaaatggtgaaagtaagccacttggaagtaactatgattttattagtcaatatattaattggttaaaacgtaactctacaccagggaattggagaaaattaattcatgtatttcttagagactacaatcaaagatcaaattataaattaatttttcagcaaatttcatgtgttatacgtgaagaattagatagttgtagcaaaaaaaataacctcataagatggacagaaagagatcgacaaattaatttattctctcgggatttctgtttgaataaagccatcgactcatttattcaggatgcgaattgtgattgggatgagttcgccattttaagtggtctgcatggagatctcggacaaactggttatgcagaatcaattggtaaagaactactaaacaaaattaataccctaccttccgaggaattgctaaacgcgacaataaattattattttaataatggccaaataagatttaatgatcatcgtgttaaattaattgaagctttactttctccatgggcaactaacgcatataaaattagtagtgaacttaaaaaaagagttcatgatattttaattgagaactttaaagatcctcgtattattgctcaccaaagaaatggctggcgctccgtaaatcaatcaagcctacaaattatgcttcgttggctcgttggagatagtatcgaacaattttttgatattgttgatcaaatggcacttgatcatcagtggaaatacagaaaagctttttggatggcatatttcgctcgaggatatcttgatgaagcttggttcgcacttggtccagacgctcagtattatgcagaaactcactttgggaataaattatctttcggcaaaattgttaaagaatgctcatcaaatcagagtgttctaattatcaaaattaaagacctggtttttgcagaatggagtcacaatggtaaatgtcgagcatggttaacaactgaccctagctgcccttctcattataaggataattattcaggctcaaacctcaaagccaaatcattaaaaatcgttccacattatcaaacagatggaattcaacaccaaggaagcgaaaactactcctggcaagaaaaattaaatgattttatttatcaacatactggaataaaggtataccattatgattttcggatttaa

SEQ ID NO: 7941 - DNA, 3387 bp, Legionella pneumophila str. Lens
atgattttcggatttaagcgtaaagccaagactactactaaattgctttgtcacgaacaacaacaggatggtatatatcaatttatatttcaattagaaagtaaaaacacaattgttcctattcaagaatggcgaaactcaaatcatccaggagcgatttggctgttagattatttacacgataatgatctcatacaaaaagattcgttggataatctaacaataagactatactcagaacaactaattgagatcttaaaaggccaagaatgttacctacaacatttactggagctacccccactgtttgatggaggattgcatattgaatgccaaggacttctagcaaaggatgattatactctaaattattcatggatagatggaaactctagaccgattacagtatccgaaagaagaggcatttttttaatatttggaaatagaaaatatcttctatcctattttgcttggaaatttgctgaagatatcgatgcaattcgagaaaagttacattcgtccaattccatgcatgctcgattagaaactcttgagaattttaaatcaataagatcattacttccggaagaagaaagtcggaaattttctgatgatggtagtatatcaaacatcaagctctactttgctaacgcattccgaatcgatgcaattccagaaggaaatagtttcaaaatccaacctgtccttctaaaaagacatgaaacacaaaatcaagattgtgtttttgaaaacattttaccacccgtagaacaacaacgatataatgatcaatttagtaatagcactaaattacaaccctattacaccctgggaccaggaaaatacattctaattaatgatcaacttaataaagcgctaagtaccgttcataaaattcagcattccaacgacactgaaaaattaaattttctaaaaaatcccaaagcagctcttgcagatagtctggaaggaatgatcagtgatgaggaattaaatctaattttttctgatagagtaacaggaatcggtgaatggaatgcaaaagtaataccatggattcaattaccaccgggtgaatggattccagatggtaaattcccaaatagtccatttgggattgatatagcaggaaaaaaaatacagtttgaaaccataactgatctttctgtaatacttgataaaattaaagaagccaaaaaatcaggggttctatttgtagatcatgaaggaatcaatatcccagttaacgatagatctatatccgcattagaaaaatttatacctcgacaacccctgaataatgaagataacaaacacaatcaagcaaattcaccagaccaagacaggatactacaaacgcctgtaatgcttgtaaaagaaaatcttgaatatgttgaatttcatgtagttcgcataccaagaaatcgctaccctcaatcaagcaaactacctgagacaatcagaacagaacccaaacaacaccaggtagaagcatataagtggttatgtgcacattataaagctggatcgaggggagtacttttagctgatgacatggggcttggtaaaacttttcaatctctaatgtttcttgaatggttacgagaaggaatgattaaagaggaaatttgtgataaacctcttttaatagttgcacccactggcctgcttaaaaattgggaagctgaagttcaaaagcacttattaaatggtcttggaaatattgccagagtttatggttctgatttgaaatctttaagaacaaataactcactaaatgttagcaagataaaaagtgctaatttagtacttacaacttacgacactttaacacgttatcagacaagctttggagtaattagtttttccactgttgtttttgacgaaatacaaaagttaaaaaaccctggcacacaaaactattcagccgcttgcagccttaattgtgatttctggctaggaatgactggtactcccgttgagaaccgtctgtgtgacttatggtcaattactgatgttcttcaacccggaatgttgggctcaataaaagaattcagcaataaatacgaaaaatgcattctagacattgatgaatatgaacagcaaaatatcttgaaagaactacaagatggattgactaaaggctcagaagcaaatcctccatttatgcttagacgaatgaagtcttctgttctaactggattaccgaaaaagaacgttcatattatccctgttgaaatgccacagaaacaagccagcacatatagccaaattttaaatcaagtaaaaaatatggaaagcaaaaatggagtaatgctgaaagcaattcatcaacttagagcatgttctttacacccagactataaacgtcaagatgaatacataaatgacaatgaatatatcggaggttctgcccgacttaaagcatgctttgaaattcttgacaaaatttatgctaaacgtgaaaaagtgcttatatttattgaatacaacgaatggcatcgtcatgattttttatgccaaatcattaaaactaaatataaattagatagattgcccatggctataaatggacaaataaactctaaaacaagacagcatatcgtagataaattccaggaggaacggggaaaatttgatgtaatgctattatcccctcgcgctggaggcgttggtattacccttacagcagcaaaccatattattcatttaactcgttggtggaatcctgcagttgaagatcaagctaacgatagaatttatcgcatcggccaagaatccgacgtacatatatattatcctttagcaatacacgcagaatatgaaaacagctgctttgattataatttacatcaacttcttgaaaaaaagcgtgaggtgagccaacaagtaattattgcaccaccaatggaacaagatgcaattgatcaattatttgcaaaaacatttaataaatcgcctcactcaaaaataagtataaacgagagttactatggatttgatggtaatagttatgaagaattcatacttgaaaaacttcaaaataaagctcccttgtttggatttcatgccaaagcaaccaaaaagagctgggataaaggggctgatataattattgaatcagataatggtaatattgtagcaatagtacaatgtaaacatgtcagttgctccactaaaacaccaccagatataccagaggatttggataaagcagtgaagcattacgtttcacaaaacaatccacctatattcaaaattggaataacaaatgcgagtaaactgaggaaatttgatactgattggttgaggtcatcatcatttaatcaaattttatatgcagatcaaggattaaggccggaattattgcttaaattattatcttaa

SEQ ID NO: 7942 - DNA, 1911 bp, Legionella pneumophila subsp. pneumophila
atgattaatccagaatatctatttaccctaataacaaaagactcaacagtttatttcttcgtctcattcattttcgcaatcgctttaattccattttggcaagccacctatacaataggcaaagtaaatcgagctataaagaaagcaaatgaactaattaaatcattgggaaatgaatcaccttctaaattctataatgaatttgagaacataaaagctcaattgaatggcattgattatttgaaaaatatttggggagaattcattggtagcacttattatttaacaaataataatactcaacaaattaactccaataaaattttcctatcacatcgtccctcctattattttaataaagaatctgtgcttggatcacaattgaatctaaatcagtttttttccttccctaattatttgattggcttaggcttagcttttacttttattggattagcagctgcattgcatatagcacaatcaggtctcgcaaatggcgaaggccaaacggcattaagtgagctacttaaagttgcttcagttaaatttttcagttctataacaggtatcggttgcagtttgattatatcttttatacaaaaaatacgtattaaaggatttcaaaataatttgaataatttctgtgggttgctagagaaatgtacagaatacaaacctgctgaaaaattgatctttgaaagtatacaggaagaaaaaactcacactttagcgttgcaaagtatggcaaatgatatctctatcggaattggagatgtcctaaataatcaacttcctgctagtgtagcaaatgccttagctccattggctgatgaaataagagctcttgctcaaaaattttctggaagcaacgaaaatgctctggagaaggtacttaatgaatttcttgatcaactacgtaaaagttctggtgatgagatgcaagggctcattgacggtgtaaatactctaaaagattcccttcttcgactagttgaaaatatggaaaccatgggtaaatcatttggatctaatacaaaagactctaccgaccggctgatggcctcccttgatgcatttacgtcgactttcacacctgtacaacaaggtattggaaaatttggacagtctcttgattctcttgaaaacatcgcaagaagtattcaacaggcaagtggcaacattactggtgccgctgatattagcaatcaaagcatgtctaaccttgcaggtacagttactcaaattaccgaaaacttaactccaattcaggatcttttgaatgtgattaatctttcattgaaaaaagttgatgaatcatcggaaaaccttcatggggcagggagaaccatagcatcagctgcagatgggtttaaaaattctgcagaatccattgagcaagcaagtaatagatttgatcaaaaaattaataaatttgaagttgtaatagatggaatctcaggaacagcaaacgttcttgaacgagcttcaaacaacgtgagtaatgccattaaaccactatctgaaacttcagaaggattaactaaagttattcatgcaattcaagaaaccgaatccagaatacatggaagtcaaaaacaactctctgatttattaattaatcttgaaaacttcactgagaaactaccttctctattatcccaatatgaagagcgcttcagcaaagtagatcaagatcttgcaaacgcctttggagagttagctaaaggaagcgacgaattcagaactagcataagtcaatttgtaatatcatttgatcaacaatttgacaaagcaatacgacaacttagcggtgttattcaagaccttcaagaagagcgagaaaacgctgaactaacagcaaacaattaccataaagcagagtatgtagatgcagacaccagaatcgcatga

SEQ ID NO: 7943 - DNA, 705 bp, Legionella pneumophila subsp. pneumophila
atgcagacaccagaatcgcatgatgaaagctatttcgcatcattcacggatatgcttgttggaattattttcatatttattattttgctaatgattgtggcaaataactttcaaagtgcaacaaaaaaagtgactgaaattaacgaatcaagagacaaaattctaaaagaaatagaacaatctcttaaacaagaaggtgtttcagttactattgatattgagcaaggagtccttcgtttaccagaaagtattctttttggtgttgaccaatatcaagttaatgaagaaggtaaaatagcgctttcaaagttagcatctgttcttgaaaaatacttaccctgtatggcagtaactgaagaaaaattcaaatctcaatgtgaatctttaaatctgactagtcgtgatgggctggatgcagttttcattgaaggtcatactgattctacgggttcatccgaacacaattggtatttatcagctagaagagccatttcagtttttaatgagttaatcgacgctaaacctttacttaatgttggtcttaaaaatattaatggtatacccatattaaatgtgagcggatatgaagcaagaagaccaattgatcctaacaatttaagtgtgaacagacgaattgaacttagatttattatgcgttcccctactccgcaagacataaagagattgaaacatgccattggataa

SEQ ID NO: 7944 - DNA, 1449 bp, Legionella pneumophila subsp. pneumophila
atgccattggataatcttgcgaatacaaaagaacaattaaaacattttttcaaacttaacaaacttaatgtttctaagaatctactaaccttgcctacgattctacatacagtgaaagagctagaaaaaaaatttgcagttactgatcattcaccttcaatagttgagatcgagaaaatttattttcgatttgctcaagcaatagaaaataaagaattaacttctatatcgaatcgcgaatggaggatgtcaccatatattttttggtatcaaaatggtgaaagtaagccacttggaagtaactatgattttattagtcaatatattaattggttaaaacgtaactctacaccagggaattggagaaaattaattcatgtatttcttagagactacaatcaaagatcaaattataaattaatttttcagcaaatttcatgtgttatacgtgaagaattagatagttgtagcaaaaaaaataacctcataagatggacagaaagagatagacaaattaatttattctctcgggatttctgtttgactaaagccatcgactcatttattcaggatgcgaattgtgattgggatgagttcgcccttttaagtggtctgcatggagatctcggacaaactggttatgcagaatcaattggtaaagaactactaaacaaaattaataccctaccttccgaggaattgctaaacgcgacaataaattattattttaataatggccaaataagatttaatgatcatcgtgttaaattaattgaagctttactttctccatgggcaactaacgcatataaaattagtagtgaacttaaaaaaagagttcatgatattttaattgagaactttaaagatcctcgtattattgcacaccaaagaaatggctggcgctccgtaaatcaatcaagcctacaaattatgcttcgttggctcgttggagatagtatcgaacaattttttgatattgttgatcaaatggcacttgatcatcagtggaaatacagaaaagctttttggatggcatatttcgctcgaggatatcttgatgaagcttggttcgcacttggtccagacgctcagtattatgcagaaactcacttcgggaataaattatctttcggcaaaattgttaaagaatgctcatcaaatcagagtgttctaattatcaaaattaaagacctggtttttgcagaatggagtcacaatggtaaatgtcgagcatggttaacaactgaccctagctgcccttctcattataaggataattattcaggctcaaacctcaaagccaaatcattaaaaatcgttccacattatcaaacagatggaattcaacaccaaggaagcgaaaactactcctggcaagaaaaattaaatgattttatttatcaacatactggaataaaggtataccattatgattttcggatttaa

SEQ ID NO: 7945 - DNA, 3387 bp, Legionella pneumophila subsp. pneumophila
atgattttcggatttaagcgtaaagccaagactactactaaattgctttgtcacgaacaactacaggatggtatatatcaatttatatttcaattagaaagtaaaaacacaattgttcctattcaagaatggcgaaactcaaatcatccaggagcgatttggctgttagattatttacatgataatgatctcatacaaaaagattcgttggataatctaacaataagactgtactcagaacaactaattgagatcttaaaaggccaagaatgttacctacaacatttattggagctacccccactgtttgatggaggattgcatattgaatgccaaggacttctagcaaaggatgattacactctaaattattcatggatagatggaaactctagaccgattacagtatccgaaagaagaggcatttttttaatatttggaaataaaaaatatcttctatcctattttgcttggaaatttgctgaagatatcgatgcaattcgagaaaagttacattcgtccaattccatgcatgctcgattagaaactcttgagaattttaaatcaataagatcattacttccggaagaagaaagtcggaaattttctgatgatggtagcatatcaaacatcaagctctactttgctaacgcattccgaatcgatgcaattccagaaggaaatagtttcaaaatccaacctgtccttctaaaaagacatgaaacacaaaatcaagattgtgtttttgaaaacattttaccacccgtagaacaacaacgatataatgatcaatttagtaatagcactaaattacaaccctattacaccctaggaccaggaaaatacattctaattaatgatcaacttaataaagcgctaagtaccgttcataaaattcagcattccaacgacactgaaaaattaaattttctaaaaaatcccaaagcagctcttgcagatagtctggaaggaatgatcagtgatgaggaattaaatctaattttttctgatagagtaacaggaatcggtgaatggaatgcaaaagtaataccatggattcaattaccgccgggtgaatggattccagatggtaaattcccaaatagtccatttgggattgatatagcaggaaaaaaaatacagtttgaaaccataactgatctttctgtaatacttgataaaattaaagaagccaaaaaatcaggggttctatttgtagatcatgaaggaatcaatatcccagttaacgatagatctatatccgcattagaaaaatttatacctcgacaacccctgaataatgaagataacaaacacaatcaagcaaattcaccagaccaagacaggatactacaaacgcctgtaatgcttgtaaaagaaaatcttgaatatgttgaatttcatgtagttcgcataccaagaaatcgctaccctcaatcaagcaaactacctgagacaatcagaacagaacccaaacaacaccaggtagaagcatataagtggttatgtgcacattataaagctggatcgaggggagtacttttagctgatgacatggggcttggtaaaacttttcaatctctaatgtttcttgaatggttacgagaaggaatgattaaagaggaaatttgtgataaacctcttttaatagttgctcccactggcctgcttaaaaattgggaagctgaagttcaaaagcacttattaaatggtcttggaaatattgccagagtttatggttctgatttgaaatctttaagaacaaataactcactaaatgttagcaagataaaaagtgctaatttagtacttacaacttacgacactttaactcgttatcagacaagctttggagtaattagtttttcaactgttgtttttgacgaaatacaaaagttaaaaaaccctggcacacaaaactattcagccgcttgcagccttaattgtgatttctggctaggaatgactggtactcccgttgagaaccgtctgtgtgacttatggtcaattactgatgttcttcaacccggaatgttgggctcaataaaagaattcagcaataaatacgaaaaatgcattctagacattgatgaatatgaacagcaaaatatcttgaaagaactacaagatggattgactaaaggctcagaagcaaatcctccatttatgcttagacgaatgaagtcttctgttctaactggattaccgaaaaagaacgttcatattctccctgttgaaatgccacagaaacaagccagcacatatagccaaattttaaatcaagtaaaaaatatggaaagcaaaaatggagtaatgctgaaagcaatacatcaacttagagcatgttctttacacccagactataaacgacaagatgaatacataaatgacaatgaatatatcggaggttctgcccgacttaaagcatgctttgaaattcttgacaaaatttatgctaaacgtgaaaaagcgctaatatttattgaatacaacgaatggcatcgtcatgattttttatgccaaatcattaaaaccaaatataaattagatagattgcccatggctataaatggacaaataaactctaaaacaagacagaatatcgtagataaattccaggaggaacggggaaaatttgatgtaatgctattatcccctcgcgctggaggcgttggcattacccttacagcagcaaaccatattattcatttaactcgttggtggaatcctgcagttgaagatcaagctaacgatagaatttatcgcatcggccaagaatccgacgtacatatatattatcctttagcaatacacgcagaatatgaaaacagctgctttgattataatttacatcaacttcttgaaaaaaagcgtgagatgagccaacaagtaattattgcaccaccaatggaacaagatgcaattgatcaattatttgcaaaaacatttaataaatcgccttactcaaaaataagtataaacgagagttactatggatttgatggtaatagttatgaagaattcatacttgaaaaacttcaaaataaagctcccttgtttggatttcatgccaaagcaaccaaaaagagctgggataaaggggctgatataattattgaatcagataatggtaatattgtagcaatagtacaatgtaaacatgtcagttgctccactaaaacaccaccagatataccagaggatttggataaagcagtgaagcattacgtttcacaaaacaatccacctatattcaaaattggaataacaaatgcgagtaaactgaggaaatttgatactgattggttgaggtcatcatcatttaatcaaattttatatgcagatcaaggactaaggccggaactattgcttaaattattatcttaa

SEQ ID NO: 7946 - DNA, 1911 bp, Legionella pneumophila; identical to SEQ ID NO: 7942

SEQ ID NO: 7947 - DNA, 705 bp, Legionella pneumophila; identical to SEQ ID NO: 7943

SEQ ID NO: 7948 - DNA, 1449 bp, Legionella pneumophila; identical to SEQ ID NO: 7944

SEQ ID NO: 7949 - DNA, 3387 bp, Legionella pneumophila; identical to SEQ ID NO: 7945

SEQ ID NO: 7950 - DNA, 1911 bp, Legionella pneumophila; identical to SEQ ID NO: 7942

SEQ ID NO: 7951 - DNA, 705 bp, Legionella pneumophila; identical to SEQ ID NO: 7943

SEQ ID NO: 7952 - DNA, 1449 bp, Legionella pneumophila; identical to SEQ ID NO: 7944

SEQ ID NO: 7953 - DNA, 3387 bp, Legionella pneumophila; identical to SEQ ID NO: 7945

SEQ ID NO: 7954 - DNA, 1911 bp, Legionella pneumophila; identical to SEQ ID NO: 7942

SEQ ID NO: 7955 - DNA, 705 bp, Legionella pneumophila; identical to SEQ ID NO: 7943

SEQ ID NO: 7956 - DNA, 1449 bp, Legionella pneumophila; identical to SEQ ID NO: 7944

SEQ ID NO: 7957 - DNA, 3387 bp, Legionella pneumophila; identical to SEQ ID NO: 7945

SEQ ID NO: 7958 - DNA, 1911 bp, Legionella pneumophila; identical to SEQ ID NO: 7942

SEQ ID NO: 7959 - DNA, 705 bp, Legionella pneumophila; identical to SEQ ID NO: 7943

SEQ ID NO: 7960 - DNA, 1449 bp, Legionella pneumophila; identical to SEQ ID NO: 7944

SEQ ID NO: 7961 - DNA, 3387 bp, Legionella pneumophila; identical to SEQ ID NO: 7945

SEQ ID NO: 7962 - DNA, 1911 bp, Legionella pneumophila; identical to SEQ ID NO: 7942

SEQ ID NO: 7963 - DNA, 705 bp, Legionella pneumophila; identical to SEQ ID NO: 7943

SEQ ID NO: 7964 - DNA, 1449 bp, Legionella pneumophila; identical to SEQ ID NO: 7944

SEQ ID NO: 7965 - DNA, 3387 bp, Legionella pneumophila; identical to SEQ ID NO: 7945

SEQ ID NO: 7966 - DNA, 1911 bp, Legionella pneumophila; identical to SEQ ID NO: 7942

SEQ ID NO: 7967 - DNA, 705 bp, Legionella pneumophila; identical to SEQ ID NO: 7943

SEQ ID NO: 7968 - DNA, 1449 bp, Legionella pneumophila; identical to SEQ ID NO: 7944

SEQ ID NO: 7969 - DNA, 3387 bp, Legionella pneumophila; identical to SEQ ID NO: 7945

SEQ ID NO: 7970 - DNA, 1911 bp, Legionella pneumophila; identical to SEQ ID NO: 7942

SEQ ID NO: 7971 - DNA, 705 bp, Legionella pneumophila; identical to SEQ ID NO: 7943

SEQ ID NO: 7972 - DNA, 1449 bp, Legionella pneumophila; identical to SEQ ID NO: 7944

SEQ ID NO: 7973 - DNA, 3387 bp, Legionella pneumophila; identical to SEQ ID NO: 7945

SEQ ID NO: 7974 - DNA, 1911 bp, Legionella pneumophila; identical to SEQ ID NO: 7942

SEQ ID NO: 7975 - DNA, 705 bp, Legionella pneumophila; identical to SEQ ID NO: 7943

SEQ ID NO: 7976 - DNA, 1449 bp, Legionella pneumophila; identical to SEQ ID NO: 7944

SEQ ID NO: 7977 - DNA, 3387 bp, Legionella pneumophila; identical to SEQ ID NO: 7945

SEQ ID NO: 7978 - DNA, 1911 bp, Legionella pneumophila; identical to SEQ ID NO: 7942

SEQ ID NO: 7979 - DNA, 705 bp, Legionella pneumophila; identical to SEQ ID NO: 7943

SEQ ID NO: 7980 - DNA, 1449 bp, Legionella pneumophila; identical to SEQ ID NO: 7944

SEQ ID NO: 7981 - DNA, 3387 bp, Legionella pneumophila; identical to SEQ ID NO: 7945

SEQ ID NO: 7982 - DNA, 1911 bp, Legionella pneumophila; identical to SEQ ID NO: 7942

SEQ ID NO: 7983 - DNA, 705 bp, Legionella pneumophila; identical to SEQ ID NO: 7943

SEQ ID NO: 7984 - DNA, 1449 bp, Legionella pneumophila; identical to SEQ ID NO: 7944

SEQ ID NO: 7985 - DNA, 3387 bp, Legionella pneumophila; identical to SEQ ID NO: 7945

SEQ ID NO: 7986 - DNA, 1911 bp, Legionella pneumophila; identical to SEQ ID NO: 7942

SEQ ID NO: 7987 - DNA, 705 bp, Legionella pneumophila; identical to SEQ ID NO: 7943

SEQ ID NO: 7988 - DNA, 1449 bp, Legionella pneumophila; identical to SEQ ID NO: 7944

SEQ ID NO: 7989 - DNA, 3387 bp, Legionella pneumophila; identical to SEQ ID NO: 7945

SEQ ID NO: 7990 - DNA, 1911 bp, Legionella pneumophila; identical to SEQ ID NO: 7942

SEQ ID NO: 7991 - DNA, 705 bp, Legionella pneumophila; identical to SEQ ID NO: 7943

SEQ ID NO: 7992 - DNA, 1449 bp, Legionella pneumophila; identical to SEQ ID NO: 7944

SEQ ID NO: 7993 - DNA, 3387 bp, Legionella pneumophila; identical to SEQ ID NO: 7945

SEQ ID NO: 7994 - DNA, 1911 bp, Legionella pneumophila; identical to SEQ ID NO: 7942

SEQ ID NO: 7995 - DNA, 705 bp, Legionella pneumophila; identical to SEQ ID NO: 7943

SEQ ID NO: 7996 - DNA, 1449 bp, Legionella pneumophila; identical to SEQ ID NO: 7944

SEQ ID NO: 7997 - DNA, 3387 bp, Legionella pneumophila; identical to SEQ ID NO: 7945

SEQ ID NO: 7998 - DNA, 1911 bp, Legionella pneumophila; identical to SEQ ID NO: 7942

SEQ ID NO: 7999 - DNA, 705 bp, Legionella pneumophila; identical to SEQ ID NO: 7943

SEQ ID NO: 8000 - DNA, 1449 bp, Legionella pneumophila; identical to SEQ ID NO: 7944

SEQ ID NO: 8001 - DNA, 3387 bp, Legionella pneumophila; identical to SEQ ID NO: 7945

SEQ ID NO: 8002 - DNA, 1911 bp, Legionella pneumophila; identical to SEQ ID NO: 7942

SEQ ID NO: 8003 - DNA, 705 bp, Legionella pneumophila; identical to SEQ ID NO: 7943

SEQ ID NO: 8004 - DNA, 1449 bp, Legionella pneumophila; identical to SEQ ID NO: 7944

SEQ ID NO: 8005 - DNA, 3387 bp, Legionella pneumophila; identical to SEQ ID NO: 7945

SEQ ID NO: 8006 - DNA, 1911 bp, Legionella pneumophila; identical to SEQ ID NO: 7942

SEQ ID NO: 8007 - DNA, 705 bp, Legionella pneumophila; identical to SEQ ID NO: 7943

SEQ ID NO: 8008 - DNA, 1449 bp, Legionella pneumophila; identical to SEQ ID NO: 7944

SEQ ID NO: 8009 - DNA, 3387 bp, Legionella pneumophila; identical to SEQ ID NO: 7945

SEQ ID NO: 8010 - DNA, 1911 bp, Legionella pneumophila; identical to SEQ ID NO: 7942

SEQ ID NO: 8011 - DNA, 705 bp, Legionella pneumophila; identical to SEQ ID NO: 7943

SEQ ID NO: 8012 - DNA, 1449 bp, Legionella pneumophila; identical to SEQ ID NO: 7944

SEQ ID NO: 8013 - DNA, 3387 bp, Legionella pneumophila; identical to SEQ ID NO: 7945

SEQ ID NO: 8014 - DNA, 1911 bp, Legionella pneumophila; identical to SEQ ID NO: 7942

SEQ ID NO: 8015 - DNA, 705 bp, Legionella pneumophila; identical to SEQ ID NO: 7943

SEQ ID NO: 8016 - DNA, 1449 bp, Legionella pneumophila; identical to SEQ ID NO: 7944

SEQ ID NO: 8017 - DNA, 3387 bp, Legionella pneumophila; identical to SEQ ID NO: 7945

SEQ ID NO: 8018 - DNA, 1911 bp, Legionella pneumophila
atgattaatccagaatatctatttaccctaataacaaaagactcaacagtttatttcttcgtcgcattcattttcgcaatcgctttaattccattttggcaagccatttatacaattggcaaagtaaatcgagctataaagaaagcaaatgaactaattaaatcattgggaaatgaatcaccgctcaaattctataatgaatttgagaacataaaaactcaattgaatggcattgattatttgaagaatatttggggagaattcattggtagcacttattatttaacaagtaataatactcaacaaattaactccaataaaatattcctttcgcatcgaccttcctattattttaataaagactctgtgcttggctcacgattgaatctaaatcagtttttttcgttccctaattatttgattggcttaggcttagcttttacttttattggattagcagctgcattgcatatagcacaatcaggcctcgcaaatggcgaaggccaaacagcattaagtgaactacttaaagttgcttcggtcaaattcttcagttctataacaggtatcggttgcagtttgattatatctttcatacaaaaaatacgtattaaaggatttcaaaataatttgaataatttctgcgagttgctagagaaatgtacagaatacaaacctgctgagaaattgatctttgagagtatacaggaagaaaaaactcacactttagcattgcaaagtatggcaaatgatatatctatcggaattggagatgtcctaaataatcaacttcctgccagtgtagcaaatgccttagctccattggctgatgaaataagatctcttgctcaaaaattttctggaagcaacgaaaatgcactagagaaggtacttaatgaatttcttgatcaactacgtaaaagttctggtgatgagatgcaagggctaattgacggtgtaaatactctaaaagattcccttcttcgactagttgaaaatatggaaactatgagtaaatcatttggatctaatacaaaggactctaccgaccgactaatggcctctcttgatgcatttacgtcgactttcacacctgtacaacaaggtattggaaaatttggacagtctcttgattctcttgaaaacatcgcaagaagtattcaacaggcaagtggcaacattactggtgccgcagatattagcaatcaaagcatgtctaacctcgcaggtacagtcactcaaattactgaaaacttaactccaattcatgatctattgaatgtgattaatctttcattgaaaaaagtggatgaatcatcggaaaaccttcatggggctgggagaaccatagcatcagctgcagatgggtttaaaaactctgcggaatctattgagcaagcaagtaatagatttgaccagaaaattaataaatttgaagttgtaatagatgggatctcaggaacagcaaatattcttgaacgagcttcaaacaacgtgagtaatgccgttaaaccactatctgatacttcagaaggattaactaaagttattcatgcaattcaagaaaccgaatccagaatacatggaagtcaaaaacaactctctgatttattaattaatcttgaaaacttcactgagaaactaccctctctattatctcaatatgaagagcgcttcagcaaagtagatcaagatcttgcaaacgcctttggagagttagctaaaggaagcgacgaattcagaactagcataagtcaatttgtaatatcatttgatcaacaatttgacaaagcaatacgacaacttagcggagttattcaagacttacaagaagagcgagaaaacgctgaactaacaacaaacaattaccataaagcagagtatgtagatgcagacaccagaatcgcatga

SEQ ID NO: 8019 - DNA, 705 bp, Legionella pneumophila
atgcagacaccagaatcgcatgatgaaagctattttgcatcattcacggatatgcttgttggaattattttcatatttattattttgctaatgattgtggcaaataactttcaaagtgccacaaaaaaagtgactgaaattaacgaatcaagagacaaaattctaaaagaaatagaacaatctcttaaacaagaaggtgtttcagttactattgatattgagcaaggagtccttcgtttaccagaaagtattctttttggtgttgatcaatatcaagttaatgaagaaggtaaaatagcgctttcaaagttagcatctgttcttgaaaaatacttaccctgtatggcagtaactgaagaaaaattcaaatctcaatgtgactctttaaatctgacaagtcgtgatgggctggatgcagttttcattgaaggacatactgattctacgggttcatccgaacacaattggtatttatcagccagaagagccatttcagtatttaatgaattaattgaagctaaaccattactgaacgtaggtcttaaaaatattaatggtataccgatcttaaatgtgagtgggtatgaagctagaagaccaattgatcctaataatttaagtgtaaaccgacgaattgaacttagatttattatgcgatcccctactccgcaagacataaagagattgaaacatgccattggataa

SEQ ID NO: 8020 - DNA, 1449 bp, Legionella pneumophila
atgccattggataatcttgcgaatacaaaagaacaattaaagcattttttcaaacttaacaaacttaatgtttctaagaatctactaaccttgcctacgattctacatacagtgaaagagctagaaaaaaaatttgcacttactgatcattcaccttcaatagttgaaattgagaaaatttattttcgatttgctcaagcaatagaaaataaagaattaacttctatatcgaatcgtgaatggaggatgtcaccatatattttttggtatcaaagtggtgaaagtaagccaattggaagtaactatgaatttattggtcaatatattcattggttaaaaaacaactccactccagggaattggagaaaactaattcatgtatttctcagagattataatcaaagatcaaattataaattaatttttcagcaaattgcttgtgttatacgtgaaggattagaaaattgtagcaaaaaaaataacctactaagatggattgaaagagatcgacaaattaatttattctctcgggatttctgtttgaataaagctatcgactcatttattcaagatgcgaattgtgattgggatgagttcgcccttttaagtggtctgcatggagatctcggacaaactggttatgcagaatcaattggtaaagaactactaaacaaaattaataccctaccttccgaggaattgctaaacgcgacaataaattattattttaataatggccaaataagatttaatgatcatcgtgttaaattaattgaagctttactttctccatgggctactaatacatataaaattagtagtgaacttaaaaaaagagttcatgatattttaatcgagaactttaaagatcctcgtattattgcacaccaaagaaatggttggcgctccgtaaatcaatcaagcctacaaattatgcttcgttggcttgttggagatagtatcgaacaattttttgatattgttgatcaaatggcacttgatcatcagtggaaatacagaaaagctttttggatggcatatttcgcacgaggatatcttgatgaagcttggttcgcacttggtccagacgctcaatattatgcagaaactcacttcggaaataaattatctttcggcaaaattgttaaagaatgctcatcaaatcagagtgttctaattatcaaaattaaagacctggtttttgcagaatggagtcacaatggtaaatgtcgagcatggttaacaactgaccctagctgcccttctcattataaggataattattcaggctcaaacctcaaagccaaatcattaaaaatcgttccacattatcaaacagatggaattcaacaccaaggaagcgaaaactactcctggcaagaaaaattaaatgattttatttatcaacatactggaataaaggtataccattatgattttcggatttaa

SEQ ID NO: 8021 - DNA, 3390 bp, Legionella pneumophila
atgattttcggatttaagcgtaaagccaagactactactaaattgctttgtcacgaacaactacaggatggtatatatcaatttatatttcaattagaaagtaaaaaaacaattgttcctattcaagaatggcgaaactcaaatcatccaggagcgatttggctgttggattatttacatgataatgatctcatacaaaaagattcgttggataatttaacaataagactgcactcagagcaactaattgagatcttaaaaggccaagaatcttacctacaacatttactagagctacccccactgtttgatggaggattacatattgaatgccaaggactactagccaaggatgattatacactaaactattcatggatagatggaaactctaggccgattacactatccgacagaagaggcatttttttaatatttggaaataaaaaatatcttctctcctatgttgcttggaaatttgctgaggatatcgatgcaattcgagaaaggttacattcgtcaaactccatgcacgatcgattacagattcttgagaggtttaattcaatacgagaattacttccagaagaagaaagtcagaaatattctgatgatggaagcatatcaaacatcaagctatactttgctaacgcattccgaatcgatgcaattccagaaggaaatagtttcaaaatccaacccgtccttctaaaaagacatgaaacacaaaatcaagattgtgtttttgaaaacattttaccacctgtagaacaacaacgatataatgatcaatttagtaatagtactaaattacaaccctattacaccctgggaccaggaaaatacattctaattaatgatcaacttaataaagcgctaagtaccattcataaaattcagcattccaacgataatgaaaaattaaattttctaaaaaatcccaaagctactcttgcagatagtctggaaggaatgatcagtgatgatgaattaaatctgattttttctgatagagtaacaggaatcggtgattggaatgcaaaggtcataccatggattcaattaccaccgggtgaatggattccagatggtaaattcccaaatagtccatttgggattgatatagcaggaaaaaaaatacagtttgaaaccataaatgatctttctgtaatacttgataagattaaggaagccaaaaaatcaggggttctatttgtagatcatgaaggaatcaatattcctgttaacgatagctctatatctgcattagaaaaatttatacctcgacaacccttgaataatgaagataacagccataatcaatctaattcaccagaccaagacaggatactacaaacacctgtaatgcttgtaaaagaaaatcttgaatatgttgaatttcatgtagttcgtataccaagaaaacgctaccctcaatcaatcaaactacccgagacaattagaacagaacccaaacaacaccagatagaagcatataagtggttatgtgcacattataaagcaggatctaggggagtacttttagctgatgacatggggcttggtaaaacttttcaatctctaatgtttcttgaatggctacgagaaggaatgattaaagaagaaatttgtgataaacctcttttaataattgcgccaactggattgcttaaaaactgggaggccgaagttcacaagcacttattaaatggtcttggaaatattgccagagtttatggttctgatttgaaatatttaagaacaaataaatcactaaatgttaacaaaataaaaagcgcaaatttagtacttacaacttacgatactttaacacgttatcagaccagttttggagtaattagtttttcagctgttgtctttgacgaaatacagaagttaaaaaaccctggcacgcaaaactattcagctgcttgtagtcttaattgtgatttctggctagggatgacaggaactcccgttgaaaaccgtctatgtgacctctggtcaatcacggatgttcttcaacctggtatgttgggttcaataaaagaattcagtaataaatacgaaaaatgcattctagacattgatgaatatgaacagcaaaatatcttgaaagaactacaagatggattgactaaaggctcagaagcaaatcctccatttatgcttagacgaatgaagtcttctgttctaactggattaccgaaaaagaacgttcatattatccctgttgaaatgccacagaaacaagccagcacatatagccaaatcttaaatcaagtaaaaaatatggaaagcaaaaatggagtaatgctgaaagcaatacatcaacttagagcatgttctttacacccagactataaacgtcaaaatgaatacataaatgacaatgaatatatcggaggttctgcccgacttaaagcatgctttgaaattcttgacaaaatttatgctaaacgcgaaaaagcgttaatatttattgaatacaacgaatggcatcgtcatgattttttatgccaaatcattaaaaccaaatataaattagatagcttacccatggctataaatggacaaataaattccaaaacaagacagaatatcgtagataaattccaagaggaacggggaaaatttgatgtaatgctactatcccctcgtgctggaggagttggtattacccttacagcagcaaaccatattattcatttaactcgttggtggaatcctgcagttgaagatcaagctaacgatagaatttatcgcatcggccaagaatccgacgtacatatatattatcctttagcaatacacgcagaatatgaaaacagctgctttgattataatttacatcaacttcttgaaaaaaagcgtgagttgagccaacaagtaattattgcaccaccaatggaacaagatgcaattgatcaattatttgcaaaaacatttaataaatcgcctcactcaaaaataagtataaacgagagttactatggatttgatggtaatagttatgaagaattcatacttgaaaaacttcaaaataaagctcccttgtttggatttcatgccaaagcaaccaaaaagagctgggataaaggggctgatataattattgaatcagataatggtaatattgtagcaatagtacaatgtaaacatgtcagttgctccactaaaacaccaccagatataccagaagatttggataaagcagtgaagcattatgtttcacaaaacaatccacctatattcaaaattggaataacaaatgccagtaaactgaggaaatttgatatggattggttgaggtcgtcatcatttaatcaaattttatatgcagatcaagggttaaacccagaattgttgtttaaattgtttccgtattaa

SEQ ID NO: 8022 - DNA, 1911 bp, Legionella pneumophila; identical to SEQ ID NO: 7942

SEQ ID NO: 8023 - DNA, 705 bp, Legionella pneumophila; identical to SEQ ID NO: 7943

SEQ ID NO: 8024 - DNA, 1449 bp, Legionella pneumophila; identical to SEQ ID NO: 7944

SEQ ID NO: 8025 - DNA, 3387 bp, Legionella pneumophila; identical to SEQ ID NO: 7945

SEQ ID NO: 8026 - DNA, 1911 bp, Legionella pneumophila; identical to SEQ ID NO: 7942

SEQ ID NO: 8027 - DNA, 705 bp, Legionella pneumophila; identical to SEQ ID NO: 7943

SEQ ID NO: 8028 - DNA, 1449 bp, Legionella pneumophila; identical to SEQ ID NO: 7944

SEQ ID NO: 8029 - DNA, 3387 bp, Legionella pneumophila; identical to SEQ ID NO: 7945

SEQ ID NO: 8030 - DNA, 1911 bp, Legionella pneumophila; identical to SEQ ID NO: 7942

SEQ ID NO: 8031 - DNA, 705 bp, Legionella pneumophila; identical to SEQ ID NO: 7943

SEQ ID NO: 8032 - DNA, 1449 bp, Legionella pneumophila; identical to SEQ ID NO: 7944

SEQ ID NO: 8033 - DNA, 3387 bp, Legionella pneumophila; identical to SEQ ID NO: 7945

SEQ ID NO: 8034 - DNA, 1911 bp, Legionella pneumophila; identical to SEQ ID NO: 7942

SEQ ID NO: 8035 - DNA, 705 bp, Legionella pneumophila; identical to SEQ ID NO: 7943

SEQ ID NO: 8036 - DNA, 1449 bp, Legionella pneumophila; identical to SEQ ID NO: 7944

SEQ ID NO: 8037 - DNA, 3387 bp, Legionella pneumophila; identical to SEQ ID NO: 7945

SEQ ID NO: 8038 - DNA, 1911 bp, Legionella pneumophila; identical to SEQ ID NO: 7942

SEQ ID NO: 8039 - DNA, 705 bp, Legionella pneumophila; identical to SEQ ID NO: 7943

SEQ ID NO: 8040 - DNA, 1449 bp, Legionella pneumophila; identical to SEQ ID NO: 7944

SEQ ID NO: 8041 - DNA, 3387 bp, Legionella pneumophila; identical to SEQ ID NO: 7945

SEQ ID NO: 8042 - DNA, 1911 bp, Legionella pneumophila; identical to SEQ ID NO: 7942

SEQ ID NO: 8043 - DNA, 705 bp, Legionella pneumophila; identical to SEQ ID NO: 7943

SEQ ID NO: 8044 - DNA, 1449 bp, Legionella pneumophila; identical to SEQ ID NO: 7944

SEQ ID NO: 8045 - DNA, 3387 bp, Legionella pneumophila; identical to SEQ ID NO: 7945

SEQ ID NO: 8046 - DNA, 1911 bp, Legionella pneumophila; identical to SEQ ID NO: 7942

SEQ ID NO: 8047 - DNA, 705 bp, Legionella pneumophila; identical to SEQ ID NO: 7943

SEQ ID NO: 8048 - DNA, 1449 bp, Legionella pneumophila; identical to SEQ ID NO: 7944

SEQ ID NO: 8049 - DNA, 3387 bp, Legionella pneumophila; identical to SEQ ID NO: 7945

SEQ ID NO: 8050 - DNA, 1911 bp, Legionella pneumophila; identical to SEQ ID NO: 7942

SEQ ID NO: 8051 - DNA, 705 bp, Legionella pneumophila; identical to SEQ ID NO: 7943

SEQ ID NO: 8052 - DNA, 1449 bp, Legionella pneumophila; identical to SEQ ID NO: 7944

SEQ ID NO: 8053 - DNA, 3387 bp, Legionella pneumophila; identical to SEQ ID NO: 7945

SEQ ID NO: 8054 - DNA, 1911 bp, Legionella pneumophila; identical to SEQ ID NO: 7942

SEQ ID NO: 8055 - DNA, 705 bp, Legionella pneumophila; identical to SEQ ID NO: 7943

SEQ ID NO: 8056 - DNA, 1449 bp, Legionella pneumophila; identical to SEQ ID NO: 7944

SEQ ID NO: 8057 - DNA, 3387 bp, Legionella pneumophila; identical to SEQ ID NO: 7945

SEQ ID NO: 8058 - DNA, 1911 bp, Legionella pneumophila; identical to SEQ ID NO: 7942

SEQ ID NO: 8059 - DNA, 705 bp, Legionella pneumophila; identical to SEQ ID NO: 7943

SEQ ID NO: 8060 - DNA, 1449 bp, Legionella pneumophila; identical to SEQ ID NO: 7944

SEQ ID NO: 8061 - DNA, 3387 bp, Legionella pneumophila; identical to SEQ ID NO: 7945

SEQ ID NO: 8062 - DNA, 1911 bp, Legionella pneumophila; identical to SEQ ID NO: 7942

SEQ ID NO: 8063 - DNA, 705 bp, Legionella pneumophila; identical to SEQ ID NO: 7943

SEQ ID NO: 8064 - DNA, 1449 bp, Legionella pneumophila; identical to SEQ ID NO: 7944

SEQ ID NO: 8065 - DNA, 3387 bp, Legionella pneumophila; identical to SEQ ID NO: 7945

SEQ ID NO: 8066 - DNA, 1911 bp, Legionella pneumophila; identical to SEQ ID NO: 7942

SEQ ID NO: 8067 - DNA, 705 bp, Legionella pneumophila; identical to SEQ ID NO: 7943

SEQ ID NO: 8068 - DNA, 1449 bp, Legionella pneumophila; identical to SEQ ID NO: 7944

SEQ ID NO: 8069 - DNA, 3387 bp, Legionella pneumophila; identical to SEQ ID NO: 7945

SEQ ID NO: 8070 - DNA, 1911 bp, Legionella pneumophila; identical to SEQ ID NO: 7942

SEQ ID NO: 8071 - DNA, 705 bp, Legionella pneumophila; identical to SEQ ID NO: 7943

SEQ ID NO: 8072 - DNA, 1449 bp, Legionella pneumophila; identical to SEQ ID NO: 7944

SEQ ID NO: 8073 - DNA, 3387 bp, Legionella pneumophila; identical to SEQ ID NO: 7945

SEQ ID NO: 8074 - DNA, 1911 bp, Legionella pneumophila; identical to SEQ ID NO: 7942

SEQ ID NO: 8075 - DNA, 705 bp, Legionella pneumophila; identical to SEQ ID NO: 7943

SEQ ID NO: 8076 - DNA, 1449 bp, Legionella pneumophila; identical to SEQ ID NO: 7944

SEQ ID NO: 8077 - DNA, 3387 bp, Legionella pneumophila; identical to SEQ ID NO: 7945

SEQ ID NO: 8078 - DNA, 1911 bp, Legionella pneumophila; identical to SEQ ID NO: 7942

SEQ ID NO: 8079 - DNA, 705 bp, Legionella pneumophila; identical to SEQ ID NO: 7943

SEQ ID NO: 8080 - DNA, 1449 bp, Legionella pneumophila; identical to SEQ ID NO: 7944

SEQ ID NO: 8081 - DNA, 3387 bp, Legionella pneumophila; identical to SEQ ID NO: 7945

SEQ ID NO: 8082 - DNA, 1911 bp, Legionella pneumophila; identical to SEQ ID NO: 7942

SEQ ID NO: 8083 - DNA, 705 bp, Legionella pneumophila; identical to SEQ ID NO: 7943

SEQ ID NO: 8084 - DNA, 1449 bp, Legionella pneumophila; identical to SEQ ID NO: 7944

SEQ ID NO: 8085 - DNA, 3387 bp, Legionella pneumophila; identical to SEQ ID NO: 7945

SEQ ID NO: 8086 - DNA, 1911 bp, Legionella pneumophila; identical to SEQ ID NO: 7942

SEQ ID NO: 8087 - DNA, 705 bp, Legionella pneumophila; identical to SEQ ID NO: 7943

SEQ ID NO: 8088 - DNA, 1449 bp, Legionella pneumophila; identical to SEQ ID NO: 7944

SEQ ID NO: 8089 - DNA, 3387 bp, Legionella pneumophila; identical to SEQ ID NO: 7945

SEQ ID NO: 8090 - DNA, 1911 bp, Legionella pneumophila; identical to SEQ ID NO: 7942

SEQ ID NO: 8091 - DNA, 705 bp, Legionella pneumophila; identical to SEQ ID NO: 7943

SEQ ID NO: 8092 - DNA, 1449 bp, Legionella pneumophila; identical to SEQ ID NO: 7944

SEQ ID NO: 8093 - DNA, 3387 bp, Legionella pneumophila; identical to SEQ ID NO: 7945

SEQ ID NO: 8094 - DNA, 1911 bp, Legionella pneumophila; identical to SEQ ID NO: 7942

SEQ ID NO: 8095 - DNA, 705 bp, Legionella pneumophila; identical to SEQ ID NO: 7943

SEQ ID NO: 8096 - DNA, 1449 bp, Legionella pneumophila; identical to SEQ ID NO: 7944

SEQ ID NO: 8097 - DNA, 3387 bp, Legionella pneumophila; identical to SEQ ID NO: 7945

SEQ ID NO: 8098 - DNA, 1911 bp, Legionella pneumophila; identical to SEQ ID NO: 7942

SEQ ID NO: 8099 - DNA, 705 bp, Legionella pneumophila; identical to SEQ ID NO: 7943

SEQ ID NO: 8100 - DNA, 1449 bp, Legionella pneumophila; identical to SEQ ID NO: 7944

SEQ ID NO: 8101 - DNA, 3387 bp, Legionella pneumophila; identical to SEQ ID NO: 7945

SEQ ID NO: 8102 - DNA, 1911 bp, Legionella pneumophila; identical to SEQ ID NO: 7942

SEQ ID NO: 8103 - DNA, 705 bp, Legionella pneumophila; identical to SEQ ID NO: 7943

SEQ ID NO: 8104 - DNA, 1449 bp, Legionella pneumophila; identical to SEQ ID NO: 7944

SEQ ID NO: 8105 - DNA, 3387 bp, Legionella pneumophila; identical to SEQ ID NO: 7945

SEQ ID NO: 8106 - DNA, 1911 bp, Legionella pneumophila; identical to SEQ ID NO: 7942

SEQ ID NO: 8107 - DNA, 705 bp, Legionella pneumophila; identical to SEQ ID NO: 7943

SEQ ID NO: 8108 - DNA, 1449 bp, Legionella pneumophila; identical to SEQ ID NO: 7944

SEQ ID NO: 8109 - DNA, 3387 bp, Legionella pneumophila; identical to SEQ ID NO: 7945

SEQ ID NO: 8110 - DNA, 1911 bp, Legionella pneumophila; identical to SEQ ID NO: 7942

SEQ ID NO: 8111 - DNA, 705 bp, Legionella pneumophila; identical to SEQ ID NO: 7943

SEQ ID NO: 8112 - DNA, 1449 bp, Legionella pneumophila; identical to SEQ ID NO: 7944

SEQ ID NO: 8113 - DNA, 3387 bp, Legionella pneumophila; identical to SEQ ID NO: 7945

SEQ ID NO: 8114 - DNA, 1911 bp, Legionella pneumophila; identical to SEQ ID NO: 7942

SEQ ID NO: 8115 - DNA, 705 bp, Legionella pneumophila; identical to SEQ ID NO: 7943

SEQ ID NO: 8116 - DNA, 1449 bp, Legionella pneumophila; identical to SEQ ID NO: 7944

SEQ ID NO: 8117 - DNA, 3387 bp, Legionella pneumophila; identical to SEQ ID NO: 7945

SEQ ID NO: 8118 - DNA, 1911 bp, Legionella pneumophila; identical to SEQ ID NO: 7942

SEQ ID NO: 8119 - DNA, 705 bp, Legionella pneumophila; identical to SEQ ID NO: 7943

SEQ ID NO: 8120 - DNA, 1449 bp, Legionella pneumophila; identical to SEQ ID NO: 7944

SEQ ID NO: 8121 - DNA, 3387 bp, Legionella pneumophila; identical to SEQ ID NO: 7945

SEQ ID NO: 8122 - DNA, 1911 bp, Legionella pneumophila; identical to SEQ ID NO: 7942

SEQ ID NO: 8123 - DNA, 705 bp, Legionella pneumophila; identical to SEQ ID NO: 7943

SEQ ID NO: 8124 - DNA, 1449 bp, Legionella pneumophila; identical to SEQ ID NO: 7944

SEQ ID NO: 8125 - DNA, 3387 bp, Legionella pneumophila; identical to SEQ ID NO: 7945

SEQ ID NO: 8126 - DNA, 1911 bp, Legionella pneumophila; identical to SEQ ID NO: 7942

SEQ ID NO: 8127 - DNA, 705 bp, Legionella pneumophila; identical to SEQ ID NO: 7943

SEQ ID NO: 8128 - DNA, 1449 bp, Legionella pneumophila; identical to SEQ ID NO: 7944

SEQ ID NO: 8129 - DNA, 3387 bp, Legionella pneumophila; identical to SEQ ID NO: 7945

SEQ ID NO: 8130 - DNA, 1911 bp, Legionella pneumophila; identical to SEQ ID NO: 7942

SEQ ID NO: 8131 - DNA, 705 bp, Legionella pneumophila; identical to SEQ ID NO: 7943

SEQ ID NO: 8132 - DNA, 1449 bp, Legionella pneumophila; identical to SEQ ID NO: 7944

SEQ ID NO: 8133 - DNA, 3387 bp, Legionella pneumophila; identical to SEQ ID NO: 7945

SEQ ID NO: 8134 - DNA, 1911 bp, Legionella pneumophila; identical to SEQ ID NO: 7942

SEQ ID NO: 8135 - DNA, 705 bp, Legionella pneumophila; identical to SEQ ID NO: 7943

SEQ ID NO: 8136 - DNA, 1449 bp, Legionella pneumophila; identical to SEQ ID NO: 7944

SEQ ID NO: 8137 - DNA, 3387 bp, Legionella pneumophila; identical to SEQ ID NO: 7945

SEQ ID NO: 8138 - DNA, 1911 bp, Legionella pneumophila; identical to SEQ ID NO: 7942

SEQ ID NO: 8139 - DNA, 705 bp, Legionella pneumophila; identical to SEQ ID NO: 7943

SEQ ID NO: 8140 - DNA, 1449 bp, Legionella pneumophila; identical to SEQ ID NO: 7944

SEQ ID NO: 8141 - DNA, 3387 bp, Legionella pneumophila; identical to SEQ ID NO: 7945

SEQ ID NO: 8142 - DNA, 1911 bp, Legionella pneumophila; identical to SEQ ID NO: 7942

SEQ ID NO: 8143 - DNA, 705 bp, Legionella pneumophila; identical to SEQ ID NO: 7943

SEQ ID NO: 8144 - DNA, 1449 bp, Legionella pneumophila; identical to SEQ ID NO: 7944

SEQ ID NO: 8145 - DNA, 3387 bp, Legionella pneumophila; identical to SEQ ID NO: 7945

SEQ ID NO: 8146 - DNA, 1911 bp, Legionella pneumophila; identical to SEQ ID NO: 7942

SEQ ID NO: 8147 - DNA, 705 bp, Legionella pneumophila; identical to SEQ ID NO: 7943

SEQ ID NO: 8148 - DNA, 1449 bp, Legionella pneumophila; identical to SEQ ID NO: 7944

SEQ ID NO: 8149 - DNA, 3387 bp, Legionella pneumophila; identical to SEQ ID NO: 7945

SEQ ID NO: 8150 - DNA, 1911 bp, Legionella pneumophila; identical to SEQ ID NO: 7942

SEQ ID NO: 8151 - DNA, 705 bp, Legionella pneumophila; identical to SEQ ID NO: 7943

SEQ ID NO: 8152 - DNA, 1449 bp, Legionella pneumophila; identical to SEQ ID NO: 7944

SEQ ID NO: 8153 - DNA, 3387 bp, Legionella pneumophila; identical to SEQ ID NO: 7945

SEQ ID NO: 8154 - DNA, 1911 bp, Legionella pneumophila; identical to SEQ ID NO: 7942

SEQ ID NO: 8155 - DNA, 705 bp, Legionella pneumophila; identical to SEQ ID NO: 7943

SEQ ID NO: 8156 - DNA, 1449 bp, Legionella pneumophila; identical to SEQ ID NO: 7944

SEQ ID NO: 8157 - DNA, 3387 bp, Legionella pneumophila; identical to SEQ ID NO: 7945

SEQ ID NO: 8158 - DNA, 1911 bp, Legionella pneumophila; identical to SEQ ID NO: 7942

SEQ ID NO: 8159 - DNA, 705 bp, Legionella pneumophila; identical to SEQ ID NO: 7943

SEQ ID NO: 8160 - DNA, 1449 bp, Legionella pneumophila; identical to SEQ ID NO: 7944

SEQ ID NO: 8161 - DNA, 3387 bp, Legionella pneumophila; identical to SEQ ID NO: 7945

SEQ ID NO: 8162 - DNA, 1911 bp, Legionella pneumophila; identical to SEQ ID NO: 7942

SEQ ID NO: 8163 - DNA, 705 bp, Legionella pneumophila; identical to SEQ ID NO: 7943

SEQ ID NO: 8164 - DNA, 1449 bp, Legionella pneumophila; identical to SEQ ID NO: 7944

SEQ ID NO: 8165 - DNA, 3387 bp, Legionella pneumophila; identical to SEQ ID NO: 7945

SEQ ID NO: 8166 - DNA, 1911 bp, Legionella pneumophila; identical to SEQ ID NO: 7942

SEQ ID NO: 8167 - DNA, 705 bp, Legionella pneumophila; identical to SEQ ID NO: 7943

SEQ ID NO: 8168 - DNA, 1449 bp, Legionella pneumophila; identical to SEQ ID NO: 7944

SEQ ID NO: 8169 - DNA, 3387 bp, Legionella pneumophila; identical to SEQ ID NO: 7945

SEQ ID NO: 8170 - DNA, 1911 bp, Legionella pneumophila; identical to SEQ ID NO: 7942

SEQ ID NO: 8171 - DNA, 705 bp, Legionella pneumophila; identical to SEQ ID NO: 7943

SEQ ID NO: 8172 - DNA, 1449 bp, Legionella pneumophila; identical to SEQ ID NO: 7944

SEQ ID NO: 8173 - DNA, 3387 bp, Legionella pneumophila; identical to SEQ ID NO: 7945

SEQ ID NO: 8174 - DNA, 1911 bp, Legionella pneumophila; identical to SEQ ID NO: 7942

SEQ ID NO: 8175 - DNA, 705 bp, Legionella pneumophila; identical to SEQ ID NO: 7943

SEQ ID NO: 8176 - DNA, 1449 bp, Legionella pneumophila; identical to SEQ ID NO: 7944

SEQ ID NO: 8177 - DNA, 3387 bp, Legionella pneumophila; identical to SEQ ID NO: 7945

SEQ ID NO: 8178 - DNA, 1911 bp, Legionella pneumophila; identical to SEQ ID NO: 7942

SEQ ID NO: 8179 - DNA, 705 bp, Legionella pneumophila; identical to SEQ ID NO: 7943

SEQ ID NO: 8180 - DNA, 1449 bp, Legionella pneumophila; identical to SEQ ID NO: 7944

SEQ ID NO: 8181 - DNA, 3387 bp, Legionella pneumophila; identical to SEQ ID NO: 7945

SEQ ID NO: 8182 - DNA, 1911 bp, Legionella pneumophila; identical to SEQ ID NO: 7942

SEQ ID NO: 8183 - DNA, 705 bp, Legionella pneumophila; identical to SEQ ID NO: 7943

SEQ ID NO: 8184 - DNA, 1449 bp, Legionella pneumophila; identical to SEQ ID NO: 7944

SEQ ID NO: 8185 - DNA, 3387 bp, Legionella pneumophila; identical to SEQ ID NO: 7945

SEQ ID NO: 8186 - DNA, 1911 bp, Legionella pneumophila; identical to SEQ ID NO: 7942

SEQ ID NO: 8187 - DNA, 705 bp, Legionella pneumophila; identical to SEQ ID NO: 7943

SEQ ID NO: 8188 - DNA, 1449 bp, Legionella pneumophila; identical to SEQ ID NO: 7944

SEQ ID NO: 8189 - DNA, 3387 bp, Legionella pneumophila; identical to SEQ ID NO: 7945

SEQ ID NO: 8190 - DNA, 1911 bp, Legionella pneumophila; identical to SEQ ID NO: 7942

SEQ ID NO: 8191 - DNA, 705 bp, Legionella pneumophila; identical to SEQ ID NO: 7943

SEQ ID NO: 8192 - DNA, 1449 bp, Legionella pneumophila; identical to SEQ ID NO: 7944

SEQ ID NO: 8193 - DNA, 3387 bp, Legionella pneumophila; identical to SEQ ID NO: 7945

SEQ ID NO: 8194 - DNA, 1911 bp, Legionella pneumophila; identical to SEQ ID NO: 7942

SEQ ID NO: 8195 - DNA, 705 bp, Legionella pneumophila; identical to SEQ ID NO: 7943

SEQ ID NO: 8196 - DNA, 1449 bp, Legionella pneumophila; identical to SEQ ID NO: 7944

SEQ ID NO: 8197 - DNA, 3387 bp, Legionella pneumophila; identical to SEQ ID NO: 7945

SEQ ID NO: 8198 - DNA, 1911 bp, Legionella pneumophila; identical to SEQ ID NO: 7942

SEQ ID NO: 8199 - DNA, 705 bp, Legionella pneumophila; identical to SEQ ID NO: 7943

SEQ ID NO: 8200 - DNA, 1449 bp, Legionella pneumophila; identical to SEQ ID NO: 7944

SEQ ID NO: 8201 - DNA, 3387 bp, Legionella pneumophila; identical to SEQ ID NO: 7945

SEQ ID NO: 8202 - DNA, 1911 bp, Legionella pneumophila; identical to SEQ ID NO: 7942

SEQ ID NO: 8203 - DNA, 705 bp, Legionella pneumophila; identical to SEQ ID NO: 7943

SEQ ID NO: 8204 - DNA, 1449 bp, Legionella pneumophila; identical to SEQ ID NO: 7944

SEQ ID NO: 8205 - DNA, 3387 bp, Legionella pneumophila; identical to SEQ ID NO: 7945

SEQ ID NO: 8206 - DNA, 1911 bp, Legionella pneumophila; identical to SEQ ID NO: 7942

SEQ ID NO: 8207 - DNA, 705 bp, Legionella pneumophila; identical to SEQ ID NO: 7943

SEQ ID NO: 8208 - DNA, 1449 bp, Legionella pneumophila; identical to SEQ ID NO: 7944

SEQ ID NO: 8209 - DNA, 3387 bp, Legionella pneumophila; identical to SEQ ID NO: 7945

SEQ ID NO: 8210 - DNA, 1911 bp, Legionella pneumophila; identical to SEQ ID NO: 7942

SEQ ID NO: 8211 - DNA, 705 bp, Legionella pneumophila; identical to SEQ ID NO: 7943

SEQ ID NO: 8212 - DNA, 1449 bp, Legionella pneumophila; identical to SEQ ID NO: 7944

SEQ ID NO: 8213 - DNA, 3387 bp, Legionella pneumophila; identical to SEQ ID NO: 7945

SEQ ID NO: 8214 - DNA, 1911 bp, Legionella pneumophila; identical to SEQ ID NO: 7942

SEQ ID NO: 8215 - DNA, 705 bp, Legionella pneumophila; identical to SEQ ID NO: 7943

SEQ ID NO: 8216 - DNA, 1449 bp, Legionella pneumophila; identical to SEQ ID NO: 7944

SEQ ID NO: 8217 - DNA, 3387 bp, Legionella pneumophila; identical to SEQ ID NO: 7945

SEQ ID NO: 8218 - DNA, 1911 bp, Legionella pneumophila; identical to SEQ ID NO: 7942

SEQ ID NO: 8219 - DNA, 705 bp, Legionella pneumophila; identical to SEQ ID NO: 7943

SEQ ID NO: 8220 - DNA, 1449 bp, Legionella pneumophila; identical to SEQ ID NO: 7944

SEQ ID NO: 8221 - DNA, 3387 bp, Legionella pneumophila; identical to SEQ ID NO: 7945

SEQ ID NO: 8222 - DNA, 1911 bp, Legionella pneumophila; identical to SEQ ID NO: 7942

SEQ ID NO: 8223 - DNA, 705 bp, Legionella pneumophila; identical to SEQ ID NO: 7943

SEQ ID NO: 8224 - DNA, 1449 bp, Legionella pneumophila; identical to SEQ ID NO: 7944

SEQ ID NO: 8225 - DNA, 3387 bp, Legionella pneumophila; identical to SEQ ID NO: 7945

SEQ ID NO: 8226 - DNA, 1911 bp, Legionella pneumophila; identical to SEQ ID NO: 7942

SEQ ID NO: 8227 - DNA, 705 bp, Legionella pneumophila; identical to SEQ ID NO: 7943

SEQ ID NO: 8228 - DNA, 1449 bp, Legionella pneumophila; identical to SEQ ID NO: 7944

SEQ ID NO: 8229 - DNA, 3387 bp, Legionella pneumophila; identical to SEQ ID NO: 7945

SEQ ID NO: 8230 - DNA, 1911 bp, Legionella pneumophila; identical to SEQ ID NO: 7942

SEQ ID NO: 8231 - DNA, 705 bp, Legionella pneumophila; identical to SEQ ID NO: 7943

SEQ ID NO: 8232 - DNA, 1449 bp, Legionella pneumophila; identical to SEQ ID NO: 7944

SEQ ID NO: 8233 - DNA, 3387 bp, Legionella pneumophila; identical to SEQ ID NO: 7945

SEQ ID NO: 8234 - DNA, 1911 bp, Legionella pneumophila; identical to SEQ ID NO: 7942

SEQ ID NO: 8235 - DNA, 705 bp, Legionella pneumophila; identical to SEQ ID NO: 7943

SEQ ID NO: 8236 - DNA, 1449 bp, Legionella pneumophila; identical to SEQ ID NO: 7944

SEQ ID NO: 8237 - DNA, 3387 bp, Legionella pneumophila; identical to SEQ ID NO: 7945

SEQ ID NO: 8238 - DNA, 1911 bp, Legionella pneumophila; identical to SEQ ID NO: 7942

SEQ ID NO: 8239 - DNA, 705 bp, Legionella pneumophila; identical to SEQ ID NO: 7943

SEQ ID NO: 8240 - DNA, 1449 bp, Legionella pneumophila; identical to SEQ ID NO: 7944

SEQ ID NO: 8241 - DNA, 3387 bp, Legionella pneumophila; identical to SEQ ID NO: 7945

SEQ ID NO: 8242 - DNA, 1911 bp, Legionella pneumophila; identical to SEQ ID NO: 7942

SEQ ID NO: 8243 - DNA, 705 bp, Legionella pneumophila; identical to SEQ ID NO: 7943

SEQ ID NO: 8244 - DNA, 1449 bp, Legionella pneumophila; identical to SEQ ID NO: 7944

SEQ ID NO: 8245 - DNA, 3387 bp, Legionella pneumophila; identical to SEQ ID NO: 7945

SEQ ID NO: 8246 - DNA, 1911 bp, Legionella pneumophila; identical to SEQ ID NO: 7942

SEQ ID NO: 8247 - DNA, 705 bp, Legionella pneumophila; identical to SEQ ID NO: 7943

SEQ ID NO: 8248 - DNA, 1449 bp, Legionella pneumophila; identical to SEQ ID NO: 7944

SEQ ID NO: 8249 - DNA, 3387 bp, Legionella pneumophila; identical to SEQ ID NO: 7945

SEQ ID NO: 8250 - DNA, 1911 bp, Legionella pneumophila; identical to SEQ ID NO: 7942

SEQ ID NO: 8251 - DNA, 705 bp, Legionella pneumophila; identical to SEQ ID NO: 7943

SEQ ID NO: 8252 - DNA, 1449 bp, Legionella pneumophila; identical to SEQ ID NO: 7944

SEQ ID NO: 8253 - DNA, 3387 bp, Legionella pneumophila; identical to SEQ ID NO: 7945

SEQ ID NO: 8254 - DNA, 1911 bp, Legionella pneumophila; identical to SEQ ID NO: 7942

SEQ ID NO: 8255 - DNA, 705 bp, Legionella pneumophila; identical to SEQ ID NO: 7943

SEQ ID NO: 8256 - DNA, 1449 bp, Legionella pneumophila; identical to SEQ ID NO: 7944

SEQ ID NO: 8257 - DNA, 3387 bp, Legionella pneumophila; identical to SEQ ID NO: 7945

SEQ ID NO: 8258 - DNA, 1911 bp, Legionella pneumophila; identical to SEQ ID NO: 7942

SEQ ID NO: 8259 - DNA, 705 bp, Legionella pneumophila; identical to SEQ ID NO: 7943

SEQ ID NO: 8260 - DNA, 1449 bp, Legionella pneumophila; identical to SEQ ID NO: 7944

SEQ ID NO: 8261 - DNA, 3387 bp, Legionella pneumophila; identical to SEQ ID NO: 7945

SEQ ID NO: 8262 - DNA, 1911 bp, Legionella pneumophila; identical to SEQ ID NO: 7942

SEQ ID NO: 8263 - DNA, 705 bp, Legionella pneumophila; identical to SEQ ID NO: 7943

SEQ ID NO: 8264 - DNA, 1449 bp, Legionella pneumophila; identical to SEQ ID NO: 7944

SEQ ID NO: 8265 - DNA, 3387 bp, Legionella pneumophila; identical to SEQ ID NO: 7945

SEQ ID NO: 8266 - DNA, 1911 bp, Legionella pneumophila; identical to SEQ ID NO: 7942

SEQ ID NO: 8267 - DNA, 705 bp, Legionella pneumophila; identical to SEQ ID NO: 7943

SEQ ID NO: 8268 - DNA, 1449 bp, Legionella pneumophila; identical to SEQ ID NO: 7944

SEQ ID NO: 8269 - DNA, 3387 bp, Legionella pneumophila; identical to SEQ ID NO: 7945

SEQ ID NO: 8270 - DNA, 1911 bp, Legionella pneumophila; identical to SEQ ID NO: 7942

SEQ ID NO: 8271 - DNA, 705 bp, Legionella pneumophila; identical to SEQ ID NO: 7943

SEQ ID NO: 8272 - DNA, 1449 bp, Legionella pneumophila; identical to SEQ ID NO: 7944

SEQ ID NO: 8273 - DNA, 3387 bp, Legionella pneumophila; identical to SEQ ID NO: 7945

SEQ ID NO: 8274 - DNA, 1911 bp, Legionella pneumophila; identical to SEQ ID NO: 7942

SEQ ID NO: 8275 - DNA, 705 bp, Legionella pneumophila; identical to SEQ ID NO: 7943

SEQ ID NO: 8276 - DNA, 1449 bp, Legionella pneumophila; identical to SEQ ID NO: 7944

SEQ ID NO: 8277 - DNA, 3387 bp, Legionella pneumophila; identical to SEQ ID NO: 7945

SEQ ID NO: 8278 - DNA, 1911 bp, Legionella pneumophila; identical to SEQ ID NO: 7942

SEQ ID NO: 8279 - DNA, 705 bp, Legionella pneumophila; identical to SEQ ID NO: 7943

SEQ ID NO: 8280 - DNA, 1449 bp, Legionella pneumophila; identical to SEQ ID NO: 7944

SEQ ID NO: 8281 - DNA, 3387 bp, Legionella pneumophila; identical to SEQ ID NO: 7945

SEQ ID NO: 8282 - DNA, 1911 bp, Legionella pneumophila; identical to SEQ ID NO: 7942

SEQ ID NO: 8283 - DNA, 705 bp, Legionella pneumophila; identical to SEQ ID NO: 7943

SEQ ID NO: 8284 - DNA, 1449 bp, Legionella pneumophila; identical to SEQ ID NO: 7944

SEQ ID NO: 8285 - DNA, 3387 bp, Legionella pneumophila; identical to SEQ ID NO: 7945

SEQ ID NO: 8286 - DNA, 1911 bp, Legionella pneumophila; identical to SEQ ID NO: 7942

SEQ ID NO: 8287 - DNA, 705 bp, Legionella pneumophila; identical to SEQ ID NO: 7943

SEQ ID NO: 8288 - DNA, 1449 bp, Legionella pneumophila; identical to SEQ ID NO: 7944

SEQ ID NO: 8289 - DNA, 3387 bp, Legionella pneumophila; identical to SEQ ID NO: 7945

SEQ ID NO: 8290 - DNA, 1911 bp, Legionella pneumophila; identical to SEQ ID NO: 7942

SEQ ID NO: 8291 - DNA, 705 bp, Legionella pneumophila; identical to SEQ ID NO: 7943

SEQ ID NO: 8292 - DNA, 1449 bp, Legionella pneumophila; identical to SEQ ID NO: 7944

SEQ ID NO: 8293 - DNA, 3387 bp, Legionella pneumophila; identical to SEQ ID NO: 7945

SEQ ID NO: 8294 - DNA, 1911 bp, Legionella pneumophila; identical to SEQ ID NO: 7942

SEQ ID NO: 8295 - DNA, 705 bp, Legionella pneumophila; identical to SEQ ID NO: 7943

SEQ ID NO: 8296 - DNA, 1449 bp, Legionella pneumophila; identical to SEQ ID NO: 7944

SEQ ID NO: 8297 - DNA, 3387 bp, Legionella pneumophila; identical to SEQ ID NO: 7945

SEQ ID NO: 8298 - DNA, 1911 bp, Legionella pneumophila; identical to SEQ ID NO: 7942

SEQ ID NO: 8299 - DNA, 705 bp, Legionella pneumophila; identical to SEQ ID NO: 7943

SEQ ID NO: 8300 - DNA, 1449 bp, Legionella pneumophila; identical to SEQ ID NO: 7944

SEQ ID NO: 8301 - DNA, 3387 bp, Legionella pneumophila; identical to SEQ ID NO: 7945

SEQ ID NO: 8302 - DNA, 1911 bp, Legionella pneumophila; identical to SEQ ID NO: 7942

SEQ ID NO: 8303 - DNA, 705 bp, Legionella pneumophila; identical to SEQ ID NO: 7943

SEQ ID NO: 8304 - DNA, 1449 bp, Legionella pneumophila; identical to SEQ ID NO: 7944

SEQ ID NO: 8305 - DNA, 3387 bp, Legionella pneumophila; identical to SEQ ID NO: 7945

SEQ ID NO: 8306 - DNA, 1911 bp, Legionella pneumophila; identical to SEQ ID NO: 7942

SEQ ID NO: 8307 - DNA, 705 bp, Legionella pneumophila; identical to SEQ ID NO: 7943

SEQ ID NO: 8308 - DNA, 1449 bp, Legionella pneumophila; identical to SEQ ID NO: 7944

SEQ ID NO: 8309 - DNA, 3387 bp, Legionella pneumophila; identical to SEQ ID NO: 7945

SEQ ID NO: 8310 - DNA, 1911 bp, Legionella pneumophila; identical to SEQ ID NO: 7942

SEQ ID NO: 8311 - DNA, 705 bp, Legionella pneumophila; identical to SEQ ID NO: 7943

SEQ ID NO: 8312 - DNA, 1449 bp, Legionella pneumophila; identical to SEQ ID NO: 7944

SEQ ID NO: 8313 - DNA, 3387 bp, Legionella pneumophila; identical to SEQ ID NO: 7945

SEQ ID NO: 8314 - DNA, 1911 bp, Legionella pneumophila; identical to SEQ ID NO: 7942

SEQ ID NO: 8315 - DNA, 705 bp, Legionella pneumophila; identical to SEQ ID NO: 7943

SEQ ID NO: 8316 - DNA, 1449 bp, Legionella pneumophila; identical to SEQ ID NO: 7944

SEQ ID NO: 8317 - DNA, 3387 bp, Legionella pneumophila; identical to SEQ ID NO: 7945

SEQ ID NO: 8318 - DNA, 1911 bp, Legionella pneumophila; identical to SEQ ID NO: 7942

SEQ ID NO: 8319 - DNA, 705 bp, Legionella pneumophila; identical to SEQ ID NO: 7943

SEQ ID NO: 8320 - DNA, 1449 bp, Legionella pneumophila; identical to SEQ ID NO: 7944

SEQ ID NO: 8321 - DNA, 3387 bp, Legionella pneumophila; identical to SEQ ID NO: 7945

SEQ ID NO: 8322 - DNA, 1911 bp, Legionella pneumophila; identical to SEQ ID NO: 7942

SEQ ID NO: 8323 - DNA, 705 bp, Legionella pneumophila; identical to SEQ ID NO: 7943

SEQ ID NO: 8324 - DNA, 1449 bp, Legionella pneumophila; identical to SEQ ID NO: 7944

SEQ ID NO: 8325 - DNA, 3387 bp, Legionella pneumophila; identical to SEQ ID NO: 7945

SEQ ID NO: 8326 - DNA, 1911 bp, Legionella pneumophila; identical to SEQ ID NO: 7942

SEQ ID NO: 8327 - DNA, 705 bp, Legionella pneumophila; identical to SEQ ID NO: 7943

SEQ ID NO: 8328 - DNA, 1449 bp, Legionella pneumophila; identical to SEQ ID NO: 7944

SEQ ID NO: 8329 - DNA, 3387 bp, Legionella pneumophila; identical to SEQ ID NO: 7945

SEQ ID NO: 8330 - DNA, 1911 bp, Legionella pneumophila; identical to SEQ ID NO: 7942

SEQ ID NO: 8331 - DNA, 705 bp, Legionella pneumophila; identical to SEQ ID NO: 7943

SEQ ID NO: 8332 - DNA, 1449 bp, Legionella pneumophila; identical to SEQ ID NO: 7944

SEQ ID NO: 8333 - DNA, 3387 bp, Legionella pneumophila; identical to SEQ ID NO: 7945

SEQ ID NO: 8334 - DNA, 1911 bp, Legionella pneumophila; identical to SEQ ID NO: 7942

SEQ ID NO: 8335 - DNA, 705 bp, Legionella pneumophila; identical to SEQ ID NO: 7943

SEQ ID NO: 8336 - DNA, 1449 bp, Legionella pneumophila; identical to SEQ ID NO: 7944

SEQ ID NO: 8337 - DNA, 3387 bp, Legionella pneumophila; identical to SEQ ID NO: 7945

SEQ ID NO: 8338 - DNA, 1905 bp, Legionella jordanis
atgctaaatgcagaaacctttttttatttcataacccaagattctaccgtttggttttttgtattactcattgtaatagtagcccttttccctctaaaacaatccttctggaatataggaaaagttaataaagatttgaagattgcatcgaaagttttttttcaaattgagtcaaaaaaggacttttataataactttgaatccatttctacgaaaatatcaaaccttagatggctaaaagcgatctggaatgactttatatcgagcacttactatttaacttataatgagaccgataatcatagccatagagcagtatatctatcacatagaccctatgagtatttcactaaacagtccatattaggccaagttttaaatattaatcaattttatgcttatcccaattacctaatcggaattggtctgacctttacatttataggattagccgctgctctgcatatagcacaacaaggattagcacatggtgaaggacaggcagccttatcagaacttctgaaagtagcatctgttaaattttttagttctattgcaggaataagttgtagtttattcatctcatttattcagaaaaagcaaacaaaagagtttcacaagaaattaaataatttttgttcattaattgaaaattgcactgagtacaaaccaactgaaaaactattatttgaaagtatacaggagcaaactaaacagacttttgcattgcaaagtatggccaatgatatttccagaggaattggagatgtacttaataaccaattgccggttagtgtcgctaaagctctcgagcctttagctcacgaaataagagaattagctcataaattctcaggaagtaatgaaaatgctcttgaaaaagttttagatgagtttattgaacaattaagaaaaagttccgctgatgacatgcaaggtcttgtcaatggtgtgaatactttaaaagtctctcttgaaaaactagttgataatatcgaattaatgagtacaaactttggctcaaatactaaagaatccacagatcgacttatgcgatccttagagaactttgctaatacatttgtaccagtacaaaatggtattgctgaatttggaaaaacacttaattcacttgaaagtatcgctgaaagtatccaaaatgccagtggcaacataagtggcgcagctagtatcaacactcaaagcatgagcaatcttgctggtacagtcaatcaaattacagaaaatattgcgccaatccaagacttacttggcaatctttcattgtcactacaaaaaattaatgaatcatctcttaaacttgatagcgcaggtgattcaatttcccttgcagtgaatggttttaattcatctgctcaaaatattgaaaatgctagctcaaaattcaatgataatatcactctaatacaaactgtaattgatggattaaataatactactacaaatctagaaaaatcatcatctgatatccgacaatcagtcttgcctctatctcaaacatcagagcaaatccaaaaagctcttaaagttactcaagaaactgaattaagactaatagaaagtcaaaaacaaatgggtactttattaaacagtttagatagtttcaccgaaaaaatgccaactattttgagccaatacgaagatagattcacgaaagttgatcatgatttagctaatgcattttctgaattagcaaaaggaagtgaagagtttaaaaatagtattattcactttatacagtcttttgattcacagtttgaaaaagcattgagccacttaagcgcagcaatacatgaattacaagaggaacgggaagaaacctatacaaattttattgaacaaaagtcaaatgggcaggtagatgcagacacaagaattacatga

SEQ ID NO: 8339 - DNA, 705 bp, Legionella jordanis
atgcagacacaagaattacatgatgaaagctattttgcctcattcacagatatgttagtaggcattattttcatttttattattttattgatgatagttgctaataattatcaatctgcaacaaaaaaagttacagaaataaatgagtccagagataaaatattaaagaaaattgagcatagtttgaaagaagaaggtgtcgctgtaacagtagatcttgaacaaggggtcttacgtttacctgaaagtattttatttggcatcgaccaatataaccttaacgaaaatggcaaagtggctttatctaaattagcaaatgttctagaaaaatatttaccctgcatggcaataactgataaaaaatataaatatcattgtgggtctttaaatttggcctctcaagatggcttggatgctgttttcattgaaggccataccgatgtgacaggatcttctgatcataactggtacctttcaacgagaagagctatttctatattcaaagaactaactgaagccaaaccatttttaaatgagggagtcaaaaatattaatggcattcctattttgaatgtaagtggttatgaagcaagaagacccgtcgatcccaatcgcctggaacttaatagaagaattgagttaaggtttatcatgcgatcgcctactcctgaagatctggagaaacttcatcgtgcaatcagataa

SEQ ID NO: 8340 - DNA, 1449 bp, Legionella jordanis
gtgcaatcagataactctccttcattaagaaaagaaatttctcagttttatcatacgataaaacttaaatctcaacatttatcattgcaagaacctcaagtaaatagggcattaaagataattgagaaaaaatttgatagcttgggtagtatccccactagtcaaaacttagaaaagttatctattactttctataaagccttagaagcaaaatcctttgacaatatttctaataaagaatggaagctagtaccatttatattatggacaacaccccaagttaattcatttgcacttggttcagatcttaattttttacaaaaatatttaaattggctatctcaaaatctgactgctagtaacttaaaaaaattaatatattgtttcttgaaagattttagcttaagagaacaatatcttgcggtatttaaaaaattaagttgttttataacagaaaaaatatattcgtcgatgaatcccagcctatcgaaatggtatgaaagaaatcaaaaattaaatatattttccccaaactttgatttaagtaaagtgatttctctatatttaaacgaatgtaatttagatatatacaaattttttagccttcttgggttacagggcgagatttctattaggggttattctgaagctatagggttaaacttattaaaaatactagaaagagagccatctgataaattaataaacgctgtaatcaattattttttttctaaagattctgtgcgattttcaaatcatagagttaatttaattcaatctttattgactccttggctgagtaataactcaaccaacagtagtgaaagtcaaaaaaaagtacaagacctacttataaaacattttaaagacccacgtattattgcataccgaagagatggttggaggtcaattagcgaacaatatttgaaagttatataccaatggttagttggtgaaagcattgaacaattctttgaaattgttgatcaaatggcgctagatcggcaatggaaatatcgtaaggccttttggatggcttattataaatacggttttcttgatgaagcatggttcgttcttggacccgacgcaaaatattatgcagaaacttattttgaaaacaagctctcatttggagcaatggattccggatgcaagtcaaaccatagtgttttaattcttaaaattggaaatattgtccttgctgaatggagccacgaagggaaatgtagagcatggcgggatgaggatcccaaagccccggaaagatataaaaattattatgtgggaaaaaattttaaagaagaatctttaaaaatcgtaccgcattacaattctgatggaattggtcatttatctagtaatacatactcttggcaacaaaatttatctgattttatatatcgcaatactggtttaaaggtgtaccacagtgatttttggatttaa

SEQ ID NO: 8341 - DNA, 3378 bp, Legionella jordanis
gtgatttttggatttaatataaaaaagcgcagtaaacaaactttaatttatgatgaacaattcatcaacaatcaatgggttttattattcaaactccaacaaaaaaatagcttaatacctttaagtgaatggcataaatgtgatcacaaaggagctcaatggttattggaatttattgaagcaaataacttacaacaacaaccatctgtagatacattgattatttcgtcaaaggactttattacctctattaaagaacaagaactttttatacagaatcttttagaactgccgccgttatttgacggtggaatccatatcatatctgaaggattaattgcgaaaaacaactataaaatcaaatatcattgggttaatagttattcacggccaattattcaatcaaaagaatggggtatttttttacagataggtgaaaataaatttttactaccttggtatgcttggaaaataaaagaggaaattaagttattacagacacaattagtttcttcaagttcaatacaaaaaagactagagcttatagagcatttttcatcaatacggcatctattaccagaagaaaagacatggactttaactgacgatggttccatatcgaaaataactcttttctttgcgaatgcatttaaaattcaagctgtaccagaaaaagatagtttcagaatagagccaattttattgagaaaaaaagagcttgaaaatttggatccacattttgaaaatattcttcctcctattgatcaagaagccttcatcagaagtttcaataatagtttacaactaaaccaatattatgggcttgggcctggtcgatatctgctgattcatcctcaggttaataaagctttagaaacagtccataaaattcaacatgcaacaaaagaagaaaaattagaatttctgaaaaatccaaaagccgctctagctgaggatttggaaggaattatcaatgaagatgaactagatcaaattttttccgatagagtcataggaattggagattggaacgcgaaaataattccttggatacagcttcctccgaatgaatggctgcctggtggcgaactaccaaatgttccctttggtattgatattaatggtgataagcatcaatttgcaaataagaatgaggtatctgatttagtagataagttgaaaaacgcccaaaaggatggatatcaattttatcaatatggagaattcagtatacctgtgaataacgagaacatttcaaaacttgaatgttttttacctaaaaaaccaaatacagttatcgaaaaagaagataaactaaaaacactaactggaatcacagataaaattaatcaaaccccagttatgctagttaaagaaaatttagaatgtgtcgaatttaatgtctttcgtcacccaagagtgataattccacattcgaatgcaatcccaaataatgttaagtctgaaccgaaaccccaccaaatagaagcttttaaatggttacagaaccattatatagctggttctagaggcgtattattagctgatgacatgggtttggggaaaacattccaatcactcatgtttcttgcttggcttcatgaagcaatgaaattaaaagagataacgaataaacctttattaattgtcgcccctactggcttattaaaaaattgggaagacgaaattaatattcatttatctagtggcctaggtaatcttctccgtgcttatggttcaacattaaaaaatttaaaatctggtaggtacttagatgtaacccaattaaaaggttctgatctaattttgactacatttgatactcttacaagatatcaaacaagtttcagtgtgatcaattttgcagttgtagtatttgatgaaattcaaaaattaaaaaatcctggaacccaaaactattctgcagcatgcagccttcattgtgatttctggttgggaatgacaggaactcctgttgaaaatcgactatgtgatctttgggccatcactgatgtgctacaaccagggatgttaggatccattaaagaatttagcacaaaatatgaaaaatcaatcctaacattaggtgagaacgaacaaaatgaaattattaaagaacttcaagatggattgacaaaagcgagtgaaaaagcaccgccttttatgctaagaagaatgaaatcgtctattttaccaggtttacccaaaaaaaatattcatgttaaaacagtattaatgcccaatatacaagcaaatgcctaccaaaaaataattcaagaagtagctcagcaagaagaatcaggaggaatgctgaaagcattacatttattaagggcctgctccttacatcctgatagtaaaaggcaaagacaatataattcttatgatgaatttattctccaatctgctcgagtaaaagaatgctttcaaattttagatagcatatataagaataaagaaaaagctcttatctttatagagtataacgagtggcatcatcctgcttttttaccccacattattaaaacacgatacaatcttaaaaaattacctatggcaattaatggacaaataaactcaaaaagcaggcaggatatagtagataaattccaaaatgaaagaggaatttttgatgtcatgctattatctccacgcgcaggtggagttggcttgactctcacagcagccaatcacattattcatttaacaagatggtggaatccagctgtagaggatcaggctaatgataggatatatagaattggccaaaactcagatgtgcatatctattatatacttgcattacatcctgaatacgaatcaacttgttttgatctaaatttgcatgaattattagaaaaaaaacgtcgactcagccaacagatcatcatagcacctcctatggaaaacgatactattgatgagctttatgcaaagacgtttcaaaagaatcaaaaaattaaacttccaattgaggaaagctatattcatttaaatggcaaaacttatgaagatctaatatttcaagatatgaaaaaaattgcgcctaaatttgggtatattgcaagatatactcaacaaagccatgataaaggagctgacataataattgatacatacgatggtgaaacaaaggctattgttcaatgtaagtttgtcgataatcctactaaagctcctcttaatttaacttcggatttagatcgagcaagcccttattattctaatagccattcaaatccacttttaataggatttacaaacgcccaaaaaattaaaaaagctgacaggacatgggaaaataatgctaacaatcgaaaaatagtatatggaaaggagggtttggacgcatccaacctttttgattttcttgattag

SEQ ID NO: 8342 - DNA, 2061 bp, Acinetobacter baumannii ABNIH19
atgttggcttttgctgaatttctgcaggattattttatcattcctgtgggaatgctcatttttgtattatggattgggtttaaattctattctaaatatatcaaacctgctaaaaagttaagtgggcaattatcagtactaattaatgccttaaaaggaatggaggaaaactctagtctaaataagcattcattagatgcaaaattcgaaaatgatacgcctttaaaacatgcttggttgaattacaaaaattcttttcatgacatctatgaaactctagatggagaagatgttctagtttcctcacgtgcaacggtatcaagtgatgtatttttttcacaagctgtcattgtggatacccctttaagagttgagttttataagcacttgccaggtattatcactggtgtaggtattattgctacatttgctggccttctatttggattattagcttttgatcccgcaggcgatccagcaaaagttcaagacagtttaggcttgttattaggtggggtaagtgaagcattcatggcttctgcacttgcgatagggactgcaatgattatcacttggcgcgaaaaatcgtggttgcgtcagtgttatgaacagttagaaactttaacgacagaaattgataagctttttgaaactgattccactggagaagagtatctagctaaattattaaaatcctctcaggcaaacgaaaccaatgctcgtcaattaaaagacagccttgttaatgacttaaaagtcatgatgacaaatttggttgaggaaaataaaaagaatcagattgcttttgctgcacagttaagtgaaagctatgcgaaatcaagtcaggatatggcgacccagattggtcaatcgattacggataccttgcaagcacctctagataaaattgcgtctagcgtacaacaagtgagtagtgacaatggttcagccgtccaagaactcatgactgatgtgcttacagcctttatgaataaattggagtctacgttcggcagtcaaatgacgggcatgactgagatgatgactcaatcagtatctgctatgaaggaaatgcaattaggtttctctcaattactgacagatatgaaaattaatagtgaaacttcgacgaaaacattagaaatacagatgtcgaaaatgattgaagatattcaacaaaaacaaaatgagatgtctgatcaaatgaatttaatggtggatcatttatctcaaggtgccgcaaaaattggagaacaaggtcaacatgcgattgagcagttaaatggcaaagtctcggagttgatggggaatctaggcggaacgatgtctgagttaatgtcagatgtcacgaaacagcgtatggaacaagatcgtgtaattctagaaaatcagcaaaaattgcacgaacaatcatctacattaattgataatttaggaactgaaattaaagatttgattgcacacagtcaaaatgcggtccaagtatataaagaaaatattcagaaattatctcaagtgacaacggatagtattacgggtatgaataacggtgctgaaaaaatgcgcttagcttctgaacagtttaatactgcgggcagttctttgattacagtgactgataagacatcacagttgattgcagaagtaagtaccacctctacacatttgaccagcgcaagcagcaatttaatcgctctattaaaagactataaagactcacaagagagtgtaaaacaggcaatcagtactttagatggtttgattaaacaagctcaatctgaagctggtatgagtaccaaaatgcttgaagatatgaatcacatgacaaatgcattaaatcaagtgaagaaagaaatgcaggattatcttgagcaagtcagtgatgtgctggtgaaaagttttgtcagttttgattcctctatggaaaccagcttaaatcattctttaagagattttgataatacacttgatcaagctgtaaaacgccttgttgatagtatagaaggcttgggtagttttgtagaagatctggaagatctagtacaacaaaagaaaaactaa

SEQ ID NO: 8343 - DNA, 732 bp, Acinetobacter baumannii ABNIH19
atgttaggtaacaggtactctaagaaaccacgttctaaagatgaaggtgaaaaacctttttggatttcatttgctgatttaatgacagcattaatgaccttgtttttagtcgtaatggctgtgtcattaatggtcgtaacgaaaaaaatcaatgaagcgactcaagccgaaaatcaacgtagttcagagattttggatatttgtactagtattcaaaatgatgccgcgttgaaaaataagatcattaatgttgattgtaaggacaatcgtatcaactttggagaagctggtcggtttggccataatgactaccggttaaatgcagcaggagtagaggcattaaatacgttagtacccattgttttaaatgctgctaatagtgaaaatggaaaaaaatggtttaaacaaattgtgattgaagggttcacagatacggatggttcatatctctataacttaaacttaagtttacgtcgttcagaatgggtcatgtgcaatttactcgatcccaagtttagtcatgggttaagtctgagtgacgcacaaaagaaccaggttaaacaattatttttagctggtggggtctcttttaattcagctaaggatagtaaagaagcctcacgtcgtgttgagctacggatgcaattctatggtttaaaagaaaaagagaacgctgagccgcaaccccattttgtttcagcgcctgttgaaacatgccaattgacacggtga

SEQ ID NO: 8344 - DNA, 1371 bp, Acinetobacter baumannii ABNIH19
atgagtattgcgaatctaaaacgtcgtcttgaagaaaaaataagtgtattttctgaaccaactcatatacagactaaatttgttagacctcagcgtttaatgaaaacattgtctattattgagcataaactcgatgttcttgaaaatgaacaaccattagaagaaaaaattatcaaatcagttctaaaacttgaacaacacgggtttgatgggctgactaaacgagattggaaaaatttggcttggtctctcagtaaaaaactgcccaattatgaagaaaaacttttattcacacctgtaggtgtaagattaattgattatttcaaccaattgggaattgaccaactccagtttgtttattttccattgttatatagctatttttcctttcaagcaaaggaattagaaaaacaacctgatagctgggttcagttaagaaatatattaaatacgaacaaatctttggtatttaaaaattcgactcgactaaaaaaatggatgacgactcttatagataattcagaggttttaaccacagaacctacgaaaaaatttgtacgtgaatttttacaagataatgatgaaaacagagttgctaatcaattagaaagtttaagaatagcttcgggtagttggttttgggatgatttgattcgatctgcaattaagtcgatcaagacaatgaaagaggatgagtattttcaaattatcccacgctttttagtattgcttgaaaaaaataaaatatatacaaccactattttggccgcacttctagaacggtacgctagtacttctcagagagagaaagtacatgaggtattaaaacatctagccttggatcaatggggtaatcctcagtatgaatcttcagcgggatggaataacgtaaatgctgataccaaaaaaatggtgattcagtggtttgttagagcagatttggaagctttctttaaattattcaatcagaatgcagatattcaaagatttaattattggatgcggtttattgatcaaattaacttttctcagatctttttgggttctaatgcattgaattctagacgcgatgaacatttgaaatttagaagattgaataggggtaggctgaaagaattagccggttctacaacgtctaccaataatgctttccttttaaaaatcgataatatttatattgttgatttttctgaaacaggtaatgcttgttatttttataaccgtcttccttacaaagactatgtcggaaaaattgaaattaagacactgagaaatcaggaaatttgtattgatcgtcaaacaaggaatggtaattggcaaccacgatttgataatgccttggctcgactcggtatcttttctaagagataa

SEQ ID NO: 8345 - DNA, 2061 bp, Acinetobacter baumannii ABNIH6; identical to SEQ ID NO: 8342

SEQ ID NO: 8346 - DNA, 732 bp, Acinetobacter baumannii ABNIH6; identical to SEQ ID NO: 8343

SEQ ID NO: 8347 - DNA, 1371 bp, Acinetobacter baumannii ABNIH6; identical to SEQ ID NO: 8344

SEQ ID NO: 8348 - DNA, 2061 bp, Acinetobacter baumannii ABNIH7; identical to SEQ ID NO: 8342

SEQ ID NO: 8349 - DNA, 732 bp, Acinetobacter baumannii ABNIH7; identical to SEQ ID NO: 8343

SEQ ID NO: 8350 - DNA, 1371 bp, Acinetobacter baumannii ABNIH7; identical to SEQ ID NO: 8344

SEQ ID NO: 8351 - DNA, 3204 bp, Acinetobacter baumannii ABNIH7
atgaaattaacattctggaaaaggaaaaaaagtactgactctgttgttgaagataacttgatggcgagtataaagtctttacaatatgatgacgttggattgatttatccttatcaacagaatgctaaaaatgacgctgatttttattgggaaagtctagaagaagaagatatcgcctatctcatggatgatcagtatgtattgccatgggaggagctgtttcagcttcagcaagatcccgaacatagtaacgtacttaatttactcaacttaccaagtccaacgaatttacatccagtgattcgtagtgagggaggattaagtgatcctgattttaaaatcattctagatggatggtgtgatcaaaataggattaagtctaaaggcctaattaaacgaataggtgccgtactgaatgttgatggtcaagaatatttactaaatgaaacgacttggaagcttttagaaaaaattaaagaatttgctcgtatttcaaataaagataataagctcaatcaaaagtattgggctcaaatacgaagtttagctaatcgaagtcaggcaaatttagatgagtttcttcgtaagaccgtggtacttgcacctgaaaaattacaattaaatctacgtaagaacttgattagtcaggaatcagttgtagaagtacaaccctcctttgaggaggcaccgtcaaattggttgcaaacttttgatcactataatcaggtacaagatcaatatagcattagcctaccagatggtggagtcgctcatgtagtcattgatcctcaagtcaaaaatgtgctgagtgaaattaaaaagatgccgaatagacgtgtatctggtgagcgcgctcaaacatttttgcataaccccttcgcgcaattaggagatgatgccacagaggtcatctctcctgaaggttttgaaaaatcaaagcaagatgcagaaatctatagttacagcttacagatatataaattctataatgagttagggcattatgtttctgctcaattaactcttaacgaaaattcaggtcgtgaacaacaaccgattctgttggaactctccaatctagagcaaacaaaatattttatctctgcttatgaaaagccatcaccaattttcatgtgggcgggttatacaattgataaaacgagctatttggatcatcaggttcaagagttaaaaagtgatctaacagaaatccaaaaatatgaagatgagttacaagcacagcaagttttagatctatctaattacagtgatcgggtcattggtataggtgaagcacaaaaactaaactctgagtttattcaaagagacagtggtgaatcagagtggttgccacagcatctcatggagttggagcaacaattccaggatcgcttgtctaatgaagcaatagagttgcttgaacagcgtatcaaacaggctgagcaagaaggtaaagatcaggttctaattcctaatgcgaacactgaagtctcagtagatgacgctaaaaaattattaaatagtctgagcgattcaaatagaaaagaacctattgaaacattagaagaatctacggttaatctacagaaaaaaaagaaagatacattacttatcgcgaataacattgataaagctgagtttactaaacaacgagcagatcaattggtttttgatgagaagaaccatcccccagctagattgccttcaagtttcagaagtcaggaattcggtttaaaaccgcatcaggagtatggagttgcatggttgcagaatctacatcaatatgcaccggaacaggtaagtggctgtcttttagcagatgatatgggattggggaagaccctgcaattgttgtgctttattggtgaatatttagaaaatgcgaaagataaaaaaccagttttagtggttgctccagtttcattgttagaaaactgggaggcagaagcaaatcggttcttcagtgctaaatttcctaagatcctaagtctatatggtgagaatttaaaagatcgaaaaattcccaagcatttaatttctgctcaattgagagacgatcacggtattacgcatttgcttgaagaagagtggctaagtgatgcggatattgtcctcacaacctatgaaacgatgcgtgatctagagttttctttagcgcgagttgattgggggattatggtttgcgatgaagcacaaaaaattaaagtacctacggctatggtgacaaaagcggctaaagctcaaaaggcagactttaaaatagcatgtactggtactccagtggaaaattcactcactgacttatggtgcttatttgattttatacaagaaaatttgttagggtcattgaatgaatttggaaaaacttatcgtcgccctatagaaaatcttgataatgtggataatgaagtattggaacaattgcggaacttgattgcaccacaagttttaagacgaatgaaacatgatgttgctgacttaccagaaaaaattgaagtaaatcattgtaaaaatattacgatttcttcacttcaacgtcacttatatgcggatgtaattaatcgctacagaaagttgtctgaagaaggtaatcaaggtgcgatgttggcttcactgcacagtatgcgaatgatttgtgcacatccattccaattgcaaccgaatgcttcaattcatgaatcacctaaagtagattggttgattaaaaccttagaagcaattaaggcaaagaatgaaaaagttattatttttacagaatttagagatattcaagtattcctgaaacggattcttctagaacgattcggcttaaatgttacaaccgttaatggggattcaaatacaagtagcaaaaaaggtttaacacggcaaaaccttattgatagattccaagcaactagtggttttaatgtgattattttatcaaccactgctgtaggctttggcgttaatatccaaaaagctaatcatgtcattcattatacgcgcagttggaatcctgccaaggaagatcaggcaactgaccgtgcgtatcgtataggacaagataaagaagtttttgtttactacccatcaatagcagcaaatgattttgatacttttgagataaaattagaccgacttttatcaagtaagcgggctctggcagatgatatgctgcagccgagtagagaacttagcaaagaattgatcgaaatgatttag

SEQ ID NO: 8352 - DNA, 2061 bp, Acinetobacter baumannii ABNIH10; identical to SEQ ID NO: 8342

SEQ ID NO: 8353 - DNA, 732 bp, Acinetobacter baumannii ABNIH10; identical to SEQ ID NO: 8343

SEQ ID NO: 8354 - DNA, 1162 bp, Acinetobacter baumannii ABNIH10
atgagtattgcgaatctaaaacgtcgtcttgaagaaaaaataagtgtattttctgaaccaactcatatacagactaaatttgttagacctcagcgtttaatgaaaacattgtctattattgagcataaactcgatgttcttgaaaatgaacaaccattagaagaaaaaattatcaaatcagttctaaaacttgaacaacacgggtttgatgggctgactaaacgagattggaaaaatttggcttggtctctcagtaaaaaactgcccaattatgaagaaaaacttttattcacacctgtaggtgtaagattaattgattatttcaaccaattgggaattgaccaactccagtttgtttattttccattgttatatagctatttttcctttcaagcaaaggaattagaaaaacaacctgatagctgggttcagttaagaaatatattaaatacgaacaaatctttggtatttaaaaattcgactcgactaaaaaaatggatgacgactcttatagataattcagaggttttaaccacagaacctacgaaaaaatttgtacgtgaatttttacaagataatgatgaaaacagagttgctaatcaattagaaagtttaagaatagcttcgggtagttggttttgggatgatttgattcgatctgcaattaagtcgatcaagacaatgaaagaggatgagtattttcaaattatcccacgctttttagtattgcttgaaaaaaataaaatatatacaaccactattttggccgcacttctagaacggtacgctagtacttctcagagagagaaagtacatgaggtattaaaacatctagccttggatcaatggggtaatcctcagtatgaatcttcagcgggatggaataacgtaaatgctgataccaaaaaaatggtgattcagtggtttgttagagcagatttggaagctttctttaaattattcaatcagaatgcagatattcaaagatttaattattggatgcggtttattgatcaaattaacttttctcagatctttttgggttctaatgcattgaattctagacgcgatgaacatttgaaatttagaagattgaataggggtaggctgaaagaattagccggttctacaacgtctaccaataatgctttccttttaaaaa

SEQ ID NO: 8355 - DNA, 2061 bp, Acinetobacter baumannii ABNIH11; identical to SEQ ID NO: 8342

SEQ ID NO: 8356 - DNA, 732 bp, Acinetobacter baumannii ABNIH11; identical to SEQ ID NO: 8343

SEQ ID NO: 8357 - DNA, 1371 bp, Acinetobacter baumannii ABNIH11; identical to SEQ ID NO: 8344

SEQ ID NO: 8358 - DNA, 3204 bp, Acinetobacter baumannii ABNIH11; identical to SEQ ID NO: 8351

SEQ ID NO: 8359 - DNA, 2061 bp, Acinetobacter baumannii 1419130
atgttggcttttgctgaatttctgcagaattattttattattcctgtgggaatgctgatttttgtattatggattgggtttaaattctattctaaatatatcaaacctgctaaaaaccttagtgagcaattatcagtactaattaatgccttaaaaggaatggataaaaactctagtctaaataagcattcattagatgcaaaattcgaaaatgatacgcctttaaaacatgcttggttgaattacaaaaattcttttcatgacatctatgaaactgtagatggagaagatgtactagtttcctcacgtgcaacagtatcaagtgacgtatttttttctcaggctgtcattgtggatacccctttaagagttgagttttataagcacttgccaggtattatcactggtgtaggtattattgctacatttgctggccttctatttggattattagcttttgatcccgcaggcgatccagcaaaagttcaagacagtttaggcttgttattaggtggggtaagtgaagcattcatggcttctgcacttgcgatagggactgcaatgattatcacttggcgcgaaaaatcgtggttgcgtcagtgttatgaacagttagaaactttaacgacagaaattgataagctttttgaaactgattccaccggagaggaatatctagctaaattattaaaatcctctcaagcaaacgaaaccaatgctcgtcaattaaaagatagccttgttaatgacttaaaagtcatgatgacgaatttggttgaggaaaataaaaagaatcagattgcttttgctgcacagttaagtgaaagctatgcgaaatcaagtcaggatatggcgactcagattggtcaatctattacggataccttgcaagcacctctagataaaattgcgtctagcgtacaacaagtgagtggtgaccaaggttcagccgtccaagaactcatgactgatgtgcttacagcctttatgagtaaattggagtctacgttcggcagtcaaatgacgggcatgaatgagatgatgactcaatcagtatctgctatgaaggaaatgcaattaggtttctctcaattactgacagatatgaaaattaatagtgaaacttcgacgaaaacattagaaatacagatgtcgaaaatgattgaagatattcaacaaaaacaaaatgagatgtctgatcaaatgaatttaatggtggatcatttatctcaaggtgccgcaaaaattggagaacaaggtcaacatgcgattgagcagttaaatggcaaagtctcggagttgatggggaatctaggcggaacgatgtctgagttaatgtcagatgtcacgaaacagcgtatggaacaagatcgtgtaattctagaaaatcagcaaaaattgcacgaacaatcatctacattaattgataatttaggaactgaaattaaagatttgattgcacacagtcaaaatgcggtccaagtatataaagaaaatattcagaaattatctcaagtgacaacggatagtattacgggtatgaataacggtgctgaaaaaatgcgcttagcttctgaacagtttaatactgcgggcagttctttgattacagtgactgataagacatcacagctaattgcagaagtaagtaccacctctacgcatttgaccagcgcaagcagcaatttaatctctctattgaaagactataaagactcacaagagagtgtcaaacaggcaatcagtactttagatggtttgattaaacaagctcaatctgaagctggtatgagtaccaaaatgcttgaagatatgaatcacatgacaaatgcattgaatcaagtgaagaaagaaatgcaggattatcttgagcaagtcagtgatgtgctggtgaaaggttttgacagttttggttcctcagtggaaaccagcttaaatcattctttaggagcttttgataatacccttgatcaagctgtaaaacgccttgcaactggtgtagagggcttgggtaattttgtagaagatctggaagatcttgtacaacaaaagaaaaactaa

SEQ ID NO: 8360 - DNA, 732 bp, Acinetobacter baumannii 1419130
atgttaggtaacaggtactctaagaaaccacgttctaaagatgatggtgaaaaacctttttggatttcattcgctgatttaatgacagcattaatgaccttgtttttagtcgtaatggctgtgtcattaatggtcgtaacgaaaaaaatcaatgaagcgactcaagccgaaaatcaacgtagttcagagattttggatatttgtactagtattcaaaatgacgccgcgttgaaaaacaagattattgctgttgattgtaaggacaatcgtatcaactttggagaagctggtcggtttggccataatgactaccggttaaatgcagcaggtgtagaggcattaaatacgttagtacccattgttttaaatgctgctaatagtgaaaatggaaaaaaatggtttaaacaaattgtgattgaaggattcacagatacggacggttcatatctctataacttaaacttaagtttacgtcgttcagaatgggtcatgtgcaatttactcgatcccaagtttagccaagggttaagtttaactgaagcacaaaagaaccaggttaaacaattatttttagctggtggggtctcttttaattcagctaaggatagtaaagaagcctcacgtcgtgttgagctacggatgcaattctatggtttaaaagaaaaagagaacgctgaaccgcaacctcattttgtttcagcacctgttgaaacatgccaattgacacggtga

SEQ ID NO: 8361 - DNA, 1401 bp, Acinetobacter baumannii 1419130
atgagtattgcgaatctgaaacgtcgtcttgaagaaaaaataagtgtattttctgaaccaactcatatacagactaaatttgttagacctcagcgtttaatgaaaacattgtcgattattgagcataaactcgatgatcttgaaaatgtacaaccattagaagaaaaaattatcaaatcagttctcaaacttgaacaacatgggtttgatgggatgactaaacgagattggaaaaatttggcttggtctctcagtaaaaaactgcccaattatgaagaaaaacttttattcacacctgtaggtgtaagattaattgattatttcaaccaattgggaattgaccaactccagtttgtttattttccactgttgtatagttattttgcttttgagcaacatgaactagaaaacttacctagtaattggattcagttaagaaaaatactagatgaaaataaatcttcgatatttaaagcttcaactcggcctaaaaaatggatgacgactcttatagataattcagaggttttaaccacagaacctacgaaaaaatttgtacgtgaatttttacaagataatgatgaaaacagagttgctaatcaattagaaagtttaagaatagcttcggttagttggttttgggatgatttgattcgatctgcaattaagtcgatcaagacaatgaaagaagatgagtattttcaaattatcccacgttttttagtattgcttgaaaaaaataaaatatatgcgacggatattttagctgcgcttctagaacggtatgctagtacctctcagagagagaaagtacatgaggtattaaaacatctagcattggatcagtggggtaatcctcagtatgaatcatcagcgggatggaataacgtaaatgctgataccaaaaaaatggtgattcagtggtttgtaagggcagatttagaagcattctttacgctatttagtcgaacggctgatgtaaatcgctttaattactggattaaatatattgataagatttctttttctcaaatttttcttggaccagcggcattatattctagtcaaatagaacataaaaactttagagaagttaataaagggcggttgaaacgacttattggatcaactcaaactaataatgcatttatgctaaaaattgacaatgtatatgttattgatttttcagatacgggaaatgcctgttatattgttgataaaataccgtataaagaaaatagtagagatgtacatcgcgatactttgaaaccttggaagcatttattaaaattaagtcatacttcaggttggcaaacacgatttgatgaaaaactagctgaattgggaatcttttccagtcaagcaaataattctaattcaagatataaaaggcattattaa

SEQ ID NO: 8362 - DNA, 3204 bp, Acinetobacter baumannii 1419130
atgaagctagcattctggaaaaagaaaaaaagtactgactctgttgttgaagataacttgatggcgagtataaagtctttacaatatgatgacgttggattgatttatccttatcaacagaatgctaaaaatgacgctgatttttattgggaaagtctagaagaagaagatatcgcctatctcatggatgatcagtatgtattgccatgggaggagctgtttcagcttcagcaagatcccgaacatagtaacgtacttaatttactcaacttaccaagtccaacgaatttacatccagtgattcgtagtgagggaggattaagtgatcctgattttaaaatcattctagatggatggtgtgatcaaaataggattaagtctaaaggcctaattaaacgaataggtgctgtactgaatgttgatggtcaagaatatttattaaatgaaacgacttggaagcttttagaaaaaattaaagaatttgctcgtatttcaaataaagataataagctcaatcaaaagtattgggctcaaatacgaagtttagctaatcgaagtcaggcaaatttagatgagtttcttcgtaagaccgtggtacttgcacctgaaaaattacaattaaatctacgtaagaacttgattagtcaggaatcagttgtagaagtacaaccctcctttgaggaggcaccgtcaaattggttgcaaacttttgatcactataatcaggtacaagatcaatatagcattagcctaccagatggtggagtcgctcatgtagtcattgatcctcaagtcaaaaatgtgctgagtgaaattaaaaagatgccgaatagacgtgtatctggtgagcgcgctcaaacatttttgcataaccccttcgcgcaattaggagatgatgccacagaggtcatctctcctgaaggttttgaaaaatcaaagcaagatgcagaaatctatagttacagcttacagatatataaattctataatgagttagggcattatgtttctgctcaattaactcttaacgaaaattcaggtcgtgaacaacaaccgattctgttggaactctccaatctagagcaaacaaaatattttatctctgcttatgaaaagccatcaccaattttcatgtgggcgggttatacaattgataaaacgagctatttggatcatcaggttcaagagttaaaaagtgatctaacagaaatccaaaaatatgaagatgagttacaagcacagcaagttttagatctatctaattacagtgatcgggtcattggtataggtgaagcacaaaaactaaactctgagtttattcaaagagacagtggtgaatcagagtggttgccacagcatctcatggagttggaagaacaactacaagatcgcttgtctaatgaagcaatagagatgcttgaacagcgtatcaaacaggctgagcaagaaggtaaagatcaggttctaattcctaatgcgaacactgaagtctcattagatgacgctaaaaaattatttaatagtctgagtgattcaaatagaaaagagtctattgaaacattagaagaacctacggttaatttacagaaaaaaaagaaagataccttactcattgcgaataacattgataaagctgagtttactaaacaacgagcagatcaattggtttttgatgagaagaaccatattccagctagattgccttcaagtttcagaagtcaggaatttagtttaaaaccacatcaggagtatgggattgcatggttgcagaatctacatcaatatgcaccaaaacaggtaagtggctgccttttagcagacgatatgggattggggaagaccctgcaattgttgtgctttattggtgaatacttagaaaatgcaaaagataaaaaaccagttttagtggttgctccagtttcattgttagaaaattgggaggcagaagcaaatcggttcttcagtgctaaatttgctaagatcctaagtctatatggtgagaatttaaaagatcgaaaaattcccaagcatttaatatctgctcaattaagagatgatcatggtattacccatttgcttgaagaagattggcgaggtgatgcggatattgtcctcacaacctatgagacaatgcgtgatctagagttttctttagcacgagttgattggggaattatggtttgcgatgaagcacaaaaaattaaagttcctacagcaatggtgactaaagcggctaaagctcaaaaagcggacttcaaaattgcatgtacaggcactcctgttgagaactcattgactgatctatggtgcttatttgattttatccaagaaaatttgttagggtcattgaatgaatttggaaaaacttatcgtcgccctatagaaaatcttgataatgtggataatgaagtattggaacaattacggaacttgattgcaccacaagttttaagacgaatgaaacatgatgttgctgacttaccagaaaaaattgaagtaaatcattgtaaaaatattacgatttcttcacttcaacgtcacttatatgcggatgtaattaatcactacagaaagttgtctgaagaaggtaatcaaggtgcgatgttggcatcactgcacagtatgcgaatgatttgtgcacatccattccaattgcaaccgaatgcttcaattcatgaatcacctaaagtagattggttgattaaaacattagaagcaattaaggcaaagaatgaaaaagttattatttttacagaatttagagatattcaagtattcctgaaacggattcttctagaacgattcggcttaaatgttacaaccgttaatggggattcaaatacaagtagtaaaaaaggtttaacacggcaaaaccttattgatagattccaagcaactagtggttttaatgtgattattttgtcaaccactgctgtaggctttggcgttaatatccaaaaagctaatcatgtcattcattatacgcgcagttggaatcctgccaaggaagatcaggcaactgaccgtgcgtatcgtataggacaagataaagaagtttttgtttactacccatcaatagcagcaaatgattttgatacttttgagataaaattagaccgacttttatcaagtaagcgggctctggcagatgatatgctgcagccgagtagagaacttagcaaagaattgatcgaaatgatttag

SEQ ID NO: 8363 - DNA, 2061 bp, Acinetobacter baumannii 1461402
atgttggcttttgctgaatttctgcagaattattttatcattcctgtgggaatgctcatttttgtattatggattgggtttaaattctattctaaatatatcaaacctgccaaaaaattaagtgggcaattatcagtgctaattaatgacttcaaaggaatggataaaaaccctagtcgaaataagcattcattagatgaaaaattcgaaaataatacgcctttaaaacatgcttggttgaattataaaaagtctcttcatgacatttatgaaactgtagatggagaagatgtactaggttcctcacgtgcaacagtatcaagtgatgtatttttttctcaatcagtgattgtggatacccctttaagagttgagttttataagcacttgccaggtattatcactggtgtaggtattattgctacatttgctggccttctatttggattattagcttttgatcctgcaggtgatccagcaaaagttcaagacagtttaggcttgttattaggtggggtaagtgaagcattcatggcttctgcacttgcgatagggactgcaatgattatcacttggcgcgaaaaatcgtggttgcgtcagtgttatgaacagttagaaactttaacgacagaaattgataagctttttgaagccgattctactggagaagaatatttatccaagcttgttaaattatcgaaatcgagcgaaagcactgcccgtcaattaaaagatagtctagtgaatgaattaaaagtcatgatgacgaatttggttgaagaaaataaaaagaatcagattgccttttctgcacagttaagtgaaaactatgcgaaatctagtcaggatatggcgactcagattggtcaatcgattacggataccttgcaagcacctctagataaaattgcgtctagcgtacaacaagtgagtggtgaccaaggttcagccgtccaagaactcatgactgatgtgcttacagcctttatgagtaaattggagtctacgtttggcagtcaaatgacgggcatgaatgagatgatgactcaatcagtatccgccatgaaggagatgcaattaggtttttcccaattactgacagatatgaaaattaatagtgaaacttcgacgaaaacattagaaatacagatgtcgaaaatgattgaagatattcaacaaaaacaaaatgagatgtctgatcaaatgaatttaatggtggatcatttatctcaaggtgccgcaaaaattggagaacaaggccaacatgcgattgagcagttaaatggcaaagtctcggagttgatagggaatctaggcggaacgatgtctgagttaatgtcagatgtcacgaaacagcgtacggaacaagatcgtgtaattctagaaaatcagcaaaaattgcacgaacaatcatctgcattaattgataatttaggaactgaaattaaagatttgattgcacacagtcaaaatgcggtccaagtctataaagaaaatattcagaaattatctcaagtgacaacggatagtattacgggtatgaataacggcgctgaaaaaatgcgcttagcttctgaacagtttaatactgcgggcagttctttgattacagtgactgataagacatcacagctaattgcagaagtaagtaccacctctacgcatttgaccagcgcaagcagcaatttaatctctctattaaaagactataaagactcacaagagagtgttaaacaggcaatcagtactttagacggtttaattaaacaagctcaagccgaagttggtatgagcagtgaaatgctgaaagatatgaatcagatgacaactgcactcaatcaagtgaagaaagaaatgcaggattatcttgagcaagtcagtgatgtgttggtgaaaagctttgagagttttggttcctctgtagaaaccagcttaaatcattctttaggtgcttttgataatacacttgatcaagctgtaaaacgccttgcaacgggtgtagaaggcttgggtagttttgtagaagatctggaagatctcgtacaacaaaagaaaaactaa

SEQ ID NO: 8364 - DNA, 732 bp, Acinetobacter baumannii 1461402
atgttaggtaacaggtactctaagaaaccacgttctaaagatgaaggtgaaaaacctttttggatttcatttgctgatttaatgacagcattaatgaccttgtttttagtcgtaatggctgtgtcattaatggtcgtaacgaaaaaaatcaatgaagcaactcaagctgaaaatcaacgtagttcagagattatggatatttgtactagtattcaaaatgatgccgcgttgaaaaacaagattattgctgttgattgtaaggacaatcgtatcaactttggagaagctggtcggtttggccataatgactaccggttaaatgcagcaggtgtagaggcattaaatacgttagtacccattgttttaaatgctgctaatagtgaaaatggaaaaaaatggtttaaacaaattgtgattgaagggttcaccgatacagatggttcatatctttataacttaaacttaagtttacgtcgttcagaatgggttatgtgcagtttacttgattcaaaatttagtcatgggttaagtctgagtgatgcacaaaagaaccaagttaaacaactgtttttggccggtggcgtttcttttaattcagctaaggatagtaaagaagcctcacgtcgtgttgagctacggatgcaattctatggtttaaaagaaaaggaaaacgctgaaccacagccacatttcgtctcatctcctgttgaaacatgccaattgacacggtga

SEQ ID NO: 8365 - DNA, 1401 bp, Acinetobacter baumannii 1461402
atgagtattgcgaatctgaaacgtcgtcttgacgaaaaaataagtgtattttctgaaccaactcatatacagactaaatttgttagacctcagcgtttaatgaaaacattgtcgattattgagcataaattcgatgatcttgaaaatgtacaaccattagaagaaaaaattatcaaatcagttctaaaatttgaacaacaagggtttgatggtctgactaaacgagattggaaaaatttggcttggtctctcagtaaaaagctgcccaattatgaagaaaaacttttattcacacctgtaggtgtaagattaattgattatttcaaccaattgggaattgatcaacttaagtttgtttattttccattgttgtatagctatttttcctttcaagcaaaggaattagaaaaacaacctgatagttgggttaagttaagaaatatattaaatacgaacaaatcttccgtatttaaaaattcgactcgactaaaaaaatggatgacgactcttatagataattcagaggttttaactacagaacctacgaaaaaatttgtacgtgattttttacaagataatgatgacaacagagttgctaatcaattagaaagtttaagaatagcttcgggtagttggttttgggatgatttaatacgttcatccattaaatcaattaaaacaatgaaagaggatgagtattttaaaattattccacgttttttagtattgcttgaaaaaaataaaatttataaaactactattttagctacacttttagatcgttatgctagtacttctcagagagagaaagtacatgaggtattaaaacatctagcattaaatcaatggggtaatcctcagtatgaatcatcagcgggatggaataacgtgaatgcagacaccaaaaaaatggtgattcagtggtttgtaagggcagatttagaagcttttttcaatttattcagtcgcgtagcagatatagagcgttttaattactggattaaatatattgataagatttctttttcccagattttcttaggtcctaatgcattacactcgactcaggcagagcatattaaatttagagaaatgaataaaggaaggctgaaacgtttaactcgatcgactgcaaataataatgcttttatgctcaaaattgaaaatgtttatgttatggatttttcgagtgtaggtaatgcttgttatattacaaattcaataccttatagtgaaagagcaagggaggtcagtattgatgagctcaaaccatggccacacttattaaaattaagtcatacaccaggttggcaaattcgatttgatgaaaaattagctgaattaggtattttctctagttcaactaataattctaattcaagatataaaaggcattattaa

SEQ ID NO: 8366 - DNA, 3204 bp, Acinetobacter baumannii 1461402
atgaagctagcattctggaaaaagaaaaaaagtactgactgtgttgttgaagataacttggtggccagtataaagtctttacaatatgacgaagttggattgatttctgcttatcaacaaaatgctaaaaatgacgctgatttttattgggaaagtctagaagaagaagatatcgcgtatctcctggatgatcagtatgtattgccatgggaggagctgtttcagcttcagcaagatcccgaacatagtaacgtacttaatttactcaacctacctagtccaacaactttatatccagtgattcgtagtgagggaggattaagtgatcctgattttaaaatcattctggatggatggtgtgatcaaaataggattaagtctaaaggcctaattaaacgaataggtgcggtactgaatgttgatggtcaagaatatttactgaatgaaacgacttggaaacttgtagaaaaagttaaagaatttgctcgtatttcaaataaagataataagctcaatcaaaagtattgggctcaaatacgaagtttagccaatcgaagtcaagcaaatttagatgagtttcttcgtaagaccgtggtacttgcacctgaaaaattacaattgaatctacgtaaaaacttgattagtcaggaatcagttgtagaagtacagcccgactttgatgagtcaccgtcaaattggttgcaaacttttgatcgctataatcaggtacaagatcaatatagcattagcctaccagatggtggagtcgctcatgtagtcattgatcctcaagtcaaaaatgtactgagtgaaattaaaaagatgccgaatagacgtgtatctggtgaacgcgctcaaatatttttgcataaccccttcgcgcaattaggagatgacgccacacaggtgatctctccagaggatttcgaacaatcaaagcaagaagcagaaatctatagttatagcttacagctagataaattttataatgagtctgggtattatatttctgctcaattaactctcaacgaaaactcaggtcgtgaacaacaaccgattctgttagaactttctaatctagagcaaacaaaatattttattactgcctatgaaaagccatcaccaattttcatgtgggcgggttatacaattgataaaacaagttatttagatcatcaggttcaagaattaaaaagtgatctaacagaaatccaaaaatatgaagatgagttacaagcacagcaagttttagatctatccaattacagtgatcgggtcattggtatcggtgaagcacaaaaactaaactctgagtttattcaaagagatagtggtgaatcagagtggttgccacagcatctcattgagttggagcaacaattccaggatcgcttctccgatgaggcaatagaattgcttgaacagcgtatcaaacaggctgagcaagaaggtaaagatcaggttctaattcctaatgcgaatactgaagtctcactagatgacgctaaaaaattattaaatagtctgagtgattcaaatagaaaagaacctattgaaacattagaagaatctacggttaatttacagaaaaaaaagaaagatacattactcattgcgaataacattgataaagctgagtttactaaaaaacgagcagatcaattggtttttgatgagaagaaccatcccccagctagattgccttcaagtttcagaagtcaggaattcggtttaaaaccgcatcaggagtacggagttgcatggttgcagaatctacatcaatatgcaccggaacaggtaagtggctgccttttagcagacgatatgggattggggaagaccctgcaattgttgtgctttattggtgaatacttagaaaatgcaaaagataaaaaaccagttttagtggttgctccagtttcattgttagaaaattgggaggcagaagcaaatcggttcttcagtgctaaatttgctaagatcctaagtctatatggtgaaaatttaaaagatcgaaaaattcccaagcatttaatatctgctcaattaagagatgatcatggtattacgcatttgcttgaagaagattggcgaggtgatgcggatattgtcctcacaacctatgaaacgatgcgtgatctagagttttctttagcgcgagttgattgggggattatggtttgcgatgaagcacaaaaaattaaagtacctacggctatggtgacaaaagcggctaaagctcaaaaggcagactttaaaatagcatgtactggtactccagtggaaaattcactcactgacttatggtgcttatttgattttatacaagaaaatttgctaggttcattgaatgaatttggaaaaacttatcgtcgtcctatagaaaatattgagaatgtggataatgaagtattggaacaattacggaatttgattgcaccacaagttttaagacggatgaaacatgatgttgctgatttaccagaaaaaattgaagtagatcattgtaaaaatattacgatttcttcacttcaacgtcacttatatgccgatgtaattaatcgctacaggaggttgtctgaagaaggtaatcaaggtgcgatgttggcatcactgcacagtatgcgaatgatttgtgcacatccattcctattgcaaccgaatgcttcaattcacgaatcccctaaagtagattggctgatcaaaaccttggaagcaattaaggtaaagaatgaaaaagttattatcttcactgaatttagagatattcaagtctttctgaaacggattcttctagaacggttcggcttaaatgttacaaccgttaatggggattcaaatacaagcagtaaaaaaggtttaacacggcaaaaccttattgatagattccaagcaactagtggttttaatgtaatcattttatccaccactgctgtaggttttggcgttaatatccaaaaagctaatcatgttattcattatacgcgcagttggaatcctgccaaggaagatcaggcaactgaccgtgcttatcgaataggacaagataaagaagtttttgtttactacccatcaatagcagcaaatgattttgatacttttgaaataaaattagatcgacttttatcaagtaagcgggctctggcagatgatatgctgcagccgagtagagaacttagcaaagaattgattgaaatgatttag

SEQ ID NO: 8367 - DNA, 2061 bp, Acinetobacter baumannii 1295743; identical to SEQ ID NO: 8359

SEQ ID NO: 8368 - DNA, 732 bp, Acinetobacter baumannii 1295743; identical to SEQ ID NO: 8360

SEQ ID NO: 8369 - DNA, 1401 bp, Acinetobacter baumannii 1295743; identical to SEQ ID NO: 8361

SEQ ID NO: 8370 - DNA, 3204 bp, Acinetobacter baumannii 1295743
atgaagctagcattctggaaaaagaaaaaaagtactgactctgttgttgaagataacttgatggcgattataaagtctttacaatatgatgacgttggattgatttatccttatcaacagaatgctaaaaatgacgctgatttttattgggaaagtctagaagaagaagatatcgcctatctcatggatgatcagtatgtattgccatgggaggagctgtttcagcttcagcaagatcccgaacatagtaacgtacttaatttactcaacttaccaagtccaacgaatttacatccagtgattcgtagtgagggaggattaagtgatcctgattttaaaatcattctagatggatggtgtgatcaaaataggattaagtctaaaggcctaattaaacgaataggtgctgtactgaatgttgatggtcaagaatatttattaaatgaaacgacttggaagcttttagaaaaaattaaagaatttgctcgtatttcaaataaagataataagctcaatcaaaagtattgggctcaaatacgaagtttagctaatcgaagtcaggcaaatttagatgagtttcttcgtaagaccgtggtacttgcacctgaaaaattacaattaaatctacgtaagaacttgattagtcaggaatcagttgtagaagtacaaccctcctttgaggaggcaccgtcaaattggttgcaaacttttgatcactataatcaggtacaagatcaatatagcattagcctaccagatggtggagtcgctcatgtagtcattgatcctcaagtcaaaaatgtgctgagtgaaattaaaaagatgccgaatagacgtgtatctggtgagcgcgctcaaacatttttgcataaccccttcgcgcaattaggagatgatgccacagaggtcatctctcctgaaggttttgaaaaatcaaagcaagatgcagaaatctatagttacagcttacagatatataaattctataatgagttagggcattatgtttctgctcaattaactcttaacgaaaattcaggtcgtgaacaacaaccgattctgttggaactctccaatctagagcaaacaaaatattttatctctgcttatgaaaagccatcaccaattttcatgtgggcgggttatacaattgataaaacgagctatttggatcatcaggttcaagagttaaaaagtgatctaacagaaatccaaaaatatgaagatgagttacaagcacagcaagttttagatctatctaattacagtgatcgggtcattggtataggtgaagcacaaaaactaaactctgagtttattcaaagagacagtggtgaatcagagtggttgccacagcatctcatggagttggaagaacaactacaagatcgcttgtctaatgaagcaatagagatgcttgaacagcgtatcaaacaggctgagcaagaaggtaaagatcaggttctaattcctaatgcgaacactgaagtctcattagatgacgctaaaaaattatttaatagtctgagtgattcaaatagaaaagagtctattgaaacattagaagaacctacggttaatttacagaaaaaaaagaaagataccttactcattgcgaataacattgataaagctgagtttactaaacaacgagcagatcaattggtttttgatgagaagaaccatcttccagctagattgccttcaagtttcagaagtcaggaatttagtttaaaaccacatcaggagtatgggattgcatggttgcagaatctacatcaatatgcaccaaaacaggtaagtggctgccttttagcagacgatatgggattggggaagaccctgcaattgttgtgctttattggtgaatacttagaaaatgcaaaagataaaaaaccagttttagtggttgctccagtttcattgttagaaaattgggaggcagaagcaaatcggttcttcagtgctaaatttgctaagatcctaagtctatatggtgagaatttaaaagatcgaaaaattcccaagcatttaatatctgctcaattaagagatgatcatggtattacccatttgcttgaagaagattggcgaggtgatgcggatattgtcctcacaacctatgagacaatgcgtgatctagagttttctttagcacgagttgattggggaattatggtttgcgatgaagcacaaaaaattaaagttcctacagcaatggtgactaaagcggctaaagctcaaaaagcggacttcaaaattgcatgtacaggcactcctgttgagaactcattgactgatctatggtgcttatttgattttatccaagaaaatttgttagggtcattgaatgaatttggaaaaacttatcgtcgccctatagaaaatcttgataatgtggataatgaagtattggaacaattacggaacttgattgcaccacaagttttaagacgaatgaaacatgatgttgctgacttaccagaaaaaattgaagtaaatcattgtaaaaatattacgatttcttcacttcaacgtcacttatatgcggatgtaattaatcactacagaaagttgtctgaagaaggtaatcaaggtgcgatgttggcatcactgcacagtatgcgaatgatttgtgcacatccattccaattgcaaccgaatgcttcaattcatgaatcacctaaagtagattggttgattaaaacattagaagcaattaaggcaaagaatgaaaaagttattatttttacagaatttagagatattcaagtattcctgaaacggattcttctagaacgattcggcttaaatgttacaaccgttaatggggattcaaatacaagtagtaaaaaaggtttaacacggcaaaaccttattgatagattccaagcaactagtggttttaatgtgattattttgtcaaccactgctgtaggctttggcgttaatatccaaaaagctaatcatgtcattcattatacgcgcagttggaatcctgccaaggaagatcaggcaactgaccgtgcgtatcgtataggacaagataaagaagtttttgtttactacccatcaatagcagcaaatgattttgatacttttgagataaaattagaccgacttttatcaagtaagcgggctctggcagatgatatgctgcagccgagtagagaacttagcaaagaattgatcgaaatgatttag

SEQ ID NO: 8371 - DNA, 2061 bp, Acinetobacter baumannii 466760
atgttagcttttgctgaatttctgcagaattattttattattcctgtgggaatgctgatttttgtattatggattgggtttaaattctattctaaatatatcaaacctgctaaaaaccttagtgagcaattatcagtactaattaatgccttaaaaggaatggataaaaactctagtctaaataagcattcattagatgcaaaattcgaaaatgatacgcctttaaaacatgcttggttgaattacaaaaattcttttcatgacatctatgaaactgtagatggagaagatgtactagtttcctcacgtgcaacagtatcaagtgacgtatttttttctcaggctgtcattgtggatacccctttaagagttgagttttataagcacttgccaggtattatcactggtgtaggtattattgctacatttgctggccttctatttggattattagcttttgatcccgcaggcgatccagcaaaagttcaagacagtttaggcttgttattaggtggggtaagtgaagcattcatggcttctgcacttgcgatagggactgcaatgattatcacttggcgcgaaaaatcgtggttgcgtcagtgttatgaacagttagaaactttaacgacagaaattgataagctttttgaaactgattccaccggagaggaatatctagctaaattattaaaatcctctcaagcaaacgaaaccaatgctcgtcaattaaaagatagccttgttaatgacttaaaagtcatgatgacgaatttggttgaggaaaataaaaagaatcagattgcttttgctgcacagttaagtgaaagctatgcgaaatcaagtcaggatatggcgactcagattggtcaatctattacggataccttgcaagcacctctagataaaattgcgtctagcgtacaacaagtgagtggtgaccaaggttcagccgtccaagaactcatgactgatgtgcttacagcctttatgagtaaattggagtctacgttcggcagtcaaatgacgggcatgaatgagatgatgactcaatcagtatctgctatgaaggaaatgcaattaggtttctctcaattactgacagatatgaaaattaatagtgaaacttcgacgaaaacattagaaatacagatgtcgaaaatgattgaagatattcaacaaaaacaaaatgagatgtctgatcaaatgaatttaatggtggatcatttatctcaaggtgccgcaaaaattggagaacaaggtcaacatgcgattgagcagttaaatggcaaagtctcggagttgatggggaatctaggcggaacgatgtctgagttaatgtcagatgtcacgaaacagcgtatggaacaagatcgtgtaattctagaaaatcagcaaaaattgcacgaacaatcatctacattaattgataatttaggaactgaaattaaagatttgattgcacacagtcaaaatgcggtccaagtatataaagaaaatattcagaaattatctcaagtgacaacggatagtattacgggtatgaataacggtgctgaaaaaatgcgcttagcttctgaacagtttaatactgcgggcagttctttgattacagtgactgataagacatcacagctaattgcagaagtaagtaccacctctacgcatttgaccagcgcaagcagcaatttaatctctctattgaaagactataaagactcacaagagagtgtcaaacaggcaatcagtactttagatggtttgattaaacaagctcaatctgaagctggtatgagtaccaaaatgcttgaagatatgaatcacatgacaaatgcattgaatcaagtgaagaaagaaatgcaggattatcttgagcaagtcagtgatgtgctggtgaaaggttttgacagttttggttcctcagtggaaaccagcttaaatcattctttaggagcttttgataatacccttgatcaagctgtaaaacgccttgcaactggtgtagagggcttgggtaattttgtagaagatctggaagatcttgtacaacaaaagaaaaactaa

SEQ ID NO: 8372 - DNA, 732 bp, Acinetobacter baumannii 466760; identical to SEQ ID NO: 8360

SEQ ID NO: 8373 - DNA, 1401 bp, Acinetobacter baumannii 466760; identical to SEQ ID NO: 8361

SEQ ID NO: 8374 - DNA, 3204 bp, Acinetobacter baumannii 466760
atgaagctagcattctggaaaaagaaaaaaagtactgactctgttgttgaagataacttgatggcgagtataaagtctttacaatatgatgacgttggattgatttatccttatcaacagaatgctaaaaatgacgctgatttttattgggaaagtctagaagaagaagatatcgcctatctcatggatgatcagtatgtattgccatgggaggagctgtttcagcttcagcaagatcccgaacatagtaacgtacttaatttactcaacttaccaagtccaacgaatttacatccagtgattcgtagtgagggaggattaagtgatcctgattttaaaatcattctagatggatggtgtgatcaaaataggattaagtctaaaggcctaattaaacgaataggtgctgtactgaatgttgatggtcaagaatatttattaaatgaaacgacttggaagcttttagaaaaaattaaagaatttgctcgtatttcaaataaagataataagctcaatcaaaagtattgggctcaaatacgaagtttagctaatcgaagtcaggcaaatttagatgagtttcttcgtaagaccgtggtacttgcacctgaaaaattacaattaaatctacgtaagaacttgattagtcaggaatcagttgtagaagtacaaccctcctttgaggaggcaccgtcaaattggttgcaaacttttgatcactataatcaggtacaagatcaatatagcattagcctaccagatggtggagtcgctcatgtagtcattgatcctcaagtcaaaaatgtgctgagtgaaattaaaaagatgccgaatagacgtgtatctggtgagcgcgctcaaacatttttgcataaccccttcgcgcaattaggagatgatgccacagaggtcatctctcctgaaggttttgaaaaatcaaagcaagatgcagaaatctatagttacagcttacagatatataaattctataatgagttagggcattatgtttctgctcaattaactcttaacgaaaattcaggtcgtgaacaacaaccgattctgttggaactctccaatctagagcaaacaaaatattttatctctgcttatgaaaagccatcaccaattttcatgtgggcgggttatacaattgataaaacgagctatttggatcatcaggttcaagagttaaaaagtgatctaacagaaatccaaaaatatgaagatgagttacaagcacagcaagttttagatctatctaattacagtgatcgggtcattggtataggtgaagcacaaaaactaaactctgagtttattcaaagagacagtggtgaatcagagtggttgccacagcatctcatggagttggaagaacaactacaagatcgcttgtctaatgaagcaatagagatgcttgaacagcgtatcaaacaggctgagcaagaaggtaaagatcaggttctaattcctaatgcgaacactgaagtctcattagatgacgctaaaaaattatttaatagtctgagtgattcaaatagaaaagagtctattgaaacattagaagaacctacggttaatttacagaaaaaaaagaaagataccttactcattgcgaataacattgataaagctgagtttactaaacaacgagcagatcaattggtttttgatgagaagaaccatcttccagctagattgccttcaagtttcagaagtcaggaatttagtttaaaaccacatcaggagtatgggattgcatggttgcagaatctacatcaatatgcaccaaaacaggtaagtggctgccttttagcagacgatatgggattggggaagaccctgcaattgttgtgctttattggtgaatacttagaaaatgcaaaagataaaaaaccagttttagtggttgctccagtttcattgttagaaaattgggaggcagaagcaaatcggttcttcagtgctaaatttgctaagatcctaagtctatatggtgagaatttaaaagatcgaaaaattcccaagcatttaatatctgctcaattaagagatgatcatggtattacccatttgcttgaagaagattggcgaggtgatgcggatattgtcctcacaacctatgagacaatgcgtgatctagagttttctttagcacgagttgattggggaattatggtttgcgatgaagcacaaaaaattaaagttcctacagcaatggtgactaaagcggctaaagctcaaaaagcggacttcaaaattgcatgtacaggcactcctgttgagaactcattgactgatctatggtgcttatttgattttatccaagaaaatttgttagggtcattgaatgaatttggaaaaacttatcgtcgccctatagaaaatcttgataatgtggataatgaagtattggaacaattacggaacttgattgcaccacaagttttaagacgaatgaaacatgatgttgctgacttaccagaaaaaattgaagtaaatcattgtaaaaatattacgatttcttcacttcaacgtcacttatatgcggatgtaattaatcactacagaaagttgtctgaagaaggtaatcaaggtgcgatgttggcatcactgcacagtatgcgaatgatttgtgcacatccattccaattgcaaccgaatgcttcaattcatgaatcacctaaagtagattggttgattaaaacattagaagcaattaaggcaaagaatgaaaaagttattatttttacagaatttagagatattcaagtattcctgaaacggattcttctagaacgattcggcttaaatgttacaaccgttaatggggattcaaatacaagtagtaaaaaaggtttaacacggcaaaaccttattgatagattccaagcaactagtggttttaatgtgattattttgtcaaccactgctgtaggctttggcgttaatatccaaaaagctaatcatgtcattcattatacgcgcagttggaatcctgccaaggaagatcaggcaactgaccgtgcgtatcgtataggacaagataaagaagtttttgtttactacccatcaatagcagcaaatgattttgatacttttgagataaaattagaccgacttttatcaagtaagcgggctctggcagatgatatgctgcagccgagtagagaacttagcaaagaattgatcgaaatgatttag

SEQ ID NO: 8375 - DNA, 2061 bp, Acinetobacter baumannii 230853; identical to SEQ ID NO: 8363

SEQ ID NO: 8376 - DNA, 732 bp, Acinetobacter baumannii 230853; identical to SEQ ID NO: 8364

SEQ ID NO: 8377 - DNA, 1401 bp, Acinetobacter baumannii 230853; identical to SEQ ID NO: 8365

SEQ ID NO: 8378 - DNA, 3204 bp, Acinetobacter baumannii 230853; identical to SEQ ID NO: 8366

SEQ ID NO: 8379 - DNA, 2061 bp, Acinetobacter baumannii 1239920
atgttggcttttgctgaatttctgcagaattattttattattcctgtgggaatgctcatttttgtattatggattgggtttaaattctattctaaatatatcaaacctgctaaaaacctaagtgagcaattatcagtactaattaatgccttaaaaggaatggagaaaaactctagtctaaataagcattcattagatgcaaaattcgaaaatgatacacctttaaaacatgcttggttgaattacaaaaattcttttcatgacatctatgaaactctagatggagaagatgttctagtttcctcacgtgcaacggtatcaagtgacgtatttttttcacaagctgtcattgtggatacccctttaagagttgagttttataagcacttgccaggtatcatcactggtgtaggtattattgctacatttgctggccttctatttggattattagcttttgatcccgcaggtgatccagcaaaagttcaagatagtttaggcttgttattaggtggggtaagtgaagcattcatggcttctgcacttgcgatagggactgcaatgattatcacttggcgcgaaaaatcgtggttgcgtcagtgttatgaacagttagaaactttaacgacagaaattgataagctttttgaaactgattccactggagaggagtatctagctaaattattaaaatcctctcaggcaaacgaaaccaatgctcgtcaattaaaagacagccttgttaatgacttaaaaggcatgatgacgaatttggttgaggaaaataaaaagaatcagattgcttttgctgcacagttaagtgaaagctatgcgaaatcaagtcaggatatggcgactcagattggtcaatcgattacggataccttgcaagcacctctagataaaattgcgtctagcgtacaacaagtgagtggtgaccaaggttcagctgtccaagaactcatgactgatgtgcttacagcctttatgagtaaattggagtctacgtttggcagtcaaatggcgggcatgaatgagatgatgactcaatcagtatccgccatgagggagatgcaagtaggtttctcccaattactgacagatatgaaaattaatagtgaaacttcgacgaaaacattagaaatacagatgtcgaaaatgattgaagatattcaacaaaaacaaaatgagatgtctgatcaaatgaatttaatggtggatcatttatctcaaggtgccgcaaaaattggagaacaaggtcaacatgcgattgagcagttaaatggcaaagtctcggagttgatggggaaactaggcggaacgatgtctgagttaatgtcagatgtcacaaaacagcgtatggaacaagatcgtgtaattctagaaaatcagcaaaaattgcacgaacaatcatctgtattaattgacagtttaggaactgagattaaagatttaattgcacacagtcaaaatgcagtccaagtatataaagaaaatattcagaaattatctcaagtgacaacggatagtattacgggtatgaataacggtgctgaaaaaatgcgcttagcttctgaacagtttaatactgcgggcagttcttttattacagtgactgacaagacatcacagttaattgcagaagtaagtaccacctctacgcatttgtccaacgcaagcagcaatttaatctctctattgaaagactataaagactcacaagagagtgtcaaacaggcaatcagtactttggatggtttgattaaacaagcccaagcggaagctggtatgaacactaaaatgcttgaagatatgaaccacatgaccaatgcactgaatcaagtgaagaaagaaatgcaggattatcttgagcaagtcagtgatgtattagtgaaaagttttgagagttttggttcctccgtagaaaccagcttaaatcattctttaggtgcttttgataatacgctcgatcaagctgtaaaacgtcttgaaagcggtatagacgggctgagcggttttgtagagggtctggaagatctagtacaacaaaaaacagtttaa

SEQ ID NO: 8380 - DNA, 732 bp, Acinetobacter baumannii 1239920
atgttaggcaacagatattctaataaaccgcgttctaaagatgaaggtgaaaaacctttttggatttcatttgctgatttaatgacagctttaatgactttgttcttagtcgtaatggctgtgtcattaatggtcgtaacaaaaaaaatcaatgaagcgactcaagctgaaaatcaacgtagttcagagattttgaatatttgtaccagtattcaaaatgatgcagctttgaaaaataagatcattacggttgattgcaaggacaaccgtatcaactttggagaagctggtcggtttggccacaatgactaccggttaaatgctgcaggtgtagaggcattaaatacgttagtgccgattgttttaaatgctgccaatagtgaaaatgggaaaaaatggtttaaacaaattgtgattgaaggattcaccgatacggatggttcatatctctataacttaaacttaagtttacgtcgttcggaatgggtcatgtgtagtttactcgatcccaagtttagtcatgggttaagtctgagtgacgcacaaaagaaccagattaaacaattatttttggctggtggggtttcttttaattcagctaaggatagtaaagaagcttcacgtcgtgttgagctacggatgcaattttatggtttaaaagaaaaagagaatgctgaaccgcaacctcattttgtttcagcacctattgaaacatgtcagctaacacggtga

SEQ ID NO: 8381 - DNA, 1416 bp, Acinetobacter baumannii 1239920
atgagtatagcgaatctgaaacgtcgtcttgaagaaaaaataagtgtattttctgactcaactcatatacagactaaatttgttaagcctcagcgtttaataaaaagattatccattcttgaacataaatttgatgatcttgaaaatctacaaccattagaagaaaaaattatcaaatcagttctaaaactggaacaacatgggtttgatggtctgactaaacgagattggaaaaatctggcttggtctctcagtaaaaaactgccgaattatgaagaaaaaattttattcacaccagtaggtgcaagattaattgattatttcaaccaattaggaagtgaccaacttaagtttgtttattttccattgttgtatagctatttttcctttcaagcaaaggaactagaaaaacaacctgatagctgggttcagttaagaaatatattaaatacgaataaatctttggtatttaaaacgttgaatcggcctaaaaaatggatgacgactcttatagattattcagaggttttaaccacagaacctacgaaaaaatttgtacgtgaatttttacaggatagtaatgccaacacagttacctataaactggaaagtttaagaatatctgctaatagctggttttgggatgatttaatacagtcatccattaaatcaattaaaacaatgaaggaagatgagtattttcaaattatcgcacgttttttagtattgcttgaaaaaaataaaatatatacaaccgctattttagctgcacttctagaacgttatgctagtacttctcagagagagaaagtacatgaagtattaaaacatctggcattggatcaatggggtaatcctcagtatgaatcttcagcgggatggaataacgtaaatgctgataccaaaaaaatggtgattcagtggtttgtgagggcagatttagaagcattctttacgctatttagtcgtacggctgatgtaaatcgctttaattactggattaaatttattgataaaatctctttttctcaaatttatcttggtcctgaggcactatattcgcaacagcatgaacataaaagttttcgtaatttaaataaaggtcgcttaaaagaactgataggttcgactccttctaataatgcattcttgttgaaaatagataatgtttttgttattgatttttcagacactggtaatgcttgtttcttgtttaatgaatttccttatatagaaagctccctcaaaacgcatgtcagagctttaaaaaattaccatcataaaggttatattgataagttaggacatattggtaattggggagaaagatttgatcagcgtttagcggaattaggtatttttgctaatctacgtcagatgaataagtatcagcctaatcataaaaaccgttattaa

SEQ ID NO: 8382 - DNA, 3204 bp, Acinetobacter baumannii 1239920
atgaaattaacattctggaaaaggaaaaaaagtactgactctgttgttgaagataacttggtggcaagtataaagtctttacaatatgatgaagttggattgattcatccttatcaacagaatgctaaaaatgacgctgatttttattgggaaagtctagaagaagaagatatcgcgtatctcttagatgatcactatatattgccatgggaggagatgtttcagcttcagcaagatcccgaacatagtaacgtacttaatttactcaacttacccagtctaacgaatttacacccattgattcgtagtgagggaggattaagtgatcctgattttaaaataattctggatggatggtgtgatcaaaataggattaagtctaaaggcctaattaaacgaataggtgccgtactgaatgttgatggtcaagaatatttactgaatgaaacgacttggaagcttgtagaaaaagttaaagaatttgctcgtgtttcaaataaagataataagctcaatcaaaagtattgggctcaaatacgaagtttagctaatcgaagtcaggcaaatttagatgagtttcttcgcaagaccgttgtacttgcacctgaaaaattacaattgaatctacgtaagaacttgattagtcaggaatcagttgtagaagtacagcccgactttgatgaggcaccgtcaaattggttgcaaacttttgatcactataatcaggtgcaagatcaatatagcattagcctaccagatggtgggatcgttcatgtagtcgttgatcctcaagttaaaaatgtgctgaatgaaattaaaaagatgccgaatagacgtgtatccggtgaacgtgcccaaacatttttgcataacccctttgcacaattaggagatgatgccacacaggtcatctctccagaaagtttcgaaaaatcaaagcaagaagcagaaatctataattacagcttacagatagataaattttataatgagttagggcattatttttctgctcaattaactcttaacgaaaattcaggtcgtgaacaacaaccgattccgttggaactctccaatctagagcaaacaaaatattttatctctgcctatgaaaagccatcaccaattttcatgtgggcgggttatacaattgataaaacaagttatttagaccatcaggttcaagagattaaaagtgatctagcggaaatccaaaaatatgaagatgagctacaagcacaacaagtgttggatttatccaattacagtgaccgtgttattggtattggagaagctgtaaaactaaactctgagtttattctaagagacagcggtgaatcagagtggttgccacagcatctcatggcgttggagcaacaattccaagatcgcttctccgctgaggcaatagaattgcttgaacagcgtatcagacaggctgagcaagaaggtaaagatcaggttctaattcctaatgcgaacactgaagtctcactagatgatgctaaaaaattattaaatagtctgagtgattcaaatagaaaagaacctattggaacattagaagagcctagggttaatctacagaaaaaaaagaaagataccttactcattgcgaataatattgataaagctgagtttacgaaacaacgagccgatcaattagtttttgataagaagaatcatcctccagctagattgccttcaagttttaggagtcaggaattcagtttaaaacagcatcaggaatatggaattgcatggttgcagaatctacatcaatatgcaccagagcaggtaagtggctgtcttttagcagacgatatgggattggggaagaccctgcaattgttgtgctttattggtgaatacttagaaaatgcaaaagataaaaaaccagttttagtggttgctccagtttcattgttagaaaactgggaggcagaagcaaatcggttcttcagtgctaaatttgctaagatcctaagtctatatggtgagaatttaaaagatcgaaaaattcccaagcatttaatttctgctcaattgagagacgatcatggaattacgcatttgcttgaagaagattggcgaggtgatgcggatattgtcctcacaacctatgaaacgatgcgtgatctagagttttctttagcacgagttgattgggggattatgatttgcgatgaagcacaaaaaattaaagttcctacagcaatggtgactaaagcggctaaagctcaaaaggcagactttaaaatagcatgtactggtactccagtcgaaaattcactcaccgacttatggtgcttatttgattttattcaagaaaatttgctaggttcattgaatgaatttggaaaaacttatcgtcgtcctatagaaaatagtgaaaatactgacaataaggtattggaacaattacgacagttgattgcaccacaagtcttaagacggatgaaacatgatgttgccgacttaccagaaaaaattgaagtagatcattgtaaaaatattacgatttcttcacttcaacgtcacttatatgccgatgtaattaatcgctacagaaggttgtctgaagaaggtaatcaaggtgcgatgttggcttcactgcatagtatgcgaatgatttgtgcacatccatttcaattgcaaccgaatgcttcaatttatgaatcccctaaagtagattggctgatcaaaactttggaagtcattaagactaaaaatgaaaaagtcattatttttactgaatttagagacattcaagtgtttctgaaacggattcttctggaaagattcggcttaaatgtgacaacagtgaatggcgattccaatacgagtagtaaaaaaggtttaacacgacaaaacctgattgataaattccaagccacaagtggttttaatgtgattattttatcaacgactgctgtggggtttggcgtgaatattcaaaaggccaatcatgtcattcattatacgcgtagttggaatccagcaaaggaagatcaggcgactgaccgagcttatcgtatcggacaagataaagaagtttttgtttactatccgtcaattgctgcaaatgattttgatacttttgagataaaattagatcgacttttatcaagtaagcgggctctggcagatgatatgctgcagccgagtagagaacttagcaaagaattgatagaaatgatttag

SEQ ID NO: 8383 - DNA, 2067 bp, Acinetobacter baumannii 1566109
atgaattggttggtttgggctgaatttctgcagagttactatatcattccttttggtatgttcattttagtaacatatattggttacagattttatttaaagtatataacacctgctaaaaatcttaatacacaattagagtcagcaatcagtgctttaaaaaaggttgaagaacattctggtttcaataaaaattcactagattcaatatttgaaaatggtactcctttaaaacatgcttggttgaattacaaaaattcttttcatgacatctatgaaactgtagatggagaagatgttctagtttcctcacgtgcaacggtatcaagtgatgtatttttttcacaagctgtcattgtggatacccctttaagagttgagttttataagcacttgccaggtattatcactggtgtaggtattattgctacatttgctggccttctatttggattattagcttttgatcccgcaggcgatccagcaaaagttcaagacagtttaggcttgttattaggtggggtaagtgaagcattcatggcttctgcacttgcgatagggactgcaatgattatcacttggcgcgaaaaatcgtggttgcgtcagtgttatgaacagttagaaattttaacgacagaaattgataagctttttgaaactgattccactggagaggagtatctagctaaattattaaaatcctctcaggcaaacgaaaccaatgctcgtcaattaaaagatagccttgttaatgacttaaaagtcatgatgacgaatttggttgaggaaaataaaaagaatcagattgcttttgctacacatttaagtgaaagctatgcgaaatcaagtcaggatatggcgactcagattggtcaatctattacggataccttgcaagcacctctagataaaattgcgtctagcgtacaacaagtgagtggtgaccaaggttcagccgtccaagaactcatgactgatgtgcttacagcctttatgagtaaattggagtctacgttcggcagtcaaatgacgggcatgaatgagatgatgactcaatcagtatctgctatgaaggaaatgcaattaggtttctctcaattactgacagatatgaaaattaatagtgaaacttcgacgaaaacattagaaatacagatgtcgaaaatgattgaagatattcaacaaaaacaaaatgagatgactgatcaaatgaatttaatggtggatcatttatctcaaggtgccgcaaaaattggagaacaaggtcaacatgcgattgagcagttaaatggcaaagtctcggagttgatggggaatctaggcggaacgatgtctgagttaatgtcagatgtcacgaaacagcgtatggaacaagatcgtgtgattctagaaaatcagcaaaaactgcacgaacaatcatctacattaattgataatttaggaactgaaattaaagatttgattgcacacagtcaaaatgcggtccaagtatataaagaaaatattcagaaattatctcaagtgacaacggatagtattacgggtatgaataacggtgctgaaaaaatgcgcttagcttctgaacagtttaatactgcgggcagttctttgattacagtgactgataagacatcacagctaattgcagaagtaagtaccacctctacgcatttgaccagcgcaagcagcaatttaatctctctattaaaagactataaagactcacaagagagtgttaaacaggcaatcagtactttagacggtttaattaaacaagctcaagccgaagttggtatgagtagtgaaatgctgaaagatatgaatcagatgacaactgcactcaatcaagtgaagaaagaaatgcaggattatcttgagcaagtcagtgatgtgttggtgaaaagctttgagagttttggttcctctgtagaaaccagcttaaatcattctttaggtgcttttgataatacacttgatcaagctgtaaaacgccttgcaacgggtgtagaaggcttgggtagttttgtagaagatctggaagatctcgtacaacaaaagaaaaactaa

SEQ ID NO: 8384 - DNA, 603 bp, Acinetobacter baumannii 1566109
atggtcgtaacgaaaaaaatcaatgaagcaactcaagctgaaaatcaacgtagttcagagattatggatatttgtactagtattcaaaatgatgccgcgttgaaaaacaagattattgctgttgattgtaaggacaatcgtatcaactttggagaagctggtcggtttggccataatgactaccggttaaatgcagcaggtgtagaggcattaaatacgttagtaccaattgttttaaatgctgctaatagtgaaaatggaaaaaaatggtttaaacaaattgtgattgaagggttcaccgatacggatggttcatatctctataacttaaacttaagtttacgtcgttcagaatgggtcatgtgcagtttacttgatccaaaatttagtcatgggttaagtctgagtgatgcacaaaagaaccaagttaaacaactgtttttggccggtggggtctcttttaattcagctaaggatagtaaagaagcctcacgtcgtgttgagctacggatgcaattctatggtttaaaagaaaaagagaacgctgagccgcaaccccattttgtttcagcgcctgttgaaacatgccaattgacacggtga

SEQ ID NO: 8385 - DNA, 1401 bp, Acinetobacter baumannii 1566109
atgagtattgcgaatctgaaacgtcgtcttgaagaaaaaataagtgtattttctgaaccaactcatatacagactaaatttgttagacctcagcgtttaatgaaaacattgtctattattgagcataaactcgatgatcttgaaaatgaacaaccattagaagaaaaaattatcaaagcagttctaaaacttgaacaacacgggtttgatgggctgactaaacgagattggaaaaatttggcttggtctctcagtaaaaaactgcccaattatgaagaaaaacttttattcacacctgtaggtgtaagattaattgattatttcaaccaattgggaattgaccaactccagtttgtttattttccattgttatatagctatttttcctttcaagcaaaggaattagaaaaacaacctgatagctgggttcagttaagaaatatattaaatacgaacaaatctttggtatttaaaaattcgactcgactaaaaaaatggatgacgactcttatagataattcagaggttttaaccacagaacctacgaaaaaatttgtacgtgaatttttacaagataatgatgaaaacagagttgctaatcaattagaaagtttaagaatagcttcgggtagttggttttgggatgatttgattcgatctgcaattaagtcgatcaagacaatgaaagaggatgagtattttcaaattatcccacgctttttagtattgcttgaaaaaaataaaatatatacgacggatattttagctgcgcttctagaacgttatgcaggtacttctcagagagagaaagtacatgaggtactaaaacatctagcattggatcagtggggaaatcctcaatatgaatcatcagctggatggaataacgtgaatgcagacaccaaaaaaatggtgatacagtggtttgttcgtgcggatctagaggctttctttagattgtttagccgtacagctgatgtagatcgtttcaattactggattaagtttattgataagatatcattttcccagatttttctaggaccagcagcatctagatctagtttaaacgaacatcgaaaatttagagaagccaatagagggagattaaaaaggcttgttggatctacccaaacaaataatgcctttatgttaaaaatagataatatatatgtgtttgatttttctgatactggtaatgcttgttatattttaaataaaattccctatgatcagagacttttagatattcatattcagacacttaaaccttgggggcagtcattgacactaattcacagacctggttggcaaagacgatttgatgagaaacttgctgaattgggcatcttctccagtcaagcaaataattctatttcaggatatagaaagcgatattaa

SEQ ID NO: 8386 - DNA, 2150 bp, Acinetobacter baumannii 1566109
atgaaattagcattctggaaaaagaaaaaaaatactgaatctgttgcggaagataacttagtggcgagtataaagcctttacaatatgatgaggtgggattgatttatccttatcaacagaatgctaaaaatgatgctgatttttattgggaaagtctagaagaagaagatatcgcgtatctcttggatgagcagtatatattgccatgggaggagatgtttcagcttcagcaagatcccgaacatagtaacgtacttaatttactcaacttacccagtccaacgaatttacatccagtgattcgtagtgagggaggattaagtgatcctgattttaaaatcattctagatggatggtgtgatcaaaataggattaagtctaaaggtctaattaaacgaataggtgccgtactgaatgttgatggtcaagaatatttactgaatgatacgacttggcagcttgtagaaaaagttaaagaatttgctcgtgtttcaaataaagataataagctgaatcaaaagtattgggctcaaatacgaagtttagctaatcgaagccaggcaaatttagatgagtttcttcgtaagaccgttgtacttgcacctgaaaaattacaattaaatctacgtaagaatttgattagtcaggaatcagttgtagaagtacagcccgactttgatgaggcaccgtcaaattggttgcaaacttttgatcactataatcaggtacaagatcaatatagcattagcctaccagatggtggagtcgctcatgtagtcattgatcctcaagtcaaaaatgtactgagtgaaattaaaaagatgccgaataggcgtgtatctggtgaacgcgctcaaacatttttgcataaccccttcgcgcaattaggagatgatgccacagaggtcatctctcctgaaggttttgaaaaatcaaagcaagatgcagaaatctttagttacagcttacagatagataaattttataatgagttaggacattatgtttctgctcaattaactctcaacgaaaattcgggccgtgaacaacaaccgattctgttagaactttctaatttagagcaaacaaaatattttattactgcctatgaaaagccatcaccaattttcatgtgggcgggttatacaattgataaaacaagttatttagatcatcaggttcaagaattaaaaagtgatctaacagaaatccaaaaatatgaagatgagttacaagcacagcaagttttagatctatccaattacagtgatcgggttattggtattggtgaggcacaaaaactaaactctgagtttattcaaagagacagtggtgaatcagagtggttgccacagcatctcattgagttggagcaacaattccaggatcgcttctccgatgaggcaatagaattgcttgaacagcgtatcaaacaggctgagcaagaaggtaaagatcaggttctaattcctaatgcaaatactgaagtctcagtagatgacgctaaaaaattattaaatagtctgagtgattcaaatagaaaagaacctattgaaacattagaagaatctacggttaatttacagaaaaaaaagaaagatacattactcattgcgaataacattgataaagctgagtttactaaacaacgagcagatcaattggtttttgatgagaagaaccatcccccagctagattgccttcaagtttcagaagtcaggaattcggtttaaaaccgcatcaggagtacggagttgcatggttgcagaatctacatcaatatgcaccggaacaggtaagtggctgccttttagcagacgatatgggattggggaagaccctgcaattgttgtgctttattggtgaatacttagaaaatgcaaaagataaaaaaccagttttagtggttgctccagtttcattgttagaaaattgggaggcagaagcaaatcggttcttcagtgctaaatttgctaagatcctaagtctatatggtgaaaatttaaaagatcgaaaaattcccaagcatttaatatctgctcaattaagagatgatcatggtattacgcatttgcttgaagaagattggcgaggtgatgcggatattgtcctcacaacctatgaaacgatgcgtgatctagagttttc

SEQ ID NO: 8387 - DNA, 2061 bp, Acinetobacter baumannii 72431; identical to SEQ ID NO: 8359

SEQ ID NO: 8388 - DNA, 732 bp, Acinetobacter baumannii 72431; identical to SEQ ID NO: 8360

SEQ ID NO: 8389 - DNA, 1401 bp, Acinetobacter baumannii 72431; identical to SEQ ID NO: 8361

SEQ ID NO: 8390 - DNA, 3204 bp, Acinetobacter baumannii 72431; identical to SEQ ID NO: 8374

SEQ ID NO: 8391 - DNA, 2061 bp, Acinetobacter baumannii; identical to SEQ ID NO: 8371

SEQ ID NO: 8392 - DNA, 732 bp, Acinetobacter baumannii; identical to SEQ ID NO: 8343

SEQ ID NO: 8393 - DNA, 1371 bp, Acinetobacter baumannii; identical to SEQ ID NO: 8344

SEQ ID NO: 8394 - DNA, 3204 bp, Acinetobacter baumannii; identical to SEQ ID NO: 8351

SEQ ID NO: 8395 - DNA, 2061 bp, Acinetobacter baumannii MRSN 58; identical to SEQ ID NO: 8342

SEQ ID NO: 8396 - DNA, 732 bp, Acinetobacter baumannii MRSN 58; identical to SEQ ID NO: 8343

SEQ ID NO: 8397 - DNA, 1371 bp, Acinetobacter baumannii MRSN 58; identical to SEQ ID NO: 8344

SEQ ID NO: 8398 - DNA, 3204 bp, Acinetobacter baumannii MRSN 58; identical to SEQ ID NO: 8351

SEQ ID NO: 8399 - DNA, 2067 bp, Acinetobacter baumannii
atgaattggttggtttgggctgaatttctgcagagttactatatcattccttttggtatgttcattttagtaacatatattggttacagattttatttaaagtatataacacctgctaaaaatcttaatacacaattagagtcagcaatcagtgctttaaaaaaggttgaagaacattctggtttcaataaaaattcactagattcaatatttgaaaatggtactcctttaaaacatgcttggttgaattacaaaaattcttttcatgacatctatgaaactgtagatggagaagatgttctagtttcctcacgtgcaacggtatcaagtgatgtatttttttcacaagctgtcattgtggatacccctttaagagttgagttttataagcacttgccaggtattatcactggtgtaggtattattgctacatttgctggccttctatttggattattagcttttgatcccgcaggcgatccagcaaaagttcaagacagtttaggcttgttattaggtggggtaagtgaagcattcatggcttctgcacttgcgatagggactgcaatgattatcacttggcgcgaaaaatcgtggttgcgtcagtgttatgaacagttagaaattttaacgacagaaattgataagctttttgaaactgattccactggagaggagtatctagctaaattattaaaatcctctcaggcaaacgaaaccaatgctcgtcaattaaaagatagccttgttaatgacttaaaagtcatgatgacgaatttggttgaggaaaataaaaagaatcagattgcttttgctacacatttaagtgaaagctatgcgaaatcaagtcaggatatggcgactcagattggtcaatctattacggataccttgcaagcacctctagataaaattgcttctagcgtacaacaagtgagtggtgaccaaggttcagccgtccaagaactcatgactgatgtgcttacagcctttatgagtaaattggagtctacgtttggtagtcaaatgacgggcatgactgagatgatgactcaatcagtatcagccatgaaggagatgcaattagggttctctcaattactgacagatatgaaagttaatagtgaaacttcgacgaaaacattagaaatacagatgtcgaaaatgattgaagatattcaacaaaaacaaaatgcgatgtctaatcaaatgaatttaatggtggatcatttatctcaaggtgccgcaaaaattggagaacaaggccaacatgcgattgagcagttaaatggcaaagtctcggagttgatagggaatctaggcggaacgatgtctgagttaatgtctgatgtcacgaaacagcgtatggaacaagatcgtgtgattctagaaaatcagcaaaaactgcacgaacaatcatctgcattaattgataatttaggaactgaaattaaagatttaattgcacacagtcaaaatgcagtccaagtctataaagaaaatattcagaaattatctcaagtgacaacggatagtattacgggtatgaataacggcgctgaaaaaatgcgcttagcttctgaacagtttaatactgcgggcagttctttgattacagtgactgataagacatcacagctaattgcagaagtaagtaccacctctacgcatttgaccagcgcaagcagcaatttaatctctctattaaaagactataaagactcacaagagagtgttaaacaggcaatcagtactttagacggtttaattaaacaagctcaagccgaagttggtatgagcagtgaaatgctgaaagatatgaatcagatgacaactgcactcaatcaagtgaagaaagaaatgcaggattatcttgagcaagtcagtgatgtgttggtgaaaagctttgagagttttggttcctctgtagaaaccagcttaaatcattctttaggtgcttttgataatacacttgatcaagctgtaaaacgccttgcaacgggtgtagaaggcttgggtagttttgtagaagatctggaagatctcgtacaacaaaagaaaaactaa

SEQ ID NO: 8400 - DNA, 732 bp, Acinetobacter baumannii
atgttaggtaacaggtactctaagaaaccaagttctaaagatgaaggtgaaaaacctttttggatttcatttgctgatttaatgacagcattaatgaccttgtttttagtcgtaatggctgtgtcattaatggtcgtaacgaaaaaaatcaatgaagcaactcaagctgaaaatcaacgtagttcagagattatggatatttgtactagtattcaaaatgatgccgcgttgaaaaacaagattattgctgttgattgtaaggacaatcgtatcaactttggagaagctggtcggtttggccataatgactaccggttaaatgcagcaggtgtagaggcattaaatacgttagtaccaattgttttaaatgctgctaatagtgaaaatggaaaaaaatggtttaaacaaattgtgattgaagggttcaccgatacggatggttcatatctctataacttaaacttaagtttacgtcgttcagaatgggtcatgtgcagtttacttgatccaaaatttagtcatgggttaagtctgagtgatgcacaaaagaaccaagttaaacaactgtttttggccggtggggtctcttttaattcagctaaggatagtaaagaagcctcacgtcgtgttgagctacggatgcaattctatggtttaaaagaaaaagagaacgctgagccgcaacctcattttgtttcagtgcctgttgaaacatgccaattgacacggtga

SEQ ID NO: 8401 - DNA, 1374 bp, Acinetobacter baumannii
atgagtattgcgaatctgaaacgtcgtcttgacgaaaaaataagtgtattttctgactcaactcatatacagaccaaatttgttaagcctcagcgtttaatgaaaagattgtccattcttgagcataaatttggtgatcttgaaaatgtacaaccattagaagaaaaaattatcaaatcagttctaaaacttgaacaacacgggtttgatgggatgactaaacgagattggaaaaatttggcttggtctctcagtaaaaaactgcccaattatgaagaaaaaattttattcacacctgtaggtgtaagattaattgattatttcaaccaattgggaattgaccaactccagtttgtttattttccattgttgtatagttattttgcttttgagcaacatgaactagaaaacttacctagtaattggattcagttaagaaaaatactagatgaaaataaatcttcgatatttaaagcttcaactcggcctaaaaaatggatgacgactcttatagataattcagaggttttaaccacagaacctacgaaaaaatttgtacgtgaatttttacaaaataatgatgaaaacggagttgctaatcaattagaaagtttaagaatagcttcggttagttggttttgggatgatttgattcgatctgcaattaagtcgatcaagacaatgaaagaagatgagtattttcaaattatcccacgttttttagtattgcttgaaaaaaataaaatatatgcgacggatattttagctgcgcttctagaacggtatgctagtacttctcagagagagaaagtacatgaggtattaaaacatctagcattggatcaatggggtaatcctcagtatgaatcttcagcgggatggaataacgtaaatgctgataccaaaaaaatggtgattcagtggtttgtaagagcagatttagaagcattctttaaggtctttagttatggtgcagaagtacgcagatttaattattggatgaggtttattaaacaagttacattgtcagaaatttttttaaatgatgatgcaatgttctatgcaacatttcaacaggaaaagttcaaaaagaataatgttggaagatttaaacgaattgtggggaaaagcacagcagcaaatgcttttatgataaaaattggtgggtattatattgttgaattttctgaattaaataatgcaacatatttttatcgtaaacaaccttatgtcgattctaaagctaaattacaattagttaacattggtgatttgaagtcaactgcaaaatgtgaattctatctatcacataatggagcctgggaaaaatctttcgataatagactgaaaggactaggaatcactccggattaa

SEQ ID NO: 8402 - DNA, 3207 bp, Acinetobacter baumannii
atgaaattagcattctggaaaaagaaaaaaagtactgactctgttgttgaagataacttagtggccagtataaagtctttacaatatgatgaagttggattgatttatccttatcaacagaatgctaaaaatgacgctgatttttattggggaagtcttgaagaagaagatgtcgcctatctcctggataatcagtatgtattgccatgggaggagctgtttcagctacagcaaaatcccgaacatagtaacgtacttaatttactcaacttacctagtccaacgaatttacatccagtaattcgtagtgagggaggtttaagtgatgctgattttaaaatcattctggatggatggtgtgatcaaaataggattaagtctaaaggcccaattaaacgaataggtgccgtactgaatgttgatggtcaagaatatttactaaatgaaacgacttggaaacttgtagaaaaaattaaagaatttgctcgtatttcaaataaagatcataaactcaatcaaaagtattgggctcaaatacgaagtttagctaatcgaagtcaggcaaatttagatgagtttcttcgtaagaccgtggtactttcacctgaaaaattacaattgaatctacgtaagaacttgattagtcaggaatcagttgtagaagtacagcccgaatttgatgaagcaccgtcaaattggttgcaaacttttgatcactataatcaggtacaagatcaatatagcattagcctaccagatggtggagtcgctcatgtagtgattgatcctcaagtcaaaaatgtactgagtgaaattaaaaagatgccgaatagacgtgtatctggtgaacgcgctcaaatatttttgcataatcctttcgcacaattaggagatgatgccacacaggtgatctctccagaaggttttgaaaaatcaaagcaagatgcagaaatctatagttacagcttacagatagataaattttataatgagttaggacattatgtttctgctcaattaactctcaacgaaaattctggccgtgaacaacaaccaattccgttggaactctccaatctagagcaaacaaaatattttattgctgcctatgaaaagccgtcaccaattttcatgtgggcaggttatacaattgataaaacaagttatttagatcatcaggttcaagagcttaaaagtgatctaacagaaatccaaaaatatgaagatgagctacaagcacaacaagtgttggatttatccaattacagtgaccgggttattggtattggtgaggcacaaaaacttaactctgagtttattcaaagagatagtggtgaatcagagtggttgccacagcatctcatggagttggagcaacaattacaagatcgcttctccgatgaaacaatagaattgcttgaacagcgtatcaaacaggctgaacaagaaggaaaagctcgtgttgtaattccaaatacagatactgaagtttctatcgatgaagccaaggaattattaaataaattaaacacttccaaaaaaattagtcttttagagctggaaaaagagcctttagaaaatcttcagaaaaaaaagaaagatactttgcttatcgcaagtaatattgaagaagcagaattcactaaacaaagaatggaactgctaactttggataaggtaagttttccaccaccaagattaccttcaagttttagaaagcaggaatttagtttaaagcagcatcaagagtatggtatttcatggttgcagaatctctatcaatatgcaccagaaaatgtgagtggttgtctcctggctgatgacatggggttaggtaaaacacttcaattgttgtgctttattggtgagtatttagaaactgcaaaacagaaaaagccagtattgatcgtcgctccagtatctttgcttgaaaattgggaggctgaagcaaatcgtttctttagtgcaaaatttgcaaaaattctaagtttgtatggagaaaatttaaaagatcgaaaaattcctaaacttttgatttctgctcaacttcgtgaagatcatggaattacaaatttacttgaggaagattggctaggcgatacagatattgtattgacgacttatgaaactatgcgtgatctagagttttctttagcacgagttgattggtcaattatggtgtgtgacgaagcacaaaaaatcaaagtacctacagccatggtcacaaaagcagctaaagctcaaaaagctgattttaaaattgcttgtactggaacacctgtagagaattccttggtagatctttggtgtttgtttgattttatacaggaaaatttacttggatcattaagtgcatttaataaaacgtatcgtcgcccgattgaaagtggtgaaaatgcagatagccaattattagagcaactacgtgagttgataaaaccacaagttcttagacgtatgaagaaagaagtagctgatttaccgaataaaaatgaagttagtgattgtaagagaattggaatttcaatgcttcagcgtcaattatatgctgaagtaattaatcgttatcagaagttatctactgaaggtaatcaaggggcaatgttagcatcattgcacagcatgaggatgatctgtgcacatcctttacaaattcgtcctgatgcttcgattcaagattcacctaaagttgattggttaataaaaaccttagaacaaatcaaagcaaagaatgaaaaggtaattatttttactgaatttagggatattcaggtttttctcaaacgtattcttttagaaaggtttgggttgaatattactactgttaatggtgattcaagtacaagcagtaaaaaaggtttatcacgtcaaaatttaatcgataaatttcaaaatacagttggctttaatgtcattattttatccactgttgctgtgggttttggtgtgaatatacaaaaagctaatcatgttatacattacacgcgcagttggaatcctgccaaggaagatcaggcaactgaccgagcatatcggatcggtcaagataaagaagtttttgtctattatccaacaatatctgctggtaaggattttgatacttttgaaataaagttagatgtacttttatcaagtaagcgggctctggcggatgatatgttgaaaccaaatactgatctaggtaaggaattgatccgcttaatttaa

SEQ ID NO: 8403 - DNA, 2061 bp, Acinetobacter baumannii; identical to SEQ ID NO: 8359

SEQ ID NO: 8404 - DNA, 732 bp, Acinetobacter baumannii; identical to SEQ ID NO: 8360

SEQ ID NO: 8405 - DNA, 1401 bp, Acinetobacter baumannii; identical to SEQ ID NO: 8361

SEQ ID NO: 8406 - DNA, 3204 bp, Acinetobacter baumannii; identical to SEQ ID NO: 8374

SEQ ID NO: 8407 - DNA, 2061 bp, Acinetobacter baumannii
atgttggcttttgctgaatttctgcaggattattttatcattcctgtgggaatgctcatttttgtattatggattgggtttaaattctattctaaatatatcaaacctgctaaaaaccttagtgagcaattatcagtacttattaatgccttaaaaggaatggataaaaactctagtctaaataagcattcattagatgcaaaattcgaaaatgatacgcctttaaaacatgcttggttgaattacaaaaattcttttcatgacatctatgaaactgtagatggagaagatgtactagtttcctcacgtgcaacagtatcaagtgacgtatttttttctcaggctgtcattgtggatacccctttaagagttgagttttataagcacttgccaggtattatcactggtgtaggtattattgctacatttgctggtcttctatttggattattagcttttgatcccgcaggcgatccatcaaaagttcaagacagtttaggcttgttattaggtggggtaagtgaagcattcatggcttctgcacttgcgatagggactgcaatgattatcacttggcgcgaaaaatcgtggttgcgtcagtgttatgaacagttagaaactttaacgacagaaattgataagctttttgaaactgattccactggagaagagtatctagctaaattattaaaatcctctcaagcaaacgaaaccaatgctcgtcaattaaaagatagccttgttaatgacttaaaagtcatgatgacgaatttggttgaggaaaataaaaagaatcagattgcttttgctgcacagttaagtgaaagctatgcgaaatcaagtcaggatatggcgactcagattggtcaatcgattacggataccttgcaagcacctctagataaaattgcgtctagcgtacaacaagtgagtggtgaccaaggttcagccgtccaagaactcatgactgatgtgcttactgcctttatgagtaaattggagtctacgttcggcagtcaaatgacgggcatgaatgagatgatgactcaatcagtatccgccatgaaggagatgcaattaggcttttcccaattactgacagatatgaaaattaatagtgaaacttcgacgaaaacattagaaatacagatgtcgaaaatgattgaagatattcaacaaaaacaaaatgagatgtctgatcaaatgaatttaatggtggatcatttatctcaaggtgccgcaaaaattggagaacaaggtcaacatgcgattgagcagttaaatggcaaagtctcggagttgatggggaatctaggcggaacgatgtctgagttaatgtcagatgtcacgaaacagcgtatggaacaagatcgtgtaattctagaaaatcagcaaaaattgcacgaacaatcatctacattaattgataatttaggaactgaaattaaagatttgattgcacacagtcaaaatgcggtccaagtatataaagaaaatattcagaaattatctcaagtgacaacggatagtattacgggtatgaataacggtgctgaaaaaatgcgcttagcttctgaacagtttaatactgcgggcagttctttgattacagtgactgataagacatcacagttgattgcagaagtaagtaccacctctacgcatttgaccagcgcaagcagcaatttaatctctctattaaaagactataaagactcacaagagagtgtcaaacaggcaatcagtactttagacggtttaattaaacaagcccaagccgaagctggtatgagtactaaaatgcttgaagatatgaatcacatgaccaatgcattgaatcaagtgaagaaagaaatgcaggattatctcgagcaagttagtgatgtgctggtaaaaagttttgagagttttggtttttctgtagaaaccagcttaaatcattctttaggagcttttgataatacgcttgatcaagctgtaaaacgtcttgaaagcggtatagacgggctaaatggttttgtggaagatctggaagatctcgtacaacaaaagaaaaactaa

SEQ ID NO: 8408 - DNA, 732 bp, Acinetobacter baumannii
atgttaggtaataggtactctaagaaaccacgttctaaagatgaaggtgaaaaacctttttggatttcatttgctgatttaatgacagcattaatgaccttgtttttagtcgtaatggctgtgtcattaatggtcgtaacgaaaaaaatcaatgaagcaactcaagctgaaaatcaacgcagttcagagattttggatatttgtactagtattcaaaatgatgcagctttgaaaaataagatcattaatgttgattgtaaggacaatcgtatcaactttggagaagctggtcggtttggccacaatgattaccggttaaatgctgcaggggtagaggcattaaatacgttagtgccgattgttttaaatgctgccaatactgaaaacgggaaaaaatggtttaaacaaattgtgattgaagggttcacagatacggatggttcatatctctataacttaaacttaagtttacgtcgttcagaatgggtcatgtgcagtttacttgatccaaaatttagtcatgggttaagtctgagtgaggcacaaaagaaccaagttaaacaactgtttttggccggtggcgtttcttttaattcagctaaggatagtaaagaagcctcacgtcgtgttgagctacggatgcaattctatggtttaaaagaaaaagagaacgctgaaccgcaacctcattttgtttcagcacctgttgaaacatgccaattgacacggtga

SEQ ID NO: 8409 - DNA, 1401 bp, Acinetobacter baumannii
atgagtattgcgaatctgaaacgtcgtcttgacgaaaaaataagtgtattttctgactcaactcatatacagaccaaatttgttaagcctcagcgtttaatgaaaagattgtccattcttgagcataaatttggtgatcttgaaaatgtacaaccattagaagaaaaaattatcaaatcagttctaaaacttgaacagcacgggtttgatgggatgactaaacgagataggaaaaatttggcttggtctctcagtaaaaaactgcccaattatgaagaaaaaattttattcacacctgtaggtgtaagattaattgattatttcaaccaattgggaattgaccaactccagtttgtttattttccactgttgtatagttattttgcttttgagcaacatgaactagaaaacttagctagtaattggattcagttaagaaaaatactagatgaaaataaatcttcgatatttaaagcttcaactcggcctaaaaaatggatgacgactcttatagataattcagaggttttaaccacagaacctacaaaaaaatttgtacgtgaatttttacaagataatgatgaaaacagagttgctaatcaattagaaagtttaagaatagcttcggttagttggttttgggatgatttgattcgatctgcaattaagtcgatcaagacaatgaaagaagatgagtattttcaaattatcccacgttttttagtattgcttgaaaaaaataaaatatatgcgacggatattttagctgcgcttctagaacggtatgctagtacctctcagagagagaaagtacatgaggtattaaaacatctagcattggatcaatggggtaatcctcagtatgaatcttcagcgggatggaataacgtaaatgttgataccaaaaaaatggtgattcagtggtttgtgagagcggacttagaagctttctttagattatttagccgcacagctgatgttgatagatttaactattggattaaatttattgataagatcgctgtttctcagatatttcttggtccagcagcttctgaatctaatcaagtggaacatcgtaaatttcgggaggaaaatagaggacgtttgaaactacttacagggtcgacacgaacaaataatgcctttatgttaaaaattgagaatatttatgtatttgatttttctgatattggtaatgcatgctatatcttaaataagattccttataaccaagagcgtaaaaaagtggatattgatacacttaagccatgggtacacattcttaaattaagccacacatcaggatggcaaagaaagtttgatgagaaactagctgaattaggtatcttctctagtcaagccaataattctaattccttatataaaagacgatattga

SEQ ID NO: 8410 - DNA, 3213 bp, Acinetobacter baumannii
atgagattagcattctggaaaaagaaaaaaaatactgaaacttttgttgaagataacttggtggcgagtataaagtctttacaatatgatgaagtaggattgatttatccttatcaacagaatgctcaaaatgacgctgatttttattgggaaagcctagaagaagaagatctcgcctatctcttggatgatcactatatattgccatgggaggagttgtttcagcttcagcaagatccagaacatagtaacgtacttaatttactcaacttacccagtccaacgaatttacatccagtgattcgtagtgagggaggattaagtgatcctgattttaaaatcattctagatggatggtgtgatcaaaataggattaagtctaaaggcctaattaaacgaataggtgcggtactgaatgttgatggtcaagaatatttactgaatgaaacgacttggaaacttgtagaaaaagttaaagaatttgctcgtatttcaaataaagataataagctcaatcaaaagtattgggctcaaatacgaagtttagccaatcgaagtcaagcaaatttagatgagtttcttcgtaagaccgtggtacttgcacctgaaaaattacaattgaatctacgtaaaaacttgattagtcaggaatcagttgtagaagtacagcccgactttgatgaggcaccgtcaaattggttgcaaacttttgatcgctataatcaggtacaagatcaatatagcattagcctaccagatggtggagtcgctcatgtagtcattgatcctcaagtcaaaaatgtactgagtgaaattaaaaagatgccgaatagacgtgtatctggtgagcgcgctcaaatatttttgcataaccccttcgcgcaattaggagatgatgccacagaggtcatctctcctgaaggttttgaaaaatcaaagcaagatgcagaaatctttagttacagattacagatagataaattttataatgagttaggacattatgtttctgctcaattaactctcaacgaaaattctggccgtgaacaacaatcgattctgttggaactctccactctagagcaaacaaaatattttatctctgcttatgaaaagccatcaccaattttcatgtgggcgggttatacaattgataaaacaagttatttagatcatcaggttcaagagttaaaaagtgatctaacagaaatccaaaaatatgaagatgagctacaagcacaacaagttttagatctatctaattacagtgatcgggtcattggtattggtgaggcacaaaaacttaactctgagtttattcaaagagacagtggtgaatcagagtggttaccacagcatctcatggagttggaagaacaactacaagatcgcttgtctaatgaagcaatagaggtgcttgaacagcgtatcaaacaggctgagcaagaaggtaaagatcaggttctaattcctaatgcgaacactgaagtctcattagatgacgctaaaaaattatttaatagtctgagtgattcaaatagaaaagagtctattgaaacattagaagaacctacggttaatttacagaaaaaaaagaaagataccttactcattgcgaataacattgataaagctgagtttactaaacaacgagcagatcaattagtttttgatgagaagaaccatcttccagctagattgccttcaagtttcagaagtcaggaatttagtttaaaaccacatcaggagtatgggattgcatggttgcagaatctacatcaatatgcaccaaaacagataagtggctgccttttagcagacgatatgggattggggaagaccctgcaattgttgtgctttattggtgaatatttagaaaatgcgaaagataaaaaaccagttttagtggttgctccagtttcattgttagaaaactgggaggcagaagcaaatcggttcttcagtgctaaatttgctaagatcctaagtctatatggtgagaatttaaaagatcgaaaaattcccaagcatttaatttctgctcaattgagagacgatcacggtattacgcatttgcttgaagaagagtggctaggtgatgcggatattgtcctcacaacctatgaaacgatgcgtgatctagagttttctttagcgcgagttgattgggggattatggtttgcgatgaagcacaaaaaattaaagtacctacggctatggtgacaaaagcggctaaagctcaaaaggcagactttaaaatagcatgtactggtactccagtggaaaattcactcactgacttatggtgcttatttgattttatacaagaaaatttactcggttctttaagtgagtttaataaaatatatcgacgtccaattgaaatgtcggaagatgtagataagcaaatcttagagcaactccgtaaattgatagccccccaagttttaagacggatgaaaaaagaggtcgctgatttacctgaaaaacacgaagtccaacattgtaaaaatattccaatttcaacattgcaaagacaattgtatattgatacagccaatcattttagaaaattatcagctgagggtaaccagggggcaatgttaggtgcgttgcacagtatgcgcatgatttgtgcacatcctttacaattgcaaccgaatgcttcaattcatgaatcccctaaggtagattggctgatcaaaaccttagaagtaattaaggcaaagaatgaaaaggttattatttttactgaatttagagatattcaagtattcctgaaacggattcttctagaacggttcggcttaaatgttacaaccgttaatggggattcaaatacaagcagtaaaaaaggtttaacccggcaaaactttattgatagattccaagccactagtggttttaatgtgattattttatcaaccactgctgtaggttttggcgtcaatattcaaaaagctaatcatgttattcattatacacgtagctggaatcctgctaaagaagatcaagcaactgaccgcgcttatcgtatcggacagcagaaagaagtttatgtgtattacccaacgatctctgcacctgatggggaggaattaaaaacttttgaagtcaagttggatgaacttttatcaagtaagcgggctctggcagatgatatgctgcagccgagtagagaacttagcaaagaattgatcgaaatgatttag

SEQ ID NO: 8411 - DNA, 1989 bp, Bordetella bronchiseptica B18-5 (C3)
ttgggcgtagcgcatccatcgcttgccagccttcatggactgcctctttatgtgttcctacttgtcgcggtattgactcttgcattcctgattggctatgtcgtcaagggaacccaggtttggtggcagctcaggtccgcacttaaggccgttcgcagtcttcttaaaacaggccctgctcccaacccgacagaggttgcatcagcttttcgacgcgagccgctgaagcacctgtggatagagtacgccgatacgctccacgaactgcgacaggccggatcagggggaaccgcactcaccgagttccgagctacgattcccgctgaagccatgttcaccaaagaagtgctagtcgacggacggctatttgatgaattcacgaggcatcttcccggtgtactcactgggcttggcatcattggcacgtttgcgggcctacttagtggcctagacaagttcaaagtcgatcccgagaaaatccaaaacacagtcaacggactgggaccattgctggagggtgtgcaacacgcctttgtggcctctggctcggccatcgcttgcgcgatgctggtggtctttatcagccggttcaccctcgcttacttctatcgcctcgtagaacacctgacgaatggtatcgacagcttgtatcgaactggcgccggcgaggaatatcttgcccggctcgtcaagtcgtcagagcagaatgcagccagtacagctcagctcaaggatgcgcttgtggaagacctccacaagatgatgaccaacctggtcgaccggcagattgctgcacaggagaccgcgtcacttgcactgggcaagcacattggcgaggctatttcgacggccattgccgagccgatgaagcgggttggtgatgccatggaagccacttctcgtggcaacggtgagcaggtaaattccatgctcgagatcttgctgactgggttcatggcgaagctggaagacaccttcggtgggcagatgcgaggcatcaacgagcagatgcagaggtcgatggattcgatggctgcggttcaggcgtcactgcaagggctactttccgacatcaggagcaccaacgaacatgccgcctcccagatgagtggaacgcttgaggaggccatgaagaaagcagcggataaccagcagttgctgaccgagcaaatgcgtgagtttgttcaggacttccgcagcctagtcaccgaggagcagagcaagtccaagcacgctatgaacgaggctgtaacgaaggttctcggtgaggtagcaactgccatggaagggctggaaaacgttcggaaggcctccgcagccgaggagtctggtcggaacgacagactggcaacacagacgaatcagctgatcggtggtttgacgactcaggttgagtccttgctcggtgcggtctctgaccaggtcagcaagacccagcgcaacatcgacgcgctgggggatgtatcgcttcgtgccattgacggaatgaaccaaggtgccctgaccattggttcggctgcccagcgcttcgaaacagcgggggctgcagtgaccgatgcctttgaccgctcgacgaaggttgcagagacgctagccacgacggctgcgtcgctgcaggccgcctcgactgcggttcagcgcgggttcgagcaatacgactcaacgcgcaagacggtggacacacaaatggctgcgttgatgggcctcatcgagtccgtcaagagagaagctggcatttctcaggaactggttaacagcatcaagaccagcgccgaagcgatgcgtcagtctgaggccgaggctcgtgagcatctcggccaagtcaatgcagccctggtgaaggctttcagcgacttcggaaacgcactggtgagccaggtcaagtccaccatctctgagactgaccgccaccttgcccaagggactggtcatctcaatggggtagtgcaagagcttgccaatgcagtccagcgcatgaagagggcttga

SEQ ID NO: 8412 - DNA, 705 bp, Bordetella bronchiseptica B18-5 (C3)
gtgcttgcacgactcgttctcaagcgaggcgccaaacatgaaggcgagagtccgttctggatttccttctcggacttgatgtcggccctgatggtgctgttccttgttgtcatggcggtgacgttggtatcggtcacgcagagcatcgacgcagctactcgggcgaccgtagagcgaagcgcggccatcaatcgggtaatgcagatgattgctcaagacccgaagagcgccggggttggtgtcgaccaacagaacttccgcatcgacctaggcaaggaggtgcgcttcgatagtggtagctacaccatcaacacgacagctggccagtttcttcgaagctacatcccggtgctcttgcgagcaaaagagtctgatgatggtaagcgttggatacgaagcatcgtcgtcgaagggttcacggacgaggatggcacctacctctacaaccttcaactcagcctcgaccgcagtcgcagcgtcgtctgctcgctgttccagaccagcggcgtggcggatgcgctgacaccagagcagctgcgcaaggtccaagagctgttcctggtcggtggctactcattcaactccatcaaaaaagacaaggctgagagccgccgtgtggagttcaagatcgacttctggggattggacgagcgccttccagaagcgagcgatgccctgaaaggcaaggagtttgggcggtgttag

SEQ ID NO: 8413 - DNA, 1713 bp, Bordetella bronchiseptica B18-5 (C3)
gtgttagccgtttctgccctgcagcgtctgaccaaggacctggctgcgtcgcttgcatccatgggactgcacgcgggggagtttggaaaaccggatttggttgaaaaaccgacacgcgaagcagagcagctgttccagggatacgccaaggccaagcccagcaaggaggacgcgtacgctgccgctcgtgccttcgttcgcgggcaaccgcttgatgcctggcagcgcgacctggtggcttcagcagtggccgaacctatccgtgagcaatcgggcgcgatggcgcttgcgtcgaagcgtttcctggcgctgctcaagtcctatgaggacgaagcggcacggggggacctgtggcgcctgacttggcacggtctactctattcgtatttcaactttgaccttgaggcggggaaggatacggccactcgcgaaggatgggaggcccttcgggccttcctcgaacagacctggcctttgatggataagcaggcaggtgaggatctggtcccggactggatgaaggtgctccgtcacgaagttgacgttctcacggcgaagccagttgagaagtactcgagagcctatctccgcggcgagaccgaatccacggaccgcgtggcagcggaccttggcatccccccgtcgagttggttctggcacgccttggtacttggggccgtgcgtcatgcagcgagagaaattgacgccgagttccgaaggctggttccccaactcatcaagctaatccagaccaaacctggctttcgcgatgaagctattgaggtcgtcctcaaccgctaccacggatgcaagggggcgccctcggacgaacggcttcgcgacttcgtctgtcagccaacggtttggaagaacccgaaactcaaagctgcgggcattgccacggcctggaaccgagtgcccgaccctgtgtggcagatggtgttgggttgggtgaatgaacgcaatctcaaggacttcttcgacatccttgccgctcgaaataatgcggatgagggcaggcttgccttctggtcaaagtatctcaagcagatttcctggacgcggctggtgtttggtgccgacacgatggcgctgaagcgaaccaacgctggcgttcgagaactcatcgcgcgggaagagggagcgtacgctcagcttacgcgatttttggacttcgatgggttcatgatgcaaatcggcccgtacatcatcatcgagttcagcaagacgggcaaagcgtgctacggctatcaggctgaccggcttccatttgcgcggtacgctagccgctatgccggcggaacagaagacttggcagcgggctacaaccaagatcgtgccctgcgcatccaccacagcaaagggtgggaatggaaagcagagcaagagcttcggcaactaggcataattccggacgcggtagatcctcgacgcgtgttgtcgtctgcgacaggcggtacggacacggcgacaaacaccggtcgtactaccgaacgcccggaatcggcaccacccggtcctgacatcgcaagactcaagtcgctcgttgcgcggtttcggggtgcatccattaatgacaagcgtagaacttcaagcgggggccgtctgtgggtggaggacccactgcaacggaggcagttggcctcggagctgaaggcacatggcttcaagtgggcgaatagtcgtcaagcatggtacttcccggagcgatga

SEQ ID NO: 8414 - DNA, 3903 bp, Bordetella bronchiseptica B18-5 (C3)
atggtacttcccggagcgatgatgggtttgttcgattttctcaaacgtgccacgagctccaacgggcaggagccgactctaacgacgatttgggccgctgatggcgcgcgtatcgagttcaacaatgacatcatggatacaactcccgaaggattgctcgaagccattcatcaggcgggagccgaggattcggtgctcggtgcgtacttggcgcagttggcatctgagtcgcgatgtcggattgacgcgcacggcgtaaccattccatggccagatgtctacgagttgcagggctctgccgagcatgcaggcgcgctaaagctgctggctcttccgccacagagcccgctccggcccattatcgacggctccggaacgctatcttcagacgacttcacggtagaggtgtctggctggacagacggcgcgcaacaggttcaagtggaccggctggacggagcagtcgccaccgtgggcggtaccgcccagatgctgtctgcctctgcatgggctgcggtgtccgacattgtggctctccagtcgcgtccgccagaggggcgcacccaacacgcccaggagatggcatggggacgaattcgcagccacgccgaccgtgctggagcgctgtacgccagcccgtacctcgaaacgacgttggtattgacgccggagagcctgcgcctccccctggcgaaggaggagacgccgttcggccgcgtgctaacagtttccccgaccttcgacggcgcgccagacggatggctagccgccttcgatggcttcaattcggtgcagccacactacgacctcacgcggggcgccggacgcgttcgcgtggtgatctccgagcccgtccgcaaggtgctcgcggtcatcaagcgagaaatgccaaaccgcaaggtggccggtgccaaggcggaaaagtttatccacaaccccttcgctttcttgggagacaccgcgcatcaggtcctgaaagaaggagaatttgaggcagaccgggtggaggcaggggccgttgcggcggtcttcagcatcgtcggccggaccgaacacgggcgcattaactcggtcgacctactgatcaccgagcacttcggtgatggcacagcgcgcacggacaagaaggcgttcaaaaccgccgacgacctcgacgcattcctcggtgcgctgaaatcggcccttgagcaggaccgggagcatttcccttgggatgagtacgacctgaccattgatgccgagtccacggtacagcttgaacaaggccagcaagtggcacatctttggcgcacgcagccagctcagcgtatcagcttggacgatgtctatcagctcgatggttacagcggtcgcattgaaggaattggcgcggctaagcctatctacgtgccggtctttcagcgcgataagacgcaaagcgaagacgagtccggctggttgcccacagacttgacgccaatggtcaaggtgacgctccaggggcacgaaggtcaggtgctcatcccattgaccaaggaatgggtcaaggactttgacaagcaggtcagcgacgcggagcgggaaggggcagctgaagtaaagaatgccagccttcccacttcactagagactgcgcaagcgcgcaccctcgccgacgggttcaaggcgatgctcggtggccaggaccacgtgaaagtcgagagagaatcaaaaccgaaggagaaaaagggcccacgggagacgctgctggtcaagaccaacttccatggagtcgactatctcgaagagcgtcgcgcgacgttggctttgcccgagggctgggaagctcagctcccgcgctcgctgcgacagtccatcaagttaaagacgcatcagcttcacggcgtagcttggtttcagcacctagtgtccaaggctccggcagagtgtcgaggggccttgctcgccgatgacatgggcctagggaagaccctgcagcttctgtcgttgctcggttggtactacgaggagaaccccaacgcggcgccctctgtcatctttgcgccaaagagcttgctggagaactgggccaacgaggcgcgcaagttcttcagcgactctttccctgagattctcgtcctctacgacgacacgctgaaggctcgaaaacaaccgctcagcctcatcgacatccagttgcgtgataagggcatcgtcgaactcctgaagcccgactggatcgggaccgcgaaggtcgtggtaaccacctacgagatactaacctcgtacgagttctcgctggccaagcagccgttcacgttcgtcatctgcgatgaagcgcagcgaatcaagactccgggcacgctggtgacactggccgcaaagaagctgaaggcggacttccgtatcgcctgtacggggacccccgtcgagaattcgctcgcggacctgtggtgtttgtttgatttggtgcagccgggcctgttaggtgcgctggaggagtttgggaagacctaccgccgccctatcgaatgccagaccgaagaacaggtgacagcattgcaacgtttgcaggcagcgattgctccgcaaacccttcgtcgtacgaagggcgacatcgcggcggaccttccgaaaaagttcttcgcgtacaaaaaggccgcggaggctgagttgcaattcaaacctcatcttggtaatgacgagatgcttgagattccgctcacggagcatcagcgtattctctacaaggggggcttgaagaaacttcaggaagcggcccacgagtcgaatggtcgaaaacgcgcccaactgtcattcggcgcgcttcacctgatgaaagcagtctgtgctgaaccatactgcctgccaggcacgaagttcatcgtcgacaagggtggacgtgaaccgcatctcgcgaactcgcccaaactgggttggctgctggcacgattggctgacattcaacgcaccggtgagaaagccatcattttcaccgagctgcgggaggtccaggcgggactgtactactttcttaaggagacgttcggcctgcgtccattcatcatcaatggggactctcaggggcgccagggatacatcgacaagttctcagcgcagccaggcttcgacgtcatcatcttgtcgacactcgccgcaggtgcagggctcaacgtcaccgccgcgaaccatgtcttccattttactcgtgcgtggaacccatccaaggaagcgcaagcaaccgaccgagctttccgcatcggccaggaacgggaagtttttgtctactgccccaccgtagtggcagacgacttccacacattcgaagtccggctcgaccaactcttgaagcgcaaggctgggttggcaggctccacgttggacgacggtggtttgtctggggcgttgaccgtaatgctcaacggctcaggcaaggatgcgacgttcacggagttggtcggggacagcgggtgcggcgaagcgcttccgaagcaatacctgacaatggacgacgtcgaccgcatggacggggacagctttgaggtgttctgcagtttgctttggggcaagaggggcttccaggcgacggttactccgaagcgcggtggtgacggcggcatcgacgtcgttgcactaaaggggcgtgaaggtgagctcctccagtgcaagagttccaaggcctctgatgtggggtgggatgccatcaaggaggtgaccgccggcgcagcgaagtaccaggccaggttcagaggcacgcgattccgtcggttggccgtgacaaatcagagcttcacgactggagcgcgggagcaggccgcagccaaccaggttgaattggtcgttcggtcacacctggaggagatgttggggtcccaccccatcacgaaccacgagttcgacacggcgctgcaggagcagacgctttactcagaagtcatggcttag

SEQ ID NO: 8415 - DNA, 2010 bp, Bordetella bronchiseptica MBORD762
gtgaacgaaatatcaaaggctttgggcgtagcgcatccatcgcttgccagccttcatggactgcctctttatgtgttcctacttgtcgcggtattgactcttgcattcctgattggctatgtcgtcaagggaacccaggtttggtggcagctcaggtccgcacttaaggccgttcgcagtcttcttaaaacaggccctgctcccaacccgacagaggttgcatcagcttttcgacgcgagccgctgaagcacctgtggatagagtacgccgatacgctccacgaactgcgacaggccggatcagggggaaccgcactcaccgagttccgagctacgattcccgctgaagccatgttcaccaaagaagtgctagtcgacggacggctatttgatgaattcacgaggcatcttcccggtgtactcactgggcttggcatcattggcacgtttgcgggcctacttagtggcctagacaagttcaaagtcgatcccgagaaaatccaaaacacagtcaacggactgggaccattgctggagggtgtgcaacacgcctttgtggcctctggctcggccatcgcttgcgcgatgctggtggtctttatcagccggttcaccctcgcttacttctatcgcctcgtagaacacctgacgaatggtatcgacagcttgtatcgaactggcgccggcgaggaatatcttgcccggctcgtcaagtcgtcagagcagaatgcagccagtacagctcagctcaaggatgcgcttgtggaagacctccacaagatgatgaccaacctggtcgaccggcagattgctgcacaggagaccgcgtcacttgcactgggcaagcacattggcgaggctatttcgacggccattgccgagccgatgaagcgggttggtgatgccatggaagccacttctcgtggcaacggtgagcaggtaaattccatgctcgagatcttgctgactgggttcatggcgaagctggaagacaccttcggtgggcagatgcgaggcatcaacgagcagatgcagaggtcgatggattcgatggctgcggttcaggcgtcactgcaagggctactttccgacatcaggagcaccaacgaacatgccgcctcccagatgagtggaacgcttgaggaggccatgaagaaagcagcggataaccagcagttgctgaccgagcaaatgcgtgagtttgttcaggacttccgcagcctagtcaccgaggagcagagcaagtccaagcacgctatgaacgaggctgtaacgaaggttctcggtgaggtagcaactgccatggaagggctggaaaacgttcggaaggcctccgcagccgaggagtctggtcggaacgacagactggcaacacagacgaatcagctgatcggtggtttgacgactcaggttgagtccttgctcggtgcggtctctgaccaggtcagcaagacccagcgcaacatcgacgcgctgggggatgtatcgcttcgtgccattgacggaatgaaccaaggtgccctgaccattggttcggctgcccagcgcttcgaaacagcgggggctgcagtgaccgatgcctttgaccgctcgacgaaggttgcagagacgctagccacgacggctgcgtcgctgcaggccgcctcgactgcggttcagcgcgggttcgagcaatacgactcaacgcgcaagacggtggacacacaaatggctgcgttgatgggcctcatcgagtccgtcaagagagaagctggcatttctcaggaactggttaacagcatcaagaccagcgccgaagcgatgcgtcagtctgaggccgaggctcgtgagcatctcggccaagtcaatgcagccctggtgaaggctttcagcgacttcggaaacgcactggtgagccaggtcaagtccaccatctctgagactgaccgccaccttgcccaagggactggtcatctcaatggggtagtgcaagagcttgccaatgcagtccagcgcatgaagagggcttga

SEQ ID NO: 8416 - DNA, 705 bp, Bordetella bronchiseptica MBORD762; identical to SEQ ID NO: 8412

SEQ ID NO: 8417 - DNA, 1713 bp, Bordetella bronchiseptica MBORD762; identical to SEQ ID NO: 8413

SEQ ID NO: 8418 - DNA, 3882 bp, Bordetella bronchiseptica MBORD762
atgggtttgttcgattttctcaaacgtgccacgagctccaacgggcaggagccgactctaacgacgatttgggccgctgatggcgcgcgtatcgagttcaacaatgacatcatggatacaactcccgaaggattgctcgaagccattcatcaggcgggagccgaggattcggtgctcggtgcgtacttggcgcagttggcatctgagtcgcgatgtcggattgacgcgcacggcgtaaccattccatggccagatgtctacgagttgcagggctctgccgagcatgcaggcgcgctaaagctgctggctcttccgccacagagcccgctccggcccattatcgacggctccggaacgctatcttcagacgacttcacggtagaggtgtctggctggacagacggcgcgcaacaggttcaagtggaccggctggacggagcagtcgccaccgtgggcggtaccgcccagatgctgtctgcctctgcatgggctgcggtgtccgacattgtggctctccagtcgcgtccgccagaggggcgcacccaacacgcccaggagatggcatggggacgaattcgcagccacgccgaccgtgctggagcgctgtacgccagcccgtacctcgaaacgacgttggtattgacgccggagagcctgcgcctccccctggcgaaggaggagacgccgttcggccgcgtgctaacagtttccccgaccttcgacggcgcgccagacggatggctagccgccttcgatggcttcaattcggtgcagccacactacgacctcacgcggggcgccggacgcgttcgcgtggtgatctccgagcccgtccgcaaggtgctcgcggtcatcaagcgagaaatgccaaaccgcaaggtggccggtgccaaggcggaaaagtttatccacaaccccttcgctttcttgggagacaccgcgcatcaggtcctgaaagaaggagaatttgaggcagaccgggtggaggcaggggccgttgcggcggtcttcagcatcgtcggccggaccgaacacgggcgcattaactcggtcgacctactgatcaccgagcacttcggtgatggcacagcgcgcacggacaagaaggcgttcaaaaccgccgacgacctcgacgcattcctcggtgcgctgaaatcggcccttgagcaggaccgggagcatttcccttgggatgagtacgacctgaccattgatgccgagtccacggtacagcttgaacaaggccagcaagtggcacatctttggcgcacgcagccagctcagcgtatcagcttggacgatgtctatcagctcgatggttacagcggtcgcattgaaggaattggcgcggctaagcctatctacgtgccggtctttcagcgcgataagacgcaaagcgaagacgagtccggctggttgcccacagacttgacgccaatggtcaaggtgacgctccaggggcacgaaggtcaggtgctcatcccattgaccaaggaatgggtcaaggactttgacaagcaggtcagcgacgcggagcgggaaggggcagctgaagtaaagaatgccagccttcccacttcactagagactgcgcaagcgcgcaccctcgccgacgggttcaaggcgatgctcggtggccaggaccacgtgaaagtcgagagagaatcaaaaccgaaggagaaaaagggcccacgggagacgctgctggtcaagaccaacttccatggagtcgactatctcgaagagcgtcgcgcgacgttggctttgcccgagggctgggaagctcagctcccgcgctcgctgcgacagtccatcaagttaaagacgcatcagcttcacggcgtagcttggtttcagcacctagtgtccaaggctccggcagagtgtcgaggggccttgctcgccgatgacatgggcctagggaagaccctgcagcttctgtcgttgctcggttggtactacgaggagaaccccaacgcggcgccctctgtcatctttgcgccaaagagcttgctggagaactgggccaacgaggcgcgcaagttcttcagcgactctttccctgagattctcgtcctctacgacgacacgctgaaggctcgaaaacaaccgctcagcctcatcgacatccagttgcgtgataagggcatcgtcgaactcctgaagcccgactggatcgggaccgcgaaggtcgtggtaaccacctacgagatactaacctcgtacgagttctcgctggccaagcagccgttcacgttcgtcatctgcgatgaagcgcagcgaatcaagactccgggcacgctggtgacactggccgcaaagaagctgaaggcggacttccgtatcgcctgtacggggacccccgtcgagaattcgctcgcggacctgtggtgtttgtttgatttggtgcagccgggcctgttaggtgcgctggaggagtttgggaagacctaccgccgccctatcgaatgccagaccgaagaacaggtgacagcattgcaacgtttgcaggcagcgattgctccgcaaacccttcgtcgtacgaagggcgacatcgcggcggaccttccgaaaaagttcttcgcgtacaaaaaggccgcggaggctgagttgcaattcaaacctcatcttggtaatgacgagatgcttgagattccgctcacggagcatcagcgtattctctacaaggggggcttgaagaaacttcaggaagcggcccacgagtcgaatggtcgaaaacgcgcccaactgtcattcggcgcgcttcacctgatgaaagcagtctgtgctgaaccatactgcctgccaggcacgaagttcatcgtcgacaagggtggacgtgaaccgcatctcgcgaactcgcccaaactgggttggctgctggcacgattggctgacattcaacgcaccggtgagaaagccatcattttcaccgagctgcgggaggtccaggcgggactgtactactttcttaaggagacgttcggcctgcgtccattcatcatcaatggggactctcaggggcgccagggatacatcgacaagttctcagcgcagccaggcttcgacgtcatcatcttgtcgacactcgccgcaggtgcagggctcaacgtcaccgccgcgaaccatgtcttccattttactcgtgcgtggaacccatccaaggaagcgcaagcaaccgaccgagctttccgcatcggccaggaacgggaagtttttgtctactgccccaccgtagtggcagacgacttccacacattcgaagtccggctcgaccaactcttgaagcgcaaggctgggttggcaggctccacgttggacgacggtggtttgtctggggcgttgaccgtaatgctcaacggctcaggcaaggatgcgacgttcacggagttggtcggggacagcgggtgcggcgaagcgcttccgaagcaatacctgacaatggacgacgtcgaccgcatggacggggacagctttgaggtgttctgcagtttgctttggggcaagaggggcttccaggcgacggttactccgaagcgcggtggtgacggcggcatcgacgtcgttgcactaaaggggcgtgaaggtgagctcctccagtgcaagagttccaaggcctctgatgtggggtgggatgccatcaaggaggtgaccgccggcgcagcgaagtaccaggccaggttcagaggcacgcgattccgtcggttggccgtgacaaatcagagcttcacgactggagcgcgggagcaggccgcagccaaccaggttgaattggtcgttcggtcacacctggaggagatgttggggtcccaccccatcacgaaccacgagttcgacacggcgctgcaggagcagacgctttactcagaagtcatggcttag

SEQ ID NO: 8419 - DNA, 2028 bp, Zymomonas mobilis subsp. mobilis NCIMB 11163
ttgagtattttttttataggaacgcccgttgaaaatttaattttactagtttcgggcatttttaaagaagatggattccctggaattgtagtattcttgatggttgtcgcatgctttattttaatttttcagatgaatcgagaattccatcatcaaaaaaaactgattaataaactttcagataaaattaagggcttttcgaaagcttcttttacgaaagaaggggtgccttctataggaatttggttaagagatcaaaaattatcatatgatcaaaaaaaaatattattcgcttgggataaatttgaaaaaactttaatttctacaagttatagcgataattcatatatattaacaacagtccaacctgattacttttttaatactgatgcactttctttcggtttaggccgatggcgtattataccaggactttttgtttctattggtcttgcgtgtacgttcttaggattaattgcagcacttcatcaaatggctgatcagcaaattacatcagaaacgatgcaagcgctcatgaaaattgcatcagctaaatttatcatgtctctagcagggctagtatgttctatagtctttatgatttttatgacgcgtatgaaatccttaccagaacatgccttgcatgacttagtttcaaatttagatgaacacttatcgcctcttagtttagaaaaactaggtcaagagcagctagacgtacagcaacaaattttaaatgttcagaagactatggcaaatgattttgtcgctgaattaggtcgatctttgaaagaggatgtgactccagcgatatcaaattcaataagtgaagtgatgcatcctattattagtaaggtgagccaacatagtactgatagtatcacaacaatggctacaaatctttctcagcaaatttctggaggcgtagaacatgcattgacagtggcaagtgaaagaattgcaatggcaggggatcgtattgcacagcttgtggagcgtatggatctttcctctggacggatgggatcagagatagagaatacaatagttcgtgtctcacaggctgtagatgatttgcgtaatacaataaataaagaagcgaactcaacgagtggcgtattcgttcatggtgctgagcagttgctagctaccatgaatacgacattagaatccattcgtgataatactggtattggtgctcgtgcgatctcggatgcagctactaatatggccactgccagtaaagcaatgcgtgctgaaatggaagaagccacacagagtggatcaaaggcggcatatctacaaataagtgaggcaggaaatagtgtcagtatggccattgattctgcaggacagtctgttctttctgccttaggcaataccaccaataaagtggctgaactcgctggtgatttaggagaaaaagcaggccgagagcttcttgagcctatatcgttgattgctgaaaagcttgaaagattattgtctatgatagatagcggggttctcgctatgcgcgatatgagtaatagcgtacaggcaggtgccaatgctggtgaaattgctgctaacagtttccaaggtgcctctgcggatttagttaatgccacacagccaattcgttctaccacagaacagattgaaaatatattacgcattctttctcaaaatattgagtcttctacgacaattattactcgtagcgctgaaacaacagcaatatcttcagccaatgtattgaaatcagcaaaagaaactcttgggggagagcaaagatcaatagaaattgctttgcaaggcgttgaaaaaattgcaaatcgtatgcagggacaagctcaaaaacttgatgatattgacttaaaattaggtcatgcttttgaagtatatgctacgcaaacaggagaagctatggattctatgcgtacgcatgttgtacaaatggcaaatgaactgaataaagcacttgatacactcaaaacaattgttgatcaattacaggactttgtccctcaacaagggcataattga

SEQ ID NO: 8420 - DNA, 822 bp, Zymomonas mobilis subsp. mobilis NCIMB 11163
atggagcataaatatcatatacgacaggaagaaaaagaagaggccgaatcggtatttgtttctatgacagatataatggttagttttctttttattgttatgttgttgatggcattttttgctagtcattatagtgataatcaaactattcatcatgatcctttagaaatttataatgctaaatctgaaaatataagacataatattattatgcatcttgtggaagctgttcgtgctgatatcaaaaaagaaaaaatagaaggattggaagtaagtactcaaggtgatgctttaagatttcaagggaatggactattcgcttcagggcaaggggggctaagtgggaatagcttaagaattattaagctattaggccatcatttggctgattttatgccttgctttgcagtcggttctaagggagccgttgcattatcttgtaatcctgatttggtgatgttggaaacggttcaggttgaagggcataccgactctaatggctcacatcagaataacctcgttctctctacaacacgagccatatcagcttttaatgaaatagtacctgacagtaaaaataatgatatgcctgaaatgctggaattccagaacttattaggtcagccaattatggctgttgcgggttatggtgaaatgaggccagttggaaataatgcaactgcagtgggccgagctgctaatcgtcgtatagacatgcgttttattatgtatgttccgccaggacgagatctaattcctcataaagttgaagatattgatagaatttcttcattactaaagcttcaggatttaaaaaaatga

SEQ ID NO: 8421 - DNA, 1302 bp, Zymomonas mobilis subsp. mobilis NCIMB 11163
atgacccaaacaggaactccattgtcacaaatacttgctgatggtgttgagttttctgcactagaaagtattccacttgactcaatttattgccgagtaaggcttatcttggataactatgatgaaattttacctctagaaaaagatccagaaaaaattttagcaaaaatgctgcggcttattgaaacatgggactggtctaatgttcctttaagctttcctttacaagtagcgcgttttgtattttcacaaaaaaatataaactttaatattaaaataatctgtgatttcttacttaaagaaatactatcatctactaaatctggatttcttaactctatggtaggtatttatattgagacattttcaaaaaataatatttttacacctattctgggtgaacatctttttaaatctcgtttatatttaggacatcaattcacgaaccttttgacaaaagtcccaaatttttttgatgcatctacagtagttactacaattgcagaatttatagaaaatgtcgacgatccatgggaatctctgaaacaaataggtatcagacatcctcacgcaccggggttgatgtctgaagttcatagtacttttgtgcggcaaatagctcctaaactgcaagaaagattttatatagacaaactatttacgtggttagctccacgtaataatgctcccctccaaaatggagcctctgaagcattaaatgctattatgtcagtgtgggaaaaagacgaacctgataaggaaataaaaaagtatctgatcgatcgaatcacagcattgtatggccatccacaagttggtcgttcccctgtatgggccgaagtctctgaagagaatgagcgccgtttactccattggattatgggaaatgatattcgattccttttccaaattttggcagaggttgagaaaagacatatgtggcatgatcgtgaaaatttttggtggacgatgtatgaatcaggtaagattaacgggttatggattgcttttaatcctgtagggttttctgtggccaaaaagcgattaaaaacagcgtttactcgatttgcagagcaaactggagaaagcgataaatcgcttcttattatgcatataggtaataatgttgtggtagaaggtacttataattttcagattcatatttttaatgaccaagatcctgaagccccaaagctttacaaaccaaaatataatgtaaatagtattagagaaaaatcagcaaaaattaaaattatgcatcagggtaagggatggatggataaagtttataaaaacttatag

SEQ ID NO: 8422 - DNA, 3105 bp, Zymomonas mobilis subsp. mobilis NCIMB 11163
atgagttttgattattcatataataatgatagagttatcattaatgttccttctagacattccaaatttttgggttttcttcaaaaaaataaaaattttcaaaaagtagattcaaagaactttgatttagctattgcaatagctgatattagtgctctagcagatgaattaaaagaaccttatgaaattcaccaaaaatatataattctttcacatagacttgttggttctgtcgattcgcaaactgctaagatacttaagttaccaccgatcaccgatcttgtactcaaaacggatgtcgaaggtgtcgtaggtagttctagttttaggttaagagcagaatggcacagaaataaccagcatcttactgtaaacagaattggttcaattattgagacaagcaggggaagacaacggatcccagcttggatgatggatgttctgaatattgcggatggttgccgcgcttcaaataatgattcaattgattgggatgttttagctcgtttccgccaagctttggatctaggagcagaaaatattaaagatggacatgcctcatgcatatcaatgactgattttttgtcaggattacatgttcgtctagcagatcgtttttctatttctccaaatgagcaaggtactgattttaaaattattccattctctggccaaaaaatagatgattccgaagaaacctcagaaaatatggcagaattaaaaggtctacatcttgccgattttcaacggaaattaaaacaaaaaggggtattaaacacctttcggttatcatcaaatgagtatcttgttattgatcgtgctgcaaagcctgttttgaaacttttacatcaaatgcaagaggcttctttagaagaaagaaaggtatttattcgtaacccgcttcctcgtctaacccaagctattaagcaagatttatataataatggtaagctctctaacatagatgatcttcttcaagaagaattaatcgaaaaatctgttttgccagcttttattgaaacaatagaatataatagtttttctgaacgcgttattggtataggtaaattcgttccacctgatttaggtataaatcaatctacagtaacaacatggcttccagaagtgttcgaagaagaagaaataaaatatcttcgtacgaagactactaaagaattggaggatctagaaactcagcttgaacaagcgataagaaacaaaaaagagactgtaatatggaaagatatgaatttttccgccaagccgaatattttagatgaattacgttgcttaataataagccgtgaaaaatctttagaagataaccatccgtcagaaaaaaaagaaaatttaacgaataacgattctgatactatagtactcaaaacacaagataattttgaaaaagctatttattccccagctataaaacctagattttcatctataccaactagaataccatcatcaattgttactccactgaaacaacaccagcgtgaaagtttcgactggcaagtaaacacttggaaatttggattatctggaatttttaatgctgatgaacaaggtttaggaaaaacacttcagacaatcagctttcttgtttggctaaatgaattaatggaaattgataaatcccgtcgagctccaatacttattgtcgcaccgacatctctgttacataactgggaaaatgaggtagataatcatgtcgaaaaggtagggttagggcatattataagattatatgggagaggaattgatataagacgtcgagatggcacttctggaattgataccaagacaggggaagcgctacttgatttcgatgatataatgcgtaatttttatgaaggaaatgggcattttacatgtattattacaacgtatacaactttaactaactatcagcattctctttcaaaaataccttttgctgttactgtttttgatgaaatacaagctttaaaaaatccggcatctctcagatctcaagccgctcgttcaattaatgctgatttccggatagggctaaccggaacacctattgaaaattcaacaacggatctatgggcaattatggatcaattggtgccgggacacttgagttctctattggattatcagagacactatagtaatcctaccaaagataacatgaaggccctctatcaaaaagttttttgtagcacaggccagcgtcctgcgctcgctttgcgaagacttaaggcaaatgtaacttgtgacctaccttctaaaacaaggcttattctacctaaagaaatgcctgaggtacaagccaaggcatatgatgacattcggaaaaaactgaaggaagggcaaagaggaaatgccttaaaacttttgcatcatatccgaacggcttctgtacatcctgctgtttcttctgtttctacagaccaaaaatttattgcacaatcagggagattggctgctacatttgaaattctaaaacgaattaaaacacggggggaacgtgctttagtctttattgaaaatcttaaaatgcaatatcgttttgcagcgctcgttcgttctgaattcggtttagaacgggttgaaattattaatggacaaacatcaatctcagaacgccaaaaaattgttgataggtttcaaaaacatttaaaagattcaaaaaataagtttgatttgcttattttagggcctagagcggctggtacaggtttgacattaacagcagcaactcatgttattcatctttctcgttggtggaatcctgcagttgaagaacaatgcaatgatcgtgtacatagactagggcaaacgcaacctgtgtatgtgtatgtgcctatggctattcatccttattataaatctaaaagttttgactgtcttctccataatctaatgcaaaaaaaacgtcgtcttgcacagaatatattatggccaatggctgatacagctaatgatgtaagccaattgcaagcacagcttataaatgatgagaatattttggaagttggtgattgtgtaaggaatgcaatgattggaatgtatgcagatgaagatgttttatgtcctaccccagataataatggtgcgtttttgtatatttaa

SEQ ID NO: 8423 - DNA, 2028 bp, Zymomonas mobilis subsp. pomaceae ATCC 29192
ttgagtattttttttataggaacgcccattgaaaatttaattttactggtttcaggtatttttaaagaagatggatttcctggaattgtagtattcttgatggttgtcgcatgctttattttaatttttcagatgaatcgagaattccatcatcaaaaaaaactgattaataaactttcagataaaattaaggacttttcgaaagcttcttttgcgaaagaagggccgccatctataggaatttggctaagagatcaaaaagtatcatatgatcaaaaaaaaatattatccgcttgggataaatttgaaaaaactttaatttctacaagttatagcgataattcatatatattaacaacagtccaacctgattacttttttaatactgatgcactttctttcggtttaggacgatggcgtattataccaggactttttgtttctattggtcttgcctgtacattcttgggattaattgcagcacttcatcaaatggctgatcagcaaattacatcagagacgatgcaagcgctcatgaaaattgcatcagctaaatttatcatgtctctagcagggctagtatgttctatagtctttatgatttttatgacgcgtatgaaatccttaccagaacatgccttgcatgacttagtttcaaatttagatgaacacttatcgcctcttagtttagagaaactaggtcaagagcagctagacgtacagcaacaaattttaaatgttcagaagactatggcaaatgattttgtcgctgaattaggccgatctttgaaagaggatgtgactccagcgatatcaaattcaataagtgaagtgatgcatcctattattagtaaggtgagccaacatagtactgatagtatcacaacaatggctacaaatctttctcaacaaatttctggaggcgtagaacatgcattgacagtggcaagtgaaagaattgcaatggcaggggatcgtattgcgcagcttgtggagcgtatggatctttcctctggacggatgggatcagagatagagaatacaatagttcgtgtctcacaggctgtagatgatttgcgtaatacaataaatgaagaagcgatctcaacgagtggcgtattcgttcatggtgctgagcagttgctagctaccatgaatacgacattagaatccattcgtgataatactggtattggtgctcgtgcgatctcggatgcagctactaatatggccactgccagtaaaacaatgcgtgctgaaatggaagaagccacacagagtggatcaaaggcggcatatctacaaataagtgaggcaggaaatagtgtcagtatggccattgattctgcaggacagtctgttctttcggcttttggcaataccgcgaataaagtggctgaactcgctggtgatgtaggagaaaaagcaggccgagagcttcttgagcctatatctttgattgctgaaaagcttgaaagattattatctatgatagatagcggggttctcgctatgcgcgatatgagtaatagcgtacaggcaggtgcccatgctggtgaaattgctgctaacagtttccaaggtgcctcttcggatttagttaacgccacacagccaattcgttctactacagaacagattgaaaatatattacgcattctttctcaaaatattgagtcttttacgacaattattactcgtagcgctgaaacaacagcaatatcttcagccaatgtattgaaatcagcaaaagaaacgcttgggggcgagcaaagatcaatagaaattgctttgcaaggcgttgaaaaaattgcaaatcgtatgcaaggacaagctcaaaaacttgatgatattgacctaaaattaggtcatgcttttgaagtatatgctatgcaaacaggagaagctatggattctatgcgtacgcatgttgtacaaatggcaaatgaactgaataaagcacttgatacactcaaaacaattgttgatcaattacaggactttgttcctcaacaagggcatgattga

SEQ ID NO: 8424 - DNA, 822 bp, Zymomonas mobilis subsp. pomaceae ATCC 29192
atgcagcataaatatcatatacgacaggaagaaaaagaagaggctgaatcagtatttgtttctatgacagatataatggttagttttctttttattgttatgttgttgatggcattttttgctagtcattatagtgataatcaaactatacatcatgatcctttagaaatttataatgctaaatctgaaaatataagacataatattattatgcatcttgtggacgctgttcgtgctgatatcaaaaaagaaaaaatagaaggattggaagtaagtactcaaggtgatgctttaagatttcaagggaatggactattcgcttcagggcaaggggggctaagtgggaatagcttaagaattattaagctattaggccatcatctggctgattttatgccttgctttgcagtcggttctaagggagccgttgcattatcttgtaatcctgatttggtgatgttggaaacggttcaggttgaagggcataccgactctaatggctcacatcagaataacctcgttctctctacaacacgagccatatcagcttttaatgaaatagtacctgacagtaaaaataatgatatgcctgaaatgctggaattccagaacttattaggtcagccaattatggctgttgcgggttatggtgaaatgaggccagttggaaataatgcaactgtagtgggccgagctgctaatcgtcgtatagacatgcgttttattatgtatgttccgccaggacgagatctaattcctcataaagttgaagatatcgatagaatttcttcattactaaagcttcaggattcaaaaaaatga

SEQ ID NO: 8425 - DNA, 1302 bp, Zymomonas mobilis subsp. pomaceae ATCC 29192
atgacccaaacaggaactccattgtcacaaatacttgctgatggtgttgagttttctgcgctagaaagtatttcacttgactcaatttattgccgagtgcggcttatcttggataactatgatgaaattttacctctagaaaaagatccagaaaaaattttagcaaaaatgctgcggcttatcgaaacatgggactggtctaatgttcctttaagctttcctttacaagtagcacgttttgtattttcacaaaaaaatataaactttaatattaaaataatctgtgatttcttacttaaagaaatactatcatctactaaatctggatttcttaactctatggtaggtatttatattgagacattttcaaaaaataatatttttacacctattctgggtgaacatctttttaaatctcgtttatatttaggacatcaattcacagaccttttgataaaagtcccaaatttttttgatgcatctacagtagttactacaattgcagaatttatagaaaatatcgacgatccatgggaatctctgaaacaaataggtatcagacatcctcacgcaccggggttgatgtctgaagttcatagtacttttgtgcggcaaatagctcctaaactgcgagaaagattttatatagacaaactatttacgtggttagctccacataataatgctcccctccaaaatggagcctctgaagcattaaatgctattatgtcagtgtgggaaaaaggcgaacctgataaagaaataaaaaagtatctgattgatagaatcacagcattgtatggccatccacaagttgatcgttcccctgtatgggccgaagtctctgaagaaaatgagcgccgtttacttcattggattatgggaaatgatattcgatttcttttccaaattttggcagaggttgagaaaaaacatatgtggcatgatcgtgaaaatttttggtggacgatgtatgaatcaggtaagattcatgggttatggattgcttttaatcctgtagggttttctgtggccaaaaagcgattaaaaacagcgtttactcgatttgcagagcaaactggaaaaagcgataaatcgcttcttattatgcatataggtaataatattgtggtagaaggtacttataattttcagattcatatttttaatgaccaagatcctgaagccccaaagctttacaaaccaaaatataatgtaaatagtattagagaaaaatcagcaaaaattaaaattatgcatcagggcaagggatggatggataaagtttataaaaacttatag

SEQ ID NO: 8426 - DNA, 3105 bp, Zymomonas mobilis subsp. pomaceae ATCC 29192
atgagttttgattattcatataataatgatagagttatcattaatattccttctagaaattccaaatttttgggttttcttcaaaaaaataaaaattttcaaaaagtagattcaaagaactttgatttagctattgcaatagctgatattagtgctctagcagatgaattaaaagaaccttatgaaattcaccaaaaatatataattctttcacatagacttgttggttctgtcgattcgcaaacggctaaaatacttaatttaccaccgatcactgatcttgtactcaaaacggatgtcgaaggtatcgttggtagttctagttttaggttaagagcagaatggcacagaaataaccagcatcttactgtaaacagaattggttcaattattgagacaagcaagggaagacaacggatcccagcttggatgatggatgttcttaatattgcggatggttgccgcgcttcaaataatgattcaattgattgggatgttttagctcgtttccgccaagctttggatctaggagcagaaaatattaaagatggacatgcctcatgcatatcaatgactgattttttgtctggattacatgttcgtctagcagatcgtttttctatttctccaaatgagcaaggtactgattttaaaattattccattctctggccaaaaaatagatgattccgaagaaatctcagaaaatatagcagaattaaaaggtctatatcttgctgattttcaacggaaattaaaacaaaaaggggtgttaaatacctttcggttatcatcaaatgagtatcttgttattgatcgtgccgcaaagcctgttttgaaactcttacatcaaatgcaagaggcttctttagaagaaagaaaggtatttattcgtaacccgcttcctcgtctaacccaagctattaagcaagatttatataataatggtaagctctctaacatagatgatcttcttcaagaagaattaatcgaaaaatctgttttgccagcttttattgaaacaatagaatataatagtttttctgaacgggttattggtataggtaaattcgttccacctgatttaggtataaatcaatctacaggaacaacatggcttccagaagtgttcggagaagaagaaatgaaatatcttcgtacgaagactactaaagaattggaggatctagaaactcatcttgaacaagcgataagaaacaaagaagagactgtaatatggaaagatatgaatttttcggacaagccgaatattttaaatgaattacgttgcttaataataagccgtgacaaatatttagaagataaccatccgttagaaaaaaaagaaaatttagcgaataccgattctgatactatagtacttaaaacacaaaataattttgaagaagcaatttattccccagctataaaacctagattttcatctataccaactagaataccatcatcaattgttactccactgaaacaacaccagcgtgaaagtttcgactggcaagtaaacgcttggaaatttggactatctggaatttttaatgctgatgaacaaggtttaggaaaaacacttcagacaatcagctttcttgtttggctaaatgaattaatggaatttgataaatcccgtcgagctccaatacttattgtcgcaccgacatctctgttgcataactgggaaaatgaggtagataatcatgtcgaaaaggtagggttaggacatattataagattatatgggagaggaattgatataagacgtcgagatggcacttctggaattgataccaagacaggggaatcgctacttgatttcgaagatataatgcgtcatttttatgaaggaaatgggcattttacatgtattattacaacgtatacaactttaactaactatcagcattctctttcaaaaataccttttgctgttactgtttttgatgaaatacaagctttaaaaaatccggcatctctcagatctcaagccgctcgttcaattaatgctgatttccggatagggctaaccggaacacctattgaaaattcaacaacggatctatgggcaattatggatcagttggtgccaggacacttgagttctctattggattatcagagacactatagcaatcctaccaaagataacatgaaggatctctatcaaaaaattttttgtagcacaggccagcgtcctgcgctcgctttgcgaagacttaaggcaaatgtaacttgtgacctaccttctaaaacaaggcttattctacctaaagaaatgcctgaggtacaagccaaagcatatgatgatattcggaaaaaactgaaggaagggcaaagaggaaacgccttaaaacttttgcatcatatccgaacagcttctgtacatcctgctgtttcttctatttctacggaccaaaaatttattgcacaatcagggagattggctgctacctttgaaattctaaaacgaattaaaacacggggggaacgtgctttagtctttattgaaaatcttaaaatgcaatatcgttttgcagcgctcgttcgttctgaattcggtttagaacgggttgaaattattaatggacaaacatcaatctcagaacgccaaaaaattgttgataggtttcaagaacatttaaaagattcaaaaaataagtttgatttgcttattttagggcctagagcggctggtacaggtttgacgttaacagcagcaactcatgttattcatctttcccgttggtggaatcccgcagttgaagaacaatgcaatgatcgtgtccatagactagggcaaacgcaacctgtgtatgtgtatgtgcctatggctattcatccttattataaatctaaaagttttgactgtcttctccataatctaatgcaaaaaaaacgtcgtcttgcacagaatatattatggccaatggctgatacagctaatgatgtaagtcaattgcaagcacagcttataaacgatgagaatattttggaagttggtgattgtgtaaagaatgcaatgattggaatgtatgcagatgaagatgttttatgtcctaccccagataataatggtgcgtttttgtatatttaa

SEQ ID NO: 8427 - DNA, 2190 bp, Enterobacter aerogenes
atgtcctggcttaattcccttttagtggcgcttacatcggtggaaccccattgggtaccttttaccgtgatcggtctcgttacctttgcgttcttctgttttattttcttttatttggttagagcggtcagaattgttaatggcctaaaaaaatacacgcaatcaattaacagccttgaaaacagcacacctgaggctcagcttgagcagcttaagagcctgtttcagcgacctgaactcaggcatgcttggaatgagttcgaagaatcgttgcacctgcagagtgaacagagcaacggggaagagaacattgtacgggttcgggcgacagcaccgagtgccagttttttctcagagcagcaacttgtcgatattcctctgaacaccgaattcttcaaacacctgcccggtattcttaccggtgtggggattatcggtaccttctatggcctgatgattggtctcaatcactttgaccccagcactccagagcaggtctccagcagcgtcaataatctgttgcacgatgtgttgtacgccttcctgggctcagcatttgctattttcgcctccattcttgtcacttggctggaaaagctatccatcgccaagtgctacaaatatctggaaaaattcaccgcatccctcgactccctgtatgacagcggcgttggcgaggaataccttgcctcactggtgaagtccagcaatgaaagcgcgacccaggcacgccatctgaaagagagtctggtcaccgatttacgcgatatgttgttgcatctggccgagagccagaaagtcgaaaatgaacgccttgctaatacgttaagcgcaacttaccgcgagtcaggttcacagtttgccgaccaggtcagcggcgcgattgaaaacagcctgaagtcgccattggataaaattgccggtgcggttcagaccgccagcggtgatcaaagcggcatggtacaaaacatgttgcaggatgtgctgaccgcgtttatggcgaaactcgacaccacctttggtcagcagtttacaaacctcaacgaaatgatgggacaaaccgttggcgccattcaaacaatgcaaaccggtttcgccacgttattacaagatatgcgtcaggtgagcgatgattcccgccagggcagcgcgcagctcatcgagcaactgttatcagagatgaaatctggccagcaagctatgcaggctggcatgaatgacatgctcagtagccttcaggcctcggtggctaaaattggagcagaaggtgaaggtgccggagagcgaatggctcgccaactggaaaaaatgttcgctgatagcgaggcgcgagaaaaagcccaggcagaacatatgaccgcctttattgaagccattcagaattcagtgcagcagggacaaagcgccacaatggaaaaaatggcagcctctgtcgagtcgcttggtgaacaactgggtagcctgtttgggcagattgataagggccagcaacagatttcagcgactcagcaagcgaatcagcagtcccttcacgaacagacacagcgtgtgatgagtgaggtagacgatcagattaaacagctgatcgacactgttgccagccagcatcagggaacgacagaaacacttcgcttgctcgcagaacaaaccaaccgacagattcaggatatgcaaaacggtgcggacaaaatgcgtatggctgccgaacgctttgagcatgcaggtgatcgggtgtcagaagcaaaccaccttaccgctgacgtgctgaataaagcgcaatcggcaggttcatcactctcccttgccaccagcgaactcacttccgttgtggctgattatcgtaacaatcgggaagctgttagcaaatccattgccatgctggagctgctcgccgcaaatacgcagtctgaacaaaccacgcgcaaccaattcatcgccgaccttaagcagcacggtgaacgtctgcagagctataaccgggaagcacaggcctttatggaaaatgtcagtgacgtgctcgggaaagggtttgaagacttctccgaaggtgtttcacgcagcctggataaaacgctgggcaaactggacgtcgaaatggcgaaagcctctactctgctcgcgggttctgtcgaacagatcggagaaagcgtcagcgagcttgatgatgtcctgtcacgcgttcgtgcctaa

SEQ ID NO: 8428 - DNA, 741 bp, Enterobacter aerogenes
atgtttggaaatgcatttggtgttaaaaaacgccgcagcgatgaagcggagaaaccattctggatctcctatgccgatttgatgactgccatgatggtgttatttctggtcgttatggttgcgtctctgagttccgttacacagcgtattcaacgtgcagagcaaggggaaaaagttagggggcaggacatatccagattgtgtgagcgactggagctgcatgctcgcaatgttaacaaaaccatagtggttgattgccacgataaccgtatcagttttggcgaggccggtcgttttgatcacaatcgttttttcctgaatgccgaggggcagaaagcactgcaggatgttgttccgttagtgttagacgctgctgatagtgatgaaggaaaaaaatggtttaagcaaatcgtcattgaagggtttaccgacacagacggctcatatttatacaacttacatctttctctacaacgttcggaatgggtaatgtgtagtctgctggatagccgtagctcgctgcaaaaaagtatttcctcagaacaacagatccagattcgcaaacttttcctcgcgggaggggtatctttcaataacgccaaggaaagcaaggaagctagccgtcgcgtcgagctacgtatgcagttctacggtcttaaagataaacgtgacaaggcaaatgaggtggattttccccctgtagtgaataaagaagtctgccaattggtaatgccgcaatga

SEQ ID NO: 8429 - DNA, 1680 bp, Enterobacter aerogenes
atgacccccgcgctgaatgctcttgctcaacgtattgccactaagctctctgcgagtcaacgggatgaccattatctgcataatgatttccacgcgctggcctccgctgctttcgacatggaaaagcgttttgataaggcagaaaaaatccctttaccgccacaagaaatgcggctggcggctctgcgtcgacttcgccttgcacaagaactttcggaacgagagtggcggatggtgttttatggtctcgccgataatgatccgtcatatcctgatcagccaatactacttgaggatgatgcgttttttcctgaagtaaacaatgcaatcaaaaaacggcttgaaactaaaaccctgaaacgccgagactgggtcgcactctgttcaagctattttgcttaccagaacccatcacctgagaccaacccgcactggtgcgtactgcgcggtcatatcgctcagggttacctggtggtgaaagcggctatacgacgagaaaaatcgtggatgaaaaccattgagttttatcacgatatttttaccccgcaggcgggaggcgtgatctccagacagttacttgcgggtgagagcaattcgctctcgtcattagaaaaaatcgcgcaaatccctgatagcagttggttgtggaaacgtattttcacggtgcttttagcgcaactggacacactcgatgatccgcagtttctggacaaaattagctggttgttaggcctggctgggcaatgggttcgtttccgtgatgacatcatgacggcgaccctgactcgctattaccattctatatatcgcgatcagcctcattcggctctgaagcaagctgcgctggaatactgggatagcccgcaactgaaaagccagcagaataaatggcatcagtatgtctctgagccggtggctgcgatggtccggggctggctggcaaaacaagatctgatgcatttctttgaattgctgcgcggtaatggcgatgttgatcaggcacgattgcactattggctgcgattcgccaatcagatgggatttactcgtattgtcatgggtactgatgcctggcaagaccgtggtagcgattttgtgaaattccgcgatgagaataaaggtcggttgagctatttacgaggtgggcgtagtctcgataacgccatgattatgcagatcaatgattatctgttcgtcgagttttcaggaacaggcaatgcaatgtatgcctataggataggacacgcgccatttaaccctgaatctcgtaccctggacatcaaccatctaaaagaccagggacgctgtgtgattcgcatgcctcatacgccacgagctgagggctataacaaggtccgtatcacaggctggatgctgaaatacgacgatgagctacgcaagttggggattcggtggatggcggaagaacccgtcaagtttgtcgataaaaaatcgtcctcccccttttctctgtctgccatcaaaatcatcaatccgttgcgtgatacggctatacagcacttggtagaaggtagttcttgtatcgtcagcgataatcgacaaaaaggtggcgtgctgtccgtacagctcagaacacctgacgacaccatagaaagagagctgttacgactaggctttgcgcctgtgactaaagaatcgcatcgttactggatcaaataa

SEQ ID NO: 8430 - DNA, 3246 bp, Enterobacter aerogenes
atgctgaaacgtctgttaagtaaactgacgggaaaccgtcagcagatagaacgccacctaaagaatcagtaccaggttgaagaaaatgggctcagttttccgcaatcgttggttgacgacccagagctttgggctctggcatcctggcttgagcaactggctgaagaagactatctgatatcactaacagaccggtggttgttgagctgggacgcgctgtatcgcctgctggaggatgaggaacatgccagcagcctgcctcttatcggtgtacctgatgtactgcctttacgcgcaagcctgtgttcacgtggcgcattaagcgatagtgattttcttgtctggatcgctgattgggctacgcttccagcccgcaagccgatccgtttcagtcgtaccggtgccatcttaacccatgaaaatcagcaatacctgttatcgcgggaaaactgggcactcttacaggcaacagaacaactcagtgcgcagcaaaatcagactcctggtgaaaccactaaccagttgggatgggccgctatccgcaaatgtgcgaagcaagcagccgcaaaatttgatgattatttagaaaaaacgcatgtcgtcaaaccaacttcattgtcattacgtctgcgtaaagcaacggttgccgatactgctgttatcgaaattgagccccagttcgaggaccaacctgctaactggctgggcagttttgacaagaactcgcaggttcacgatagctaccgcatccctggagagaatggcgaactcagccacgtcatcatccctcccgaagtgaaagaagtcctgaattcaatacactcgatcccaggtcgtcgagtggccggaagcgaagcgctttcctttgttcgcaatccttataccttcctgggtgaggatgccgccagtgttattgcccctgaagaacatgaacaggcactgtttgatgccaggattttctttcatcatttcaggttgataccgcaactgaatgcggaaagtaagattgcagaagttatgctggtacttgagcctgtttcacctgttccccagccagaaatcacttttgtgttctcagccccctgggaactaggtaaattcgtacagcaactcggtattagcgtcgctgcacagatgcctgccggttcatggcaaggttacgagctggaattaagtcagttcactgaacagcagtggcacgattgccaggcactgctaactcgctggcagcaagaaattgaaggaaaagaatttagcgatgtgctggatattgcgaagtatggcgatcgagtgattggcattggtgagtttgaaaaaatatcctctccttggctgactaaagcgcaaagcgaaaactggcttcctgatgacatcgatttctccgcgttttcagtcgaaactctgtctggctggcaacctgaaaatcttcaccattttgatgaactgcaggagagaattactcaggcagaagccgctggtgaaacgcatatcatcgcaccatggaatgacagccaattaccgttggatgctgctaaaaccttcagtaagaactgggaaaaacagcaaagcactgcaaatgaatctcaaggtaacgttgcagataaaacggcccgagccgtactcaaaattgagcagaatattgaagaagcggcttacatcaaacagcgccgcaattcactcctcaatgcgcgtcatgccgaacctgaaattcctctgagccttaaagagcatatccgactcaaagaccatcaacgtgaaggcgtagcctggctccagcaactcttccttcgttcacctgaggaaaccgcaggttgcctgctggcggatgatatggggcttgggaaaacactgcaaatcctgagcttcctggtatggttcattgaaaaattcccgcaagaaccgccaagtctcattgttgctcctgtctctcttttagataactgggaacgtgaactggacaatttcttctataccgcaggaataccggtattgaaattgtatggcgagaccattaaagcggtgaaatatcccaaacaggcaatccctgctcatctacagtctcaggggatcaaaaacctgcttaaacctggctggcagggtgaggcgaaaatcatactgacaacctacgaaacgcttcgtgatcaagagttttctctggcacgccagccgtggtccattatggtgtgcgacgaggcacaaaaaataaaaaacccagcagcgttaatcacacatgcggccaacgcggtacaagccaggtttaaagtggcatgtacaggaacgccagtcgaaaacacacttgtcgacctgtggagcttatttgattttgcccagccaggattgttaggggcactaaatgaatttggtaaacactatgttcgccccatcgagaacgaagatggccgcgatacagaacggctggaaagcctgcgtgcgctgatagaacctcagactttacgccgaaccaaagaagaggttgcgcgtgatttacctcagaaaattgaagtggaaagctgcaagcaactgacattgtctggcgtgcaaaaacagctctacctttcgtctgttgcaaattggcaacaacagcaagcattgagcgaagggatgcagcaggccggaagcggtatgttaggtttgttacaccgactgaaactcatctgtgcacaccctgcagtagttaatccagagccacgttttcgtgataactcacccaaactgaactggctgctgaaaatactcgaagaaataaaacatacctcgaaagataaggtcattatttttacggagcttcgagatttacagcgcgagcttcaacatgcagtccacctaaagtttggtttccgtcctgtcattatcaatggtgatactagcactaaaagtcgaagccaaaacagccgccagcgcctgattgatgattttcaggctcagcctgggtttggggtgattattctctctacggttgctgtcgggttcggcgttaacgttcagaaggccaatcatgttattcatttcactcgctgctggaatccagccaaagaagatcaggctacggaccgggcgtaccgaattggtcaaaccaaagatgtgtatgtttattacccaacggtaagggatgcggaaatcaccacatttgaagaaactctggatgaccttcttctgcgtcggcgtactttggccagagatatgctgtgcgcaacacctgaactaagcagtgcagattttgagggggttttgaaagggcatagttaa

SEQ ID NO: 8431 - DNA, 2556 bp, Enterobacter aerogenes
atgttttcgctgacctcgttcctcgacacgttaacctctgttaatccagaaaatgtgccgaaatatgttgttcttgttgtcgcggtgcttctggtatgcttcattgcccgctatgccattccttcttttgtgatttcagcccgctttaaacagaaagcgagagcgattcaactgattgcaaaagataaaccggctcagcaacttgaaaaactggatgctttattttccggaaaatttttcgtgcatccctggagcgagtttaaagagtcgctgcatcgtcagtttgagttagatgaagacagcgggcagaaacggatccatagcattcgttctaccgctccagcttccgcctggttctctgaacctttactggtggagattccactctatacggaagcctttaagcatttgcctggtatcctgactgggattgggataatcgggaccttctcaggcctaatgatcggcttgcaccactttgaccccagcactccagaacaagtgagcgccagcgtagctaaccttttgcgtgatgttctttacgcatttttaggctccgcctttgccatcgctttttccatcctggtcaccatctttgaaaaatggcgtctggcgagatgctataaaaatcttgagttgctgaccgccagcatcgaccaactttttgaaggtggcgtcggtgaagattacctttctcagctcctctccagcaccaaagaaaacaccactcatgctaaacaactgaaagatggtctggtcagcgatttaagagagatgctgcagaacctggtggatagccaggttcgagaaaaccagaaactggcagagacgttgtcttccacctatcgggaatcaggccagcagattgcggagcaggttagcggcgctattgaaaccagtctgaaaagtccgttggacaaaattgcgggcgtagtgcaaaccgcctccggcgatcagagccatcaagtgcagtcgatgcttgagaacgtccttactgcttttatgaacaaaatggataatacgtttggtcagcagttcaccacgatgcaggagatgatgggccgttctgtggaggcgatccagagcatgcaaagcggtttttctaccctgctgcaggatatgcgtcaggctggggatgattcgcgtcagggcagtgcccaactgatctctcagttactcagcgaaatgaaaagcggccagcaagagatgcaggcaggtatgaatgacatgctacgaagcctgcaggaatctgtagcccgcattggcgcagaaggtgaaggcgctggcgaacgcatggcccaacagctggaaaaaatctttgccgacagtgaagcgcgtgaaaaagcgatggcggaacagatgcgtgcctttattgaagccattcagtccagtgttcaacagggacaaaacgaaactatggagaaaatggcggcctctgtggatacgcttggcagccatatggcaaccttgttcgcacaactggaaaatggtcagcaacaacttaatcagcagcaaaatcaggcacaaaatctgttgatgagcaatatgagcaaaggtgtagaagatctgactcaaaacctggcaggtgtatttagtcagcttgagtccggacaaaaacagatgagccagacccaggaacaaggtcagcgtgctctgtatgaagagacccaacaactattagcccgtagtgaagctcgcgaacaggcggccgccgagcaacaacaagattttatggccgctctgcaacaaactatgcactccggccaggatgccctacgtgagaaaatgaccagcggtatcgatcaattaggtagccaattgggcaccctgtttgggcaactggaagaaggtcagaaatcccttagccagcaacagcaatcggctcagaatgctctgcaacaggaagctcagcgaatcattggccagcttgagagtcaggttcaggcgttaatgcagatgctgcgtgagcagcaatccgcatcaggtgatttactgcaacggatggcgcaaaacacgacgcgtcacctggaagaaattcaggctggtgccgataaaatgcgggtcgctgccgatcgctttgaaacagcggggaatcgtgtcgccgaagctaataatctgactgcagaagttctgaatggcacccagcaagcaggcagaaccctttccagtgccagcgctgagctaggcgcattgatcgctgactaccgcaatacccgcgaggtggtggcgaatgccattagcgcactggaaacactgatcaatagcagccatgacgagcaaacatcccgcagccggtttgtggaagatctgaagtcgtattccgaacgtctgcagcaatacaaccgtgaagcccaagagtttctccacaacgtcgctgaggtgatgggcaccagctttgagtccttcaccaccggggtagaaagcggtctgaaccgttcgctccaggagatggatacacaactgacaaaagcggcgggggcgttaagttcttctgttgaaattatcggtgaaagcgttgatacgctggaaaccgtgctccgtagtcgtcgcgcgtaa

SEQ ID NO: 8432 - DNA, 738 bp, Enterobacter aerogenes
atgtttaaccgggcattcaatggcaggcagcgtcgtagtgatgaagcggaaaaaccattctggatttcctatgccgacctgatgacagccatgatggtgctatttttggtcgtcatggtggcatcgcttagctccgtcacgcagaggatccagcaggcagaagcaggcgaaaagtcccgagggcatgatatcgcccgtctgtgtgaaaaacttgagttacaggcaaagaacctgaataaaacgatacatgtcgactgccatgataatcgtattagctttggtgaggcaggccgctttgagcataatcgtttttcgctcactcctgaaggcttgaaggctctacaggatgtggtgccgttagtcctggatgcggcaaatagcgatgaaggtaagaaatggtttaaacagatcgttattgaggggtttactgacacggacggctcgtatctctacaacttgcatctctctcttcagcgctcggaatgggtgatgtgcagtctgctggatagcagaagtgcgctacagcaaagaattaccgcagatcaacagttacagattcggaaattatttctggcgggtggcgtgtcgttcaacaatgcgaaagagagtaaagaagccagccgtcgtgtcgagttacgtatgcagttctttggcctgaaagataaaaaacaggacgaaagtatggatgtcgtccccggtattagtcaggaaacctgccaactgggtgcagtgcaatga

SEQ ID NO: 8433 - DNA, 1794 bp, Enterobacter aerogenes
atgacgtctgctattgagaaactgaaatcacgccttcttccttaccggcaaaagaacgaggctccggttgtgggtcacccatttacctatctacagcgtgtcatcagccaactcgaaaagaaggtagatgctcgcgcagtccagatggttccccctaaggagaaacgcagacaggcaatttcccggttgcgttcaggagtgacgccactgccatctgaatggaagatgatcttttttggcctcaatgacgttgcagaagatgatctgtttgatacagcactcattgatgatgcggcaaactttgccaaaatctcggctgaaattcagagcaaaattgcacagcaacgattaacgcgtagggagtggctggcgttatgtaccagctactttgggcatgccagcgatacgcccgaagaaaatccgcagtggcttcagctacgcatgcaaattgccgccgggtttgaacagctaaaggagagttcgcctcgctcgttatcatggatgacggtcatcgacacctatggagacatttttaccgataatgcgggctttcttcttgggcaacagctcggtcgtggggaaataaccgatatatctgtgctggaaaaagtggcacagatcccccagaccagttggctatggcgcaaaattgtgaaccatctggtgagcgagatttttcgtcagactgacgatgagtttgaacataaaattaatgaactgatcgcgttgagccgtcagctttctcgttttaaagataatatcctggccgctacacttacccgttattaccagtcaatttttaaacaccggactcaccttgaacttaagctgttagccctggagtattggggaaaccctcagttaaccagccgtaataaaggctggcaggttcatgtcgataacgcggtgctgcttatggtacaggggtggttcgctaaagatgacctgaaactgttctttgagttgcttaaaggtaaccgggatgtcgatcaggcgcgtctgttctactggctacgatatgctaatcagatgagttatacgcgaattgtgttgggtgaagatgctcagcgttcgaaagatatcgattatgttgattttcgggcaaaaaatgccggtcggttaagccgtctacaaggtcccggttctcgcgacaacaatgccatgatcatgaggattgggaattatctttttgtcgaattttcgaaagtaggagctatgtactcttatcatatcgataatgcaccatttaatccggaaacaggtattctcgacattgattacgatcttaaagataagcgtaataaccggcgtaaagtacgtctgcgtttaccgcatttgtctccagtaacgcactattcgcttaaccgtattgaagggtggatgagccgctatgatgaagaacttcgtagactaggcattagctacgttgcggaagattccaatcagccatcagccactatcgatatctcccgttttaatgcagatcaaagcggaggcaggtccgtatcttctcctgctaaatcagaagtcaatgaatcaaggtcaaacagagaagagcagatcaaaattattgcagcttctttaaaagccaaaaaagaaaaccaaaattttacgactcgagaacagcaaatcagggaagtgattcggtctgttgattgtaaagtgatggataaacgtggcatgggtggcgcaattcatattcagttcaacgaaccagatcatgaggcagccaagaaattgttaagcctcgggtttaagcctgtgctgggtaaatttacttactggagcaaatag

SEQ ID NO: 8434 - DNA, 3240 bp, Enterobacter aerogenes
gtgttcaaaaaattgttaggtaaatttattaatgataataaagcagttcctgcttcacttgtgccgctttatgcaattaaggcggagggcttcgctttcccctttagtcttgccgacactcaggataactggcttatcacttcatgcctggaacaactccatgaagaggactatgtatcacactggtcggattgctggtttatcagttgggatgacttctatcgtattctgaataatgaagattatgccagcagtctggcaattttcagcttccctcaacagcgtaatctgaccgcccatcttgctgcgacagggagcatcagcgatgacacctttcgagttttcattgataaatggacccagcctgacgattatcgccccgtagaggtcactaacctgggggccagcttttcctccccggaaggcacttttgtgctcagcgaagaaaactggcagcttctggactcactacagcagctcagattacagcagcgacagacgccgggtgagacggtcaaccaaaccgggtgggcaaaaatacgtcgacaggcaaaaaaggcaggagcaaaactggatgattacctggctaaaacgatagttatcaggcccgagtcactgcagttaaagttgcggaaatcactggtggcggatacccgggtactggaaattgagccggtttttgacgaacagcctgcaaagtggctgcagagtttcgatcgcacgcaacaggtacaagatcggtatcgcgttttgggtgatgacggtgaattaagccacgtcattctttcacctgaagtcaaagatgtgctgacctctgtacatgccatcactggccgtcgagttgctggtgatgatgcgctctcgtttgttcgcaatccgtatacttggattggcgaagaagctagccaggtacttgatcccgatgtatatgagcagaatctacaggatgcagggatctatttttatgatttccgtctggagcctcgtgttgatgaaaacatgcaggttgagtctgtttcgctgatcctgatccccaggactgaacagcctgtgccagatgaaacatacgtgtttcatcggccgattgaattggctgcgttgattactgagttggaacaaaaattagcggcgcatcttcctgctggtgtctggcagggctatgacctcgagctgtccagactcactccgaatgaattgcaagagtatcaggcattgctggaagtctggcagcaacaggctgcgggattgaatttttctcacgtactcgatctcaacaagtacagcgacagagttatagggataggtgagtttgagaaaatcagttcaccgtatctggtcaaaagtgaaagtgaaaattggcttccagacaatctcgctaaggagatgtgtgaagctatgttctcgggctgggacctggataatcatcagcattttcatgagctagaaacgcgtctggaagatgcaaaagcctctgatgctcctgaagtcgctatgccctggaacgataaccttctaccacgagaagaagcagaggttttccacgaaaagtggaaaaagaaaatcgatgctgaaacaagtaataccgcgaatactgagccggtgagtcgcgctgtcctgctgatcgaacagaatattgagcaggcactgtatgtcaaacagcggcgaacctccttgctagaagcacacttggctgaagccgagcttccaatgattcttaaggactctattcacctacgtgagcatcagtgtaaaggcgttgcctggctccagcagttgtaccttaaatccccaacagagacagcgggatgtttgctggcagacgatatggggctggggaaaacgttacagattttaaccttcctcatctggcatcgtgagcgtttcccagatgctccgccctctctgattgttgccccggtgtcgctactcgacaactgggagcgcgaagttggtaattttttcctgcgcgagcaggtttcgattttaaagctttacggcaatgaactcagagagaaaaagtgcgctaaggagagtatccctttggcgttaaagagtaaggggattaaaaacctgctgcaaaatgactggattggagaagctcagatcgttctgaccacatacgaaacgttacgcgatcaggaattttctttggctcgccaaccctggtccatcatggtttgcgatgaggcacagaaaattaaaaatccggcagccctaattacccagtctgctaaggcaattcaggcgcaattcaaagttgcgtgtactggaacacctgttgaaaatacgcttgttgatctatggtgcttgtttgactttgttcagccaggtctcttgggggcactgaataattttggcaaagattacctgcggccgatcgagcaacagagtaatgataaggtgcttgaatctctcagaaaattgattgaaccacagacactgcggcgcactaaggaagaagtggcgaaagatcttccggaaaaaattgaagataaatcctgtaagcagcttagtatgttgccgttgcagcgggacctctatactcactcggtagtgagttggcagaaccaacaggaaatcagcgacggtctggatcaacgtggtgcaggtatgcttggactactccaccgcctgaaactgatttgtgcatggccttattccgtgagtgctgatttacgcttacgtaacgatgccccgaaagtgaaatggcttttggatacattaaataatattcgccagtcatcagatgataaggtcattatctttactgaactgcgcgatattcaacgtgaattgcagcatctggtctctcagcattttggattcaagccttttatcattaatggtgataccagcacgaaatccggaagtgaccaaaaccgtcagagtttgatcgataactttcagtcatcgccaggttttaacgttatcatcctatcgacgatagccgttgggtttggtgtcaatgtacaaaaagcaaatcatgtcatccattttactcgctgttggaaccctgccaaagaagatcaggcaactgaccgggcttaccgcatagggcagcaaaaagatgtctacgtttactatccaactgtgcgtgatagtcagttaatgaccttcgaagagaccctggatgaattactgaatcgacgtagggctctggcaagagatatgctaaaagcttcagccgatctcactgctgctgattttgaagcggtacttacccgggctaatactaattaa

SEQ ID NO: 8435 - DNA, 2037 bp, Pantoea agglomerans
atggattcgctgctgcttcccggcgtgctggtgcgtaatggcattttgtctatcgcttcagttttgaaatacgatgctgccccaggttatgtaactatcctgctggtcaccgctctttgcttaacagttctctactggcgcaaggctgtaaaacgtcgccgtaaggctcttagcagtatccacagcattatcgcaaacacgcctgaagatcagttcagccagcatgtgactgaaatcgacgccagtattgcagcagccgataaaacggaagaacaaaaaaatgtagcagaggcatggaaagaatatcgtgaaacccatgtgattgacgatcgggacgggccccctgtggtacgcaatgcggtccgtcccagccaattttttaatctggatgacctgcactttacgcaaggcttctggcgcatcgttccgggactctttgtcactgtaggcctgtctctgacctttctcggcctgatttctgcacttaattcgatgagtacctcactagacgatggtggtagcgcggcattagaaggcctacttaccattgcctcggcaaagttcatcatgtctttgaccggcttgtgctgctctatcgtctttaccatatggctgcgtcgtggcacgtcacaactggaaaaagcggtacatagtcttaacagtttgattgagaagcgtctgacatttatcagcctggaagatctctccattcgccagttgaaagcaaccattgaaagtcgtgagcatttccgcaagctgggactggagatggtggctgagattggccgcccgctacgtgaagacctcccaagagcgatctcggaatcgattagtacagctattacgccggttatcgaacaggtcagccgtttgggcaatgatggcgtgggagagatggtacaaaacctctcttcacgcttttctgaggatgtcggtcgggctctggcacaagccagcgaacgtatttctctggcaggagaccagatcaaattgctggcagagcgaatggatcaaagctcaggaaaaatgggcaatgaaatggaaagcgcgattggccgcttaggccaggcggtggaaacgctgcgtgatggcatgcagcaaacggcagagacggcaacatcggcattcaaccaaggtgccgaaaacctgctggcaaccatgaattcaaccctgcagggcattaaagacaataccggtgaaggcgcgcgtgcgatgggcgaagcggctgctgatatgaaagccgccgccttgggtattcgaaccgaactcgaagttgcagcgaaacagggggctgaagcagcgcaggcacgtatgtctgaatcagcgtctaaggccagcgacgcgattggtcaggccgcaacacaagtgctgggtgcttttggcaataccgcaggtgaaatcactaaagcaactgaggcgatgacccagaaagccagcagcgaactgctttctcctctttctgctatcgctgaaaaactggaagacgtgatgggcatgctgaccgaaaccagcactgcattacgacgagcttctgatgggattaaagaaggtgctgtcgcctcggagaacgcttcaggcagcttccgcacatctgcccaatcattggccagcgccgccgatccgattcgagcgatgatggagcgaattgaagtcagcacgcgccagttacgtgagagcagtgaaaatagccttttggctatcgctcaagccgctaaaaccaatgctgaacaatctgcaatgacgctttcagctgcacaagagacactgggtgggcaacatcgtgcggttgaatccacgctgactaatctccagtctttgattgcggctttacgcggtcagggcgaacgtctggatggcattgacgagaaacttggcaaggcattcgacagctatcaacagcaagttgccacatcggttgaaacgctcttcgatcatgtcaaaaccttgcagaatgaactcatgccagcattggacacaatgcagagcattgtcgatcaggctgaaaacttcgcaccgaaacaagggcgaatctcatga

SEQ ID NO: 8436 - DNA, 864 bp, Pantoea agglomerans
atgagagccaacgccagtcgtaagcgctcacatgaagaggaagaagagtccgtttttgtctcgatgacagatatgacggtcagctttcttttcattgtcatggtgctgctcgctttttttgccagccgctacaacgataagaacactgtcccgcgtaatgagtatgaacaggcggtacaaatccgcgataaaaccatcgtggatttgcgtactgagattgcgttgttaaagcaggttgatccgctggaacagtatatgtcgcaggctgctgctgcccggctcaacttactctatcaattgcgcaataatctgaagcattcatttcctgaattgccggttgatgtcattcctgaagaaggcacacttcgctttcagggggaaggtttgtttaccagcaatagctatacgctaagcgacgataagcgaaaaatcgtcgaagcattagcgaagacgctcgattccctgctgccctgctataccttcagccaaagcgtcggatggaataaaagctgcaatccatcatttgccattattgaagcggtgcagattgagggacacacggactctaaaggcgaagatgtttataacctgaatctgtcgactaaccgtgctatcaccacgtttaccagcatgcttgccgcagcgccagacctggtcgcacattttaatatgcgcaaccaacccgttctttctgtggcgggctacggcaaaatgcgtccggttaagcccaatgataccccacaaaatatggcgatgaaccgccgtattgatctccgcatcattatgcatacaccggctaatgcagcggaaattgaagacatccgcaagcgcctgttcgagccgctgaggaagagtacgctatga

SEQ ID NO: 8437 - DNA, 1326 bp, Pantoea agglomerans
atgaaattgagcgatgtttttcttaagcctgtggccctcgtcaagccagcaatagctgtatcaaaaggtttaacggtaaagatccaagccattcatgagcgctggcccgatgtcgttaaggagattgccgatcgcgatcgtgaaaaggtgttacgcaagctgcttgactatatagaacgctgggaatggaatgatgtaaaaatgtcctttatctgctctggcgcaccgattgtgtttgataaagaattcagaacccaggaggagtttgctgtactacaggagttctatttacgggaaaccatcgttacggactcacagccctttatttctgcaatgatatcggcctatatccgtagttatgaaccgggctctgttcacacaatcaaaattaaaaactgccttgatatcgcaagcgaacatatgagcgataagtggaaagatattgtcgagcaactacccgaattctttaacgctcaccaggcacaccaagctttagcagagagaatgacggagatggatgcgccatggaaagagcttaaacagtttggtattacacgcccgcacgatccggggttaatgtcgcacgctcatctggcctatatagcatcactggcacctggattgaatgaaagacccgctattgagaagctttttgcctggttaaaaccggagggcagaagtggcgctttgatgaatggcgcagcagaggctatcaacgcgctgttatcacactggttgcataaacaacccgacgaagaactttctcgctatctgaccgaaacgttagtagcctggtacgaagatccgcgcctgagtcgcggtggggtatggggtagcgtagacgaatcttgccggaatttgattataaactggctgacacgcgagaacattttgttctttctcgatgtggtctcagacgttgaagacagtcatatgtgggagcctcggcgcaagttctggcttaatttataccatcaggacaaaattgattccgcatgggttgcttttagtgctgaagcagatgtgcgggccagatcgataaaaaggactatgcgagaaagtgcgacgttaaccttcggacgacaagttgctggcagccgcaaaaatacatcattgctaattctaaaaattggacgttgcattgtggtcgaagggtcacacaattataaagtgcatatttttagcaacgataacaaaaaagcgcctgaactcttccgcctggcatatgactgcgaacatattcgcatgttacccaatccggtagctattccacatctcggtggctggcaggaaaaagtgcgtgaacaaattgagtatctttcatga

SEQ ID NO: 8438 - DNA, 3129 bp, Pantoea agglomerans
atgacatttgctttcaatcataatgcagaagcgattaccctcaatattgctgaagaaaaacagagcttcattcatcgtctgtttaaaagacagcaacctgcgactttgtctggcctgacacataacgatcgcgccttagcttttgctatcgccgatctgaaagcgctggcagaagaatttagtgaacccttgcacatcagtgatgacactattgtgatgggccatcatctggctggcagactggatgcggaaacggcgcaagctttaggtatgcctcccctcgtcgatctgacattgaaaacggatatcgaaggctcaattgggagcgatacctttcgtttacagcatgaatggctacgcaacggtattcgccagataccacgccggaccggcacaattttagctacgtctcagggattgcgtcggctgccattatggatgatggaggctgtggaagttgccgaaaattttacgccgggcggcggagaagcctcggactgggaatcgctagcgcgcttccgccaggcccttgatcctggcgtccagatgggccatgaaatcgatgctgttcgcgtctcattaaccgactttatgcaaggtttagaagtccgcattgctgatcggttttctgtttccaccagtgcaaatggcgctgatgattttgaaatcatcccattttccggtaagaatctggaagaattggaaagcaatggagaagcgattagcgagtctgcaggtgagctaagtgaacaaacgctacgtcggttccaacaacgtgtcagaactcagggagcgctttcagcctatcgtgttggcgaaggcaattatctggtcattgaccgaagtgctcgtcccatccttgatgtcatggtggagaagcaaaagtcttcacctgacgaaagacgcgcttttatcgaaaacccacgacctgcaattaccagtgctgttgaaaaatacttaagacaatcaggcaggctggatggtctcgacgatgtgggtgaagaagaagctattgaagctgcagcaggtcctgcatttgttgaaaccattgaatattccgagcgtgttaaaggaattttgcattaccgaaaaggtgctgtttctacgcctatgaccggagaaacggtctggttgcctgaggtaatccctgatgccctgaccaacattatcactgcgatggatagccaggcgctggcaagcatctgcgatcagttgcgtaatgctatagatgcatctcagaatgaagttgagatcgcgtctcatcctgttaaagccacagaagagacattgcacgcgctagaaaagcgtttggctaatcttatagagatagaaggttcagcagaaacaacagaaagcgaagataaggtggctgtggatgttcaacctcccgctacggtaatactggatactaaagacaactttgaagagttgttatggcaacctgatcttaaaaaacgttccgttttcatagatgagcaacttcccgcgggcgttaaaacggcattgaggccgcatcagctgggcagctttagtttacagctttcatcatggaaatcaggcatgcctggcattttgaacgcggatgaacagggattaggtaagacacttcagaccattgcctttctacgctggttaaaagagaacaataacgtcagtaccgtcagcaataaagagcgcggaccagtacttattgttgctccaacctcgttgctggaaaactggaatgctgaggtcaggcagcatactgatagtgatggacttggccatttgctgcgcctctatggttcatctttaagccagtataaagatttcgatgctaaaggtgtcgagacaaaagatggtaatactttgctgaattttcagcagttgcatgaggcaatcaaagaaggaaaaggtcatcgtttctggatattaacgacatatacaacgctgactaattaccaacactcctttgcgaagatccatttctcagctgtagtattcgatgaaatacaagccgtcaaaaatcctgactcgctgcgagctcgcgccgcacgcgccgtcaatgctgcttatcgaatcggcctgacaggcacgccaatagaaaacaccacgactgacttatgggcagtaatggaccagttggctccaggttctttggatacgttgagtaatttcaatacgctgtatagcgaacctgatgagcaaaatatgcttcagctatatcagcgagtatttgaatgtcgcaatcagctaccacctttagcattccgccgtttaaaagaagatgttgcgaaagagctgcctgcaaaaacgcgctttcttcatccgcgcctgatgccggaaggacaagctattgcttacgaaacagcccggttaaaactttctcagggcggtcccggcgctgcacttaaaatgctgcagcatatccgcggcgtttcagtacatccagctatggaaatgagcggcgacaatcagagttttatcgatgcctctgcgcgtctgaatgcatgctttgagattttgcatcgtattaaagcaaaaggtgagcgtgttctggttttcattgaacaccgtaaaatgcagttccggtttatggaactggctcgccaggaattcgggcttgaatatattgatcatattaacggcgatacgcccattcagaagcgccaggctatcgtgcgtcgattccagcaccatcttgagcaagatggtggctttgacttgctggtgctcggccctaaagcagccggaacgggtttaacgttgactgccgcaacacatgtcattcacctgtctcgctggtggaaccctgctgttgaagagcaatgtaatgaccgtgtccatcgtatcggccagcagcacccagtccaaatccatatgccattggccatacatgctggctaccaggaacactctttcgactgtttactccaggggcttatgtcacgcaaacgaagtttagcgcgagcagccctatggccaatgggtgatagtgctggtgacatctcacagctacaggcagctttaagaaaagacaagtctgaagcgagcggagatattttagaaacaactatccgaatgatgtttgaaagagatgctgaaactgacggtacgcgaatggataatgggtcatatcgaatcagttag

SEQ ID NO: 8439 - DNA, 2190 bp, Enterobacter cloacae subsp. cloacae ENHKU01
atgtcctggcttaattcctttttagtgacgcttacatctgtggagccgcataatgtgcccttcactgtaatcagcatcgtatgcctggccgttgcctgctttattttcttttatttacttcgggccattaaaattgttaacagtctgaaaaaatacacccaatcaattaatagcattgaaagcaactccccaagggaacagcttgcacatctgcaaaatctctttaaacgtccagaactcaaacatgcgtggaatgagtttgaagagtcgttacacccgcagagtgagttggaagatggggaggaaaaaatcgtccgcatacgtgccactgcgccaagttcgagctacttctctgagcaacagttagtcgatattccacttaataccgaattcttcaaacacctgcccggtattctgaccggtgttgggattatcggtacgttttacggtctgatgattggcctcaaccacttcgaccccagcactccagagcaggttaccagcagcgtcaataatttgctgcacgatgtattgtacgcattccttggctctgccgtggctattgccgcctcaattttcgtcacatggctggaaaaactgtccatagccaagtgctataagtatctcgaaaaatttaccgccgctatcgacaagctctacgttagcggtgtgggcgaggaatacctcgcctcgctggtgaaatccagtaacgaaagcgctacccaggcacgccatctgaaagagagcctggtcaccgatcttcgcgatatgctgctgcatctcgccgaaagccagaaagttgaaaatgaacgcctcgcgaatacattgagtaatacctatcgcgaatcaggcgcgcagtttgccgaccaggtgagcggagcaatcgaaaatagcctgaagtctccgctggataaaattgcgggtgcggtacagaccgccagcggcgatcaaagcggcatggtacagaacatgctgcaggatgtgctgaccgcatttatggcgaagctcgataccacctttggccagcagtttacgaatctcaacgaaatgatggggcaaaccgtcggggctatccagacgatgcaaagtggattctccgccctgctacaggatatgcgtcaggttagcgacgattcccgtcagggaagtgcacagctgattgaacagcttctctctgaaatgaaatccggacaacaggcgatgcaggctggtatgaatgacatgctgaccagcttacaagcctctgtcgcgaaaattggcgctgagggtgaaggcgccggtgaacggatggcacggcagcttgagaaaatgtttgccgacagcgaagcgcgagaaaaagcgcaggcagaacatatgtccgcctttattgaagccattcagaattcagtgcagcagggacaaagcgcaaccatggaaaaaatagcggcctcagtcgaagcactcggggaacagttgggcagtctgtttggccagatagataagggtcagcaacagatatcagcgaaccagcaggctaaccagcagtctctgcacgaacagacgcagcgtgtgatgagtgaagtagacgatcagatcaaacagttgattgaaaccgttgctagtcagcatcagggaaccaccgaaacgctgaacaaacttgcagaacagaccaaccgacagattcaggatatgcaaaacggcgcggataaaatgcgtgttgccgccgagcgttttgaacacgcaggcgataaggtgtcggaggcgaatcacctcacggctgacgtattgaataaagtgcagtcggcgggctcctcgctctcccttgcaaccagcgaactcagttcagtagtggccgattatcggaacaatcgtgaagccgtcagcaaatccattgccatgctggagctgcttgcagccaacactcagtctgaacagactacccgcagccaatttatcaccgatctcaaacagcacggtgaacgcttgcagagctataaccgtgaagcacagacctttatggaaaatgtcagcgatgtgctcgggaaaggctttgaagacttctcagagggcgtttcgcgcagcctggataaaacgctgggcaaactggacgtcgaaatggcgaaagcctctaatctgcttgcaggctctgtcgaacagatcggtgaaagcgtcagcgagcttgatgatgttctgtctcgcgtgcgtgcctga

SEQ ID NO: 8440 - DNA, 738 bp, Enterobacter cloacae subsp. cloacae ENHKU01
atgtttgggaatgcatttggcgttaaaaagcgccgcagtgatgaagctgagaagcccttctggatttcttacgccgatctgatgaccgccatgatggtgctatttctggtggtgatggtcgcgtcgctaagctccgttacacaacgcattcaacgcgcggagcaaggagaaaaagtcaggggacaggacatcgccagattatgtgagcgcctggagctgcatgcccgcagtgtaaacaaaaccatcgtggtggattgccacgataaccgcatcagctttggtgaagctggtcgtttcgatcacaatcgatttttcctgaacgtagaaggacaaaaagctctacaggatgtggttcctcttgtacttgaagcctccgacagtgaagaaggcaaaaagtggtttaagcaaatcgtcattgaaggatttaccgacaccgacggttcgtacctttataacctgcatctttccctacagcgttctgaatgggtcatgtgtagtttgctcgatagccgcagtcctctacaaaaaaacatttctgcagaacagcagatccaaattcgtaagcttttcctggcggggggcgtttcgtttaacaacgcgaaagagagcaaagaagccagccgtcgcgtcgagttgcgtatgcagttcttcgggctgaaagataagcatgctgcagacgaggtggatttcccgcctgttgtgaataaagaagtttgccagctggtaatgccgcaatga

SEQ ID NO: 8441 - DNA, 213 bp, Enterobacter cloacae subsp. cloacae ENHKU01
atgacgcccgcattgagttctctagcgcagcgcattgcagctaagctctcttccagccagcaggaggagcattttctgcgcaatgatttccacgcgctggcctctgctggccgcgagatggaaaagcgatttgataaagcagagaaaatccccccccgccacatgaaatgcggctggcggcactgcgtcgttttcgccttgcagaagaactga

SEQ ID NO: 8442 - DNA, 3243 bp, Enterobacter cloacae subsp. cloacae ENHKU01
atgctgaaacgtctgctaagtaaactgacgggaaaccgtcagcagatagaacaccatctgagaaatcagtatcaggttgaggaaaacggactcagttttccgcaatctttagttgatgacccagatctttgggctctggcatcctggcttgagcaactggccgaagaagactatctgatttcactaacagaccgctggttattgagctgggataatttgtatcgcctactggaggacgaggaacactccagcagtctgcctctaattggcgttccagagatattaccattacgtgcaagactgagttcgcgtggggcattaaacgatagtgattttcgtgtctggattgcggaatggactttggttccaacccgtaagtcgattcgtttcaatcgtaccggcgcaatttttaattatgaaaatcaacagcatttgttatcacgggaaaactgggctcttttgcagacaatagagcagcttagtacccagcaaattcagaccccaggcgaaaccactaaccagttggggtgggccgcaattcgcaaatgtgcgaaacaggcctctgcaaaatttgatgactatttagaaaaaacgcacgttatcaaaccaacgtcgttgtcattacgccttcgtaaggctacggttgctgataccgcggttatcgagattgaacctcactttcaagaccagcccgctaactggctcgacagttttgacaagaactcacaggttcacgatagctatcgcatacccggagagaatggcgaactcagccatgtcatcatcccacctgaagtgaaagaagttctgaattcaatacatgcaatcccagggcgtagagtggccggtagtgaagcgctttcctttgttcgcaacccctatactttcctgggtgaagatgccgccagtgttatttcccctgaagaacatgagcaagcactttttgatgcccacattttcttccatcatttcagacttcagccccgtgtaaatgatgagaacaagatagacgatattaaactggtacttgagcctatctctcccataccacaaccggaagtgacatttcttttctccgcaccatgggaactggataaatttgttcagagcttaggtatcagtgttgctgcgcaaatgccagcaggttcctggcagggttacgaactggaactaagtcaattcactgaacagcaatggcatgattgccaatcgctgttgtcgcgctggcaacaggaagttgaaggtaaagaatttaacgatgtccttgatctcggtaaatatggcgatcgcgttatcggcattggtgaatttgaaaaaatatcctcgccatggctgaccaaggcgcaaagtgaaaactggctccctgatggggtcgacttctccgcattttcggttgaagccctggatggctggcaaccagataacctgcaacatttcgatgaactgcaggaaagaatcactcaggcagaagcgactggcgaaacgcatatcatcttcccctggaatgagactgaactgccattggatgcggcgaaaaccttcagtaagaactgggaaaagcagcaaaatatagcacatgatttaaagagtaacgttgttgaaaaagcagcccgggcagtgctcaaaattgaacagaatattgaagaagctgtttacattaaactgcgccgagattcactcctcaatgcgcgtcatgccgagcctgaaattccactgagccttaaagaacacatccggctcaaagaccatcagcgtgaaggcgtggcctggctccaacagcttttccttcgttcgcctcaggaaactacaggttgcctgctcgcggatgatatggggctggggaaaacgctgcagatcctgagctttttggtttggttcattgaaaaattccctgacgagccacccagcctcatcgttgcccctgtctctcttctggataactgggagcgtgaactggacaatttcttctatacatctggcattccagtaatgaaattgtatggcgacaccatcaaagcggtgaagtacccgaaacaggctattcctgctcatctgcagtctcaggggatcaaaaatctgcttaaacccggctggcagggtgacgcgaaaattattctgacaacctacgaaacacttcgcgatcaggaattttcactggggcgccagccctggtccattatggtgtgtgacgaggcacaaaaaataaagaacccggcagcattaattactcatgcagccaatgcgatacaagcacgatttaaagtggcatgcaccggcacgccagttgaaaacacgcttgtagatctctggagcctttttgatttcgctcagccgggtctcttaggagcgctcaatgaatttggcaaatcctacgttcgccctatcgagaacgaagcgggtcgtgatacaggacagcttgaaagtttacgagcgttgattgaaccacaaacattacgccgaactaaagaagaggttgcgcgtgacttgccacaaaaaatcgaagtcgtcagctgtaagcaactgccgctttctgcccctcaaaggcaactgtatctttcttcgatagcgaactggcaacaacagcaggcgcttagtgaaggaatgcagcaagcaggcgcgggtatgttagggttattgcatcgtcttaaactcatttgtgcacacccggcagtcgttaacccagaacctcgctatcgggaagcctcacccaagcttaattggatgttgaaaacattggatgaaattaagcacaccagcaaagacaaagtaatcatctttactgagctgcgcgatcttcagcgcgagatacaacacgctattcaacagcgatttggtttccgtccagtgatcatcaacggcgacaccagcactaaaagtcatagtcagaataaccgccagcgactgattgatgatttccaggcccaacccggctttggcgtgatcattctctccaccgtcgcggttggttttggggttaacgtacagaaagcaaaccacgttattcatttcacccgctgttggaatccggcaaaagaagatcaagcaactgaccgcgcttaccgtatcggccagacaaaggatgtgtatgtgtattatcccacggtaacggactctgaaatcacgacgtttgaagaaacgctagatgaactccttcagcgtcgccgggcattggcgagggatatgttgtgctctgcaccagatttaagcagtgctgattttgagaacattttaaaagggtcttaa

SEQ ID NO: 8443 - DNA, 2190 bp, Enterobacter cloacae S611
atgccctggcttaattccattttattgtcactaacctctgtgcagcctcatatggtgccaataactgttatctgctttgtcattatcgctttcatcctgtttattatcttttatttatccaggtcggttaaaattgttaaccgcttgaaaaaatacacacacgaaattaataacatcgcaaatgataagcttgagaaccagcgtgaactgctaaaaaatttattggttcagcccgagtataagcacgcctggagtgagttttccgaatccttgcatccccagagtgaactggtcggcagcgaagaaaaaattgttaaaattcgcgccactgctccgagcgccagctttttctctgaacaacagttggtggatattcctcttaataccgaattctttaagcatctacccggaattctcactggtgtgggtattatagggacattttatgggctgatgattggcctgaaccactttgaccccagcacgccagagcaagtcaccagcagcgtcaataatcttctgcacgatgtgctttacgccttcctcggctctgcctttgccattttcttctcgatcgttattacctggctggaaaagttctctattgcaagttgctataaaaatctcgaaaaattcaccgcggcactagattccctctatgacagcggcgtaagtgcggagtaccttgcctcgctagtaaaatccagtaatgaaagcgcaacccaggcacgtcacctgaaagagagcctggtcaccgatcttcgcgatatgctgctgcatctcgccgagagccagaaagttgaaaatgaacgtctcgcaaatactttaagcaacacctaccgcgaatcaggcgcacaattcgccgaccaggtaagtggcgcaatcgaaaatagcctgaagtcaccgctggataaaattgccggagcagttcagaccgccagtggcgatcaaagcggcatggtacaaaacatgttgcaggacgtgttgacggcgtttatggcgaagctcgacaccacctttggtcaacagtttactaacctgaatgaaatgatgggacagactgttggtgcaatccagacgatgcaaaacggcttctccgcgctattacaggatatgcgtcaggtcagcgatgattcccgccagggaagcgcccaactgattgaacagctgctgtctgaaatgaaatcgggtcagcaagccatgcaggccggcatgcatgacatgctcaccagcttacaatcctctgtcgctaaaatcggtgccgagggcgaaggagccggcgaacgtatggctcgtcagttggagaaaatgttcgctgatagtgaagcacgtgaaaaagcccaagcagaacacatggctgcctttattgaagccatccagaattcagtgcagcagggccaaagtgcaacaatggagaaaatggcgacttctgtcgaagcactgggtgagcagttgggcagtctgtttggtcaaattgataagggtcagcaacagatatctgcaaatcagcaagcgaaccagcagtctctgcacgaacagacgcagcgagtgatgagtgaagtggacgatcagattaaacagctgattgagaccgttgctatgcagcatcaagggatgacggaaacgctcaacaagctcgcagagcaaactaaccggcagatgcaggatatgcaaaacggcgcggacaaaatgcgccttgcagccgaacgctttgaacacgcaggtgatgaagtctcaaaagccaatcaccttactgctgacgtactcaataaagcacaatcggcgggttcatcgctctcccttgccaccagtgaactgacctcggtagttgccgattacagaaacaacagggaagccgtcagcaaatccatcgccatgctggaattgctcgcagctaatacccagtctgaacagactacccgcagtcagttcattaccgatctcaagcagcatggtgagcggttacagagctataaccgggaagcgcagactttcatggaaaatgtcagcgacgtgctcggaaaaggttttgaagacttttcagaaggtgtttcacgcagcctggataaaacactgggcaaactggacgttgaaatggcgaaagcctcaaatctgcttgcaggctctgtcgaacagatcggagaaagcgtcagtgagcttgacgatgttctgtcacgcgttcgtgcctga

SEQ ID NO: 8444 - DNA, 627 bp, Enterobacter cloacae S611
atggtggcatcgttaagttctgttacccagcgcattcagcgtgcggagcaaggagaaaaagtcagaggacaggatattgccaagttatgtgagcgcctggagcttcatgcccgcaccgtgaacaaaaccatcgtggtagattgccatgataaccgtattagctttggtgaagccgggcgttttgaccacaaccgtttttttctgaatgctgaagggcaaaaagcactgcaggatgttgttccgctggtgctggaagcatccgacagtgaagagggcaaaaagtggtttaagcagatcgtcattgaagggttcaccgacaccgatggctcttatctctacaatttacatctctctctccagcgatctgaatgggttatgtgcagtttgctcgatagccgcagccctctgcaaaaaaacatttctacagagcagcagatacaaatccgtaagcttttccttgctggtggtgtctcatttaataatgcgaaagagagcaaagaagccagccgccgcgtggaattgcgcatgcagttcttcgggcttaaggataaacgtgatggggccgaagaggtggattttcctccggtcgttaataaagaagtttgccagctggtaatgccacaatga

SEQ ID NO: 8445 - DNA, 1683 bp, Enterobacter cloacae S611
atgacacccgcactgaaatctttatcgcagcgtattgcagcgaagctatcttccagccaacagggtgatgattatctgcgtaatgattttgacgcgctagcttctgctggccgcgatatggaaaagcgttttgaaaaaacagatagaatccctgcacctccacatgaaatgcgcctggcagccctgcgtcgttttcgtcttgcagaagagttgaacgaacgtgagtggcggatggtgttttatggcctcgccgataatgacccgctataccccgaccggccagtattactggaggatgatacattcttcccccgtgtagacagtgctataaaaaaacagattgagtctaaaaaattgaagcgcaaggactgggcggcactctgctcaagttattttgcttacaggcacgagtctcctgaaacaaacccgcactggtgtgtgctgcgtagtcatattgcccaaggttactcagtggtaaaagccaccatccgcagagaaaagtcgtggatgaaaaccatagagttttatcacgacatttttacgcctcaggccggcggcgtgatatcccagcagctactttccggtgaaagcaattccctgtcatcattagaaaaaatagcgcaaattcctgatagcagctggttgtggaagcgtattttcacggtgctgctggcgcagcttgatactctggacgatcctcaatatctggagaaaatcagttggctattgggccttgcggcacagtgggtacgttttcgcgatgacatcatgacggcaatactgacccgttactatcactccacttatcgggatcaggctcattcagctttaaaacaagctgcactggaatactgggataacccgcaactgaaaagccagcagaataagtggcatcaatatgtttcagaagccgtcgcagcaatggtgcgaggctggctggctaaacaggatttgatgcatttcttcgagctattgcgtggcaatggtgatgtcgatcaggcacgactccactattggctgcgtttcgccaaccaaatgggattcacccgcatcgtgatggggcctgatgccttgcacgatcgtagcagcgattttgtgaaattccgcgacgagaataaagggcggttgagccatttacgtagtggtcgtagttttgataacgccatgatcatgcagattaacgattatatttttgtggagttttctggaacaggtaacgcgatgtatgcatatcgtgtgggccaagctccatttaatccagagtcgcaatcattggatattaatatccagttaaaagataaataccgtaatgttcttcgccttccccataccccacgagccgaaggatacaacaagatccggatcaccggctggatgctgaaatacgaagatgaactgcgcaagctgggtattcgctggatggcggaagaaccggtcaaatttgttgataaacaagcgccctctcccgcctctgtatctaatataaaaatcatcaatccattgcgtgatacggcaatacagcggctggtagaaaacacttcatgcaccgtcagcgataatcgcccaaaaggtgggggtttatctatacagctcaaatctcccaacgacacagtggaaaaagagttgctaagactcggattcacccctgtggctaaagaacagcatcgttactggatcaaataa

SEQ ID NO: 8446 - DNA, 3243 bp, Enterobacter cloacae S611
atgcttaaacgtctgctaagtaaactgacgggaaaccgtcagcagatagaacgccatctgaagaatcagtaccaaatcgaggagagtggactcagcttcccactgtcattagttgaagactcacagctttgggcgctggcatcctggctggagcaactggctgaagaagactatctgatatcgcttacagacagatggttattaagttgggaagcgatgtatcgcctgctcgatgatgaagaacatgccagtagcttgcctcttattggggtacctgatgtactgcctttacgagcaagcctgtgttcacgtggagcattaagcgataatgactttcgtgtctggattgctgaatgggccacgcttcctgcccttcgccccatccatttcagtcggactggtgccatttttacctacgaaaatcagcagcatttgttatcgcgggagaactgggcgctattacaagcaacagaacaacttaatgcccaacaaacccaggctcctggtgaaactactaaccagttgggatgggctactatccgcaaatgtgcaaaaaaagcagccgcaaaatttgatgattatttagataaaacgcgagtcgttaaacccacctcattgtcattacgtctgcgtaaagcaacggttgccgatactgctgttattgaaattgaacctcattttgatgatcagccagataactggctaggcagttttgacaaaaattcgcaggtacacgatagctaccgcatccccggagcaaatggcgaactcagccatgtcatcatcactcccgaagtgaaagaagtcctgaattcaatacattccattcccggtcgtcgagtagcgggaagcgaagcgctttcctttgttcgcaatccctatacctttttgggcgaagatgccgcggatgttatcgctccggaagaacatgagcaggcactgtttgatgcgagaatcttctttcatcatttcaggttaataccccagcagagtgctgagaataagatctcggaagttatgctgatacttgaacctatttcaccgattccgcagcctgaggtcacatttgtattctccgccccctgggagcttgaaaaatttctacagcaactcggtatcagcgtcgcagcaaagatgccagcaggcgcctggcaaggttacgaactggaattaagccaatttactgaacagcagtggcacgattgccaggccttactcactcgctggcagcaagagattgaaggaaaagaatttagcgatgtgctggatattgctaagtatggcgatcgggtgattggtattggtgaatttgaaaaaatatcctcgccctggctgaccaaagcgcaaagtgaaaactggctgcccgatgacatcgatttctcgaaattttcagtcgaaacactggctggttggcaacgtgaaaatctccatcatctcgatcaactacagcaaagaattactcaggcagaaattgctggtgaagcacagatcatcgccccatggaatgataaaccactgccgcttgaagcagccaaaacgtttattaagaattggcaaaagcaagagaacactgtggatgactctcaaaataacgttgcagataaaacgacgcgggccgtactcaaaattgagcagaatattgaagaagcggcctatatcaaacagcgtcgcgattcgctcctcaatgcccgtcatgcagaacctgaaattccgttgtgccttaaagagaaaatccaactcaaagatcatcaacgtgagggtgtggcctggcttcaacaactcttcctgcgctctccagaggaaactgcaggctgcctgctggcggatgatatggggctggggaaaacgctgcaaattctaagcttcctcgtatggttcattgaaaaatttccccacgagccaccaagtctcattgttgcccctgtctcactattagataactgggaacgtgagctggaaaacttcttctatacctcaggaatacaggtgctgaagttgtatggcgagaccattaaagcggtgaaatatcccaaacaggctattcctgttcatctgcaatcccaggggatcaaaaatctgcttaaacctggctggcaaggtgaggcaaaaatcatactgacaacctacgaaacgcttcgcgatcaagagttttctctggcacgccaaccctggtccatcatggtatgcgacgaggcgcaaaaaataaaaaatcctgctgcgttaatcacacatgccgccaacgcagttcaagccaggttcaaaatagcttgtacaggtactcctgtcgaaaacacccttgtagatttgtggagcctgtttgatttcgcacaaccgggcttattaggggcgctcaatgaatttggcaaatattatgttcgccctatcgaaaacgaagcgggccgtgatacggaacgactagaaagtttacgagcgttgattgaacctcaaacattgcgcagaactaaagaagaggtagcacgggatttgccgcaaaaaattgaagtggccgattgtaagcgactccctctttccgcacctcaaaagcaactgtatctctcttcggttgccgactggcagcaacaacaggccctgagcgagggaatgcagcaggcaggggcggggatgctggggttattacagcggttaaaactcatttgtgcacatccggcagtcgttagtcccgagccacgctatcgagaaagctcaccgaagcttaactggatgctgaataagctggatgaaataaaacataccagtaaagacaaagtgattatttttacagagcttcgcaatctgcaacgagaaattcagcatgctattcagcagcgattcggtttacgtccggtaattattaatggtgataccagtaccaaaagccagagccagaatagccgccagcggttgattgatgattttcaggctcaaccgggctttggcgtgattattctttccacagtagcagttggcttcggaattaatgtccagaaagccaatcacgttattcatttcactcgctgttggaatccggcgaaggaagatcaggcgaccgatcgcgcctatcgtattgggcagacaaaagatgtgtatgtgtattatccgacggtcacggacaacgatgtcacaacgtttgaagaaacgttggatgctttactcaaccgcaggcgcgcacttgcgcgagatatgctttgtgcttccccagatttaagcggtgccgatttcgaagaaatgttcaaaggaacatga

SEQ ID NO: 8447 - DNA, 2136 bp, Enterobacter cloacae UCI 24
gtgcccttcactgtaatcagcatcgtatgcctggccgttgcctgctttattttcttttatttacttcgggccattaaaattgttaacagtctgaaaaaatacacccaattaattaatagcattgaaagcaactccccaagggaacagcttgcacatctgcaaaatctctttaaacgtccagaactcaaacatgcgtggaatgagtttgaagagtcgttacacccgcagagtgagttggaagatggggaggaaaaaatcgtccgcatacgtgccactgcgccaagttcgagctacttctctgagcaacagttagtcgatattccacttaataccgaattcttcaaacacctgcccggtattctgaccggtgttgggattatcggtacgttttacggtctgatgattggcctcaaccacttcgaccccagcactccagagcaggttaccagcagcgtcaataatttgctgcacgatgtattgtacgcattccttggctctgccgtggctattgccgcctcaattttcgtcacatggctggaaaaactgtccatagccaagtgctataagtatctcgaaaaatttaccgccgctatcgacaagctctacgttagcggtgtgggcgaggaatacctcgcctcgctggtgaaatccagtaacgaaagcgctacccaggcacgccatctgaaagagagcctggtcaccgatcttcgcgatatgctgctgcatctcgccgaaagccagaaagttgaaaatgaacgcctcgcgaatacattgagtaatacctatcgcgaatcaggcgcgcagtttgccgaccaggtgagcggagcaatcgaaaatagcctgaagtctccgctggataaaattgcgggtgcggtacagaccgccagcggcgatcaaagcggcatggtacagaacatgctgcaggatgtgctgaccgcatttatggcgaagctcgataccacctttggccagcagtttacgaatctcaacgaaatgatggggcaaaccgtcggggctatccagacgatgcaaagtggattctccgccctgctacaggatatgcgtcaggttagcgacgattcccgtcagggaagtgcacagctgattgaacagcttctctctgaaatgaaatccggacaacaggcgatgcaggctggtatgaatgacatgctgaccagcttacaagcctctgtcgcgaaaattggcgctgagggtgaaggcgccggtgaacggatggcacggcagcttgagaaaatgtttgccgacagcgaagcgcgagaaaaagcgcaggcagaacatatgtccgcctttattgaagccattcagaattcagtgcagcagggacaaagcgcaaccatggaaaaaatagcggcctcagtcgaagcactcggggaacagttgggcagtctgtttggccagatagataagggtcagcaacagatatcagcgaaccagcaggctaaccagcagtctctgcacgaacagacgcagcgtgtgatgagtgaagtagacgatcagatcaaacagttgattgaaaccgttgctagtcagcatcagggaaccaccgaaacgctgaacaaacttgcagaacagaccaaccgacagattcaggatatgcaaaacggcgcggataaaatgcgtgttgccgccgagcgttttgaacacgcaggcgataaggtgtcggaggcgaatcacctcacggctgacgtattgaataaagtgcagtcggcgggctcctcgctctcccttgcaaccagcgaactcagttcagtagtggccgattatcggaacaatcgtgaagccgtcagcaaatccattgccatgctggagctgcttgcagccaacactcagtctgaacagactacccgcagccaatttatcaccgatctcaaacagcacggtgaacgcttgcagagctataaccgtgaagcacagacctttatggaaaatgtcagcgatgtgctcgggaaaggctttgaagacttctcagagggcgtttcgcgcagcctggataaaacgctgggcaaactggacgtcgaaatggcgaaagcctctaatctgcttgcaggctctgtcgaacagatcggtgaaagcgtcagcgagcttgatgatgttctgtctcgcgtgcgtgcctga

SEQ ID NO: 8448 - DNA, 738 bp, Enterobacter cloacae UCI 24; identical to SEQ ID NO: 8440

SEQ ID NO: 8449 - DNA, 1683 bp, Enterobacter cloacae UCI 24
atgacgcccgcattgagttctctagcgcagcgcattgcagctaagctctcttccagccagcaggaggagcattttctgcgcaatgatttccacgcgctggcctctgctggccgcgagatggaaaagcgatttgataaagcagagaaaatcccccccccgccacatgaaatgcggctggcggcactgcgtcgttttcgtcttgcagaagaactgaccgaacgtgagtggcgaatggtgttttatggcctcgccgataccgatccgctctaccctgacaggccagtattactggaggatgatacactcttcccccgcgtcgacagcgctattcaaaaacagattcaatccaggacactgaaacggaaggactgggcggcactttgttcaagttattttgcctacaaacacgaatcgccagaaatcaatccacactggtgtgtactgcgtggtcatatcgcccatggatactcagtagtaaaagccgctatccgcagagaaaaaccgtggatgaaaaccattgagttttatcacgacatttttacgcctcaggctggcggtgtgatatcacaacaactactttccggtgagagcaactccctatcatctttagagaaaatagcgcaaattcccgacagtagctggttgtggaaacgtattttcacggtgctgctggcgcagcttgatactctggatgatcctcaatacctggacaaaatcagctggctattgagcctggccgcgcagtgggtacgttttcgtgatgacattattacggcaacgctgactcgctattaccattcaacctatcgcgatcaagctcattccgccctgaaacaggcagctcttgaatactgggataacccgcagctcaagagtcagcagaataagtggcatcagtatgtttctgaacctgtcgctgcaatggtgcggggctggttagcaaaacaagacctgatgcatttctttgagctactacgcggcaacggcgatgtcgatcaggcacgactccactactggctgcgcttcgcaaaccagatgggatttacccgtatcgtgatgggacccgatgcctggcacgatggtagcagtgactttgtgaaattccgcgaggagaatcgtggaaggctgagccatctgcgtggtgggcgtagtttcgataatgctatgattatgcagataaacgattacattttcgttgagttttccgggacggggaacgcgatgtatgcctaccgagtgggtcaggctccctttaaccctgagtcacattcattagatattaatatccagttgaaagataaatatcgtaatgttcttcgtcttccacataccccaagagcagaagggtacaacaagacccgcatcaccggctggatgcttaaatacgaagatgaattgcgtaagttaggtatccgctggatggctgaagagcccgtcaaatttgtagataaaaaagcgccctctcccgcctcggtatctgacatcaaaatcatcaatccattgcgggatacagcaatacagcgcctggttgaaaacacctcatgcatcgtcagcgataaccgacaaaaaggtggcgtgctctctgtacagctcaaagcacccgacgacacgacggaaagagagttacttcgactgggtttcgcccctgtgctcaaagagccgcatcgctactggatcaaataa

SEQ ID NO: 8450 - DNA, 237 bp, Enterobacter cloacae UCI 24
atgctgaaacgtctgctaagtaaactgacgggaaaccgtcagcagatagaacaccatctgagaaatcagtatcaggttgaggaaaacggactcagttttccgcaatctttagttgatgacccagatctttgggctctggcatcctggcttgagcaactggccgaagaagactatctgatttcactaacagaccgctggttattgagctgggataatttgtatcgcctactggagtga

SEQ ID NO: 8451 - DNA, 2136 bp, Enterobacter cloacae UCI 29; identical to SEQ ID NO: 8447

SEQ ID NO: 8452 - DNA, 738 bp, Enterobacter cloacae UCI 29; identical to SEQ ID NO: 8440

SEQ ID NO: 8453 - DNA, 1683 bp, Enterobacter cloacae UCI 29; identical to SEQ ID NO: 8449

SEQ ID NO: 8454 - DNA, 237 bp, Enterobacter cloacae UCI 29; identical to SEQ ID NO: 8450

SEQ ID NO: 8455 - DNA, 2190 bp, Enterobacter cloacae; identical to SEQ ID NO: 8439

SEQ ID NO: 8456 - DNA, 738 bp, Enterobacter cloacae; identical to SEQ ID NO: 8440

SEQ ID NO: 8457 - DNA, 1515 bp, Enterobacter cloacae
atgcggctggcggcactgcgtcgttttcgtcttgcagaagaactgaccgaacgtgagtggcgaatggtgttttatggcctcgccgataccgatccgctctaccctgacaggccagtattactggaggatgatacactcttcccccgcgtcgacagcgctattcaaaaacagattcaatccaggacactgaaacggaaggactgggcggcactttgttcaagttattttgcctacaaacacgaatcgccagaaatcaatccacactggtgtgtactgcgtggtcatatcgcccatggatactcagtagtaaaagccgctatccgcagagaaaaaccgtggatgaaaaccattgagttttatcacgacatttttacgcctcaggctggcggtgtgatatcacaacaactactttccggtgagagcaactccctatcatctttagagaaaatagcgcaaattcccgacagtagctggttgtggaaacgtattttcacggtgctgctggcgcagcttgatactctggatgatcctcaatacctggacaaaatcagctggctattgagcctggccgcgcagtgggtacgttttcgtgatgacattattacggcaacgctgactcgctattaccattcaacctatcgcgatcaagctcattccgccctgaaacaggcagctcttgaatactgggataacccgcagctcaagagtcagcagaataagtggcatcagtatgtttctgaacctgtcgctgcaatggtgcggggctggttagcaaaacaagacctgatgcatttctttgagctactacgcggcaacggcgatgtcgatcaggcacgactccactactggctgcgcttcgcaaaccagatgggatttacccgtatcatgatgggacccgatgcctggcacgatggtagcagtgactttgtgaaattccgcgaggagaatcgtggaaggctgagccatctgcgtggtgggcgtagtttcgataatgctatgattatgcagataaacgattacattttcgttgagttttccgggacggggaacgcgatgtatgcctaccgagtgggtcaggctccctttaaccctgagtcacattcattagatattaatatccagttgaaagataaatatcgtaatgttcttcgtcttccacataccccaagagcagaagggtacaacaagacccgcatcaccggctggatgcttaaatacgaagatgaattgcgtaagttaggtatccgctggatggctgaagagcccgtcaaatttgtagataaaaaagcgccctctcccgcctcggtatctgacatcaaaatcatcaatccattgcgggatacagcaatacagcgcctggttgaaaacacctcatgcatcgtcagcgataaccgacaaaaaggtggcgtgctctctgtacagctcaaagcacccgacgacacgacggaaagagagttacttcgactgggtttcgcccctgtgctcaaagagccgcatcgctactggatcaaataa

SEQ ID NO: 8458 - DNA, 3243 bp, Enterobacter cloacae
atgctgaaacgtctgctaagtaaactgacgggaaaccgtcagcagatagaacaccatctgagaaatcagtatcaggttgaggaaaacggactcagttttccgcaatctttagttgatgacccagatctttgggctctggcatcctggcttgagcaactggccgaagaagactatctgatttcactaacagaccgctggttattgagctgggataatttgtatcgcctactggaggacgaggaacactccagcagtctgcctctaattggcgttcaagagatattaccattacgtgcaagactgagttcgcgtggggcattaaacgatagtgattttcgtgtctggattgcggaatggactttggttccaacccgtaagtcgattcgtttcaatcgtaccggcgcaatttttaattatgaaaatcaacagcatttgttatcacgggaaaactgggctcttttgcagacaatagagcagcttagtacccagcaaattcagaccccaggcgaaaccactaaccagttggggtgggccgcaattcgcaaatgtgcgaaacaggcctctgcaaaatttgatgactatttagaaaaaacgcacgttatcaaaccaacgtcgttgtcattacgccttcgtaaggctacggttgctgataccgcggttatcgagattgaacctcactttcaagaccagcccgctaactggctcgacagttttgacaagaactcacaggttcacgatagctatcgcatacccggagagaatggcgaactcagccatgtcatcatcccacctgaagtgaaagaagttctgaattcaatacatgcaatcccagggcgtagagtggccggtagtgaagcgctttcctttgttcgcaacccctatactttcctgggtgaagatgccgccagtgttatttcccctgaagaacatgagcaagcactttttgatgcccacattttcttccatcatttcagacttcagccccgtgtaaatgatgagaacaagatagacgatattaaactggtacttgagcctatctctcccataccacaaccggaagtgacatttcttttctccgcaccatgggaactggataaatttgttcagagcttaggtatcagtgttgctgcgcaaatgccagcaggttcctggcagggttacgaactggaactaagtcaattcactgaacagcaatggcatgattgccaatcgctgttgtcgcgctggcaacaggaagttgaaggtaaagaatttaacgatgtccttgatctcggtaaatatggcgatcgcgttatcggcattggtgaatttgaaaaaatatcctcgccatggctgaccaaggcgcaaagtgaaaactggctccctgatggggtcgacttctccgcattttcggttgaagccctggatggctggcaaccagataacctgcaacatttcgatgaactgcaggaaagaatcactcaggcagaagcgactggcgaaacgcatatcatcttcccctggaatgagactgaactgccattggatgcggcgaaaaccttcagtaagaactgggaaaagcagcaaaatatagcacatgatttaaagagtaacgttgttgaaaaagcagcccgggcagtgctcaaaattgaacagaatattgaagaagctgtttacattaaactgcgccgagattcactcctcaatgcgcgtcatgccgagcctgaaattccactgagccttaaagaacacatccggctcaaagaccatcagcgtgaaggcgtggcctggctccaacagcttttccttcgttcgcctcaggaaactacaggttgcctgctcgcggatgatatggggctggggaaaacgctgcagatcctgagctttttggtttggttcattgaaaaattccctgacgagccacccagcctcatcgttgcccctgtctctcttctggataactgggagcgtgaactggacaatttcttctatacatctggcattccagtaatgaaattgtatggcgacaccatcaaagcggtgaagtacccgaaacaggctattcctgctcatctgcagtctcaggggatcaaaaatctgcttaaacccggctggcagggtgacgcgaaaattattctgacaacctacgaaacacttcgcgatcaggaattttcactggggcgccagccctggtccattatggtgtgtgacgaggcacaaaaaataaagaacccggcagcattaattactcatgcagccaatgcgatacaagcacgatttaaagtggcatgcaccggcacgccagttgaaaacacgcttgtagatctctggagcctttttgatttcgctcagccgggtctcttaggagcgctcaatgaatttggcaaatcctacgttcgccctatcgagaacgaagcgggtcgtgatacaggacagcttgaaagtttacgagcgttgattgaaccacaaacattacgccgaactaaagaagaggttgcgcgtgacttgccacaaaaaatcgaagtcgtcagctgtaagcaactgccgctttctgcccctcaaaggcaactgtatctttcttcgatagcgaactggcaacaacagcaggcgcttagtgaaggaatgcagcaagcaggcgcgggtatgttagggttattgcatcgtcttaaactcatttgtgcacacccggcagtcgttaacccagaacctcgctatcgggaagcctcacccaagcttaattggatgttgaaaacattggatgaaattaagcacaccagcaaagacaaagtaatcatctttactgagctgcgcgatcttcagcgcgagatacaacacgctattcaacagcgatttggtttccgtccagtgatcatcaacggcgacaccagcactaaaagtcatagtcagaataaccgccagcgactgattgatgatttccaggcccaacccggctttggcgtgatcattctctccaccgtcgcggttggttttggggttaacgtacagaaagcaaaccacgttattcatttcacccgctgttggaatccggcaaaagaagatcaagcaactgaccgcgcttaccgtatcggccagacaaaggatgtgtatgtgtattatcccacggtaacggactctgaaatcacgacgtttgaagaaacgctagatgaactccttcagcgtcgccgggcattggcgagggatatgttgtgctctgcaccagatttaagcagtgctgattttgagaacattttaaaagggtcttaa

SEQ ID NO: 8459 - DNA, 2556 bp, Enterobacter cloacae
atgttttcgctgacctcgttcctcgacacgttaacctctgttaatccagaaaatgtgccgaaatatgtcgctcttgttgtcgcggttctgttggtgtgcttcattgcccgctatgccattccttcttttgtgatttcagcccgctttaagaagaaagcgaaagaaattcaactgattgcaaaagataaaccggctcagcaactcgaaaagctggatgctttattttccggaaagttttttgcgcatccctggagtgaatttaaagagtcgctgcatcggcagtttgagttagacgatgacagcggtcagaagcggatccacagtattcgttctaccgctcctgcttcagcctggttctctgaacccttgctggtagagattccactctacacggaagcgtttaagcatttgcccggtatcctgactgggattgggataatcgggaccttctcaggactgatgatcggtttgcaccactttgaccccagcacgccagaacaagttagcgccagcgtagctaaccttttgcgtgatgtcctttacgcgtttttaggttccgcctttgccattgctttctccatcctggtcaccatgtttgaaaaatggcggctggcgagatgctataaaaatcttgagtcgttgacagccagcatcgaccagctttttgaaggtggcgtcggtgaagattacctttcgcagctcctatccagcaccaaagaaaacaccacacatgccaaacaactgaaagatggtctggtcagcgatttaagagagatgctgcagaacctggtggacagccaggtacgagaaaatcagaaactggcagagacgttgtcttccacctatcgggaatcaggccagcagattgcggagcaggttagcggcgctattgaaaccagtctgaaaagcccgttggacaaaattgcgggcgtggtgcaaaccgcctccggcgatcagagccatcgagtgcagtcgatgcttgagaacgtccttactgcttttatgaacaaaatggataacacgtttggtcagcagttcaccacgatgcaggagatgatgggccgttccgtggaggcgatccagagcatgcaaagcggtttctctaccctgctgcaggatatgcgtcaggctggggatgattcacgccagggcagcgcccaactgatctctcagttactcagcgaaatgaaaagcggccagcaagagatgcaggcaggtatgaatgacatgctgcgtagcctgcaggagtctgtagctcgcattggcgcagaaggtgaaggcgctggcgaacgcatggcccaacagctggaaaaaatctttgccgacagtgaagcgcgtgaaaaagcgatggcggaacagatgcgtgcctttattgaagccatccagtccagtgttcagcagggacaaaatgaaaccatggagaaaatggctgcctctgtggatacacttggcagccatatggcaaccttgttcgcacagctggaaaatggccagcagcagctcaatcagcagcaaaaccaggcgcaaaatctgttgatgagcaatatgagcaaaggtgttgaagatctgacgcaaaacctggccggtgtattcagtcaacttgagtccggacaaaaacagatgagccagactcaggaagagggacagcgcgctctgcacgaagagactcaacagctcttagcccgtagcgaagctcgtgaacaggcggccgccgaacaacagcaagattttatggctgctctgcaacaaactatgcactccggtcaggatgccctgcgtgagaaaatgaccagcggcatcgatcaattgggtagccaattgggaactctgtttgggcaactggaggaaggtcagaaatcccttagccagcagcagcaatcggctcagagtgctttgcaacaggaggctcagcgaatcatcggtcagcttgagagccaggttcaggcgttaatgcagatgctgcgtgagcagcaatccgcatcaggcgatttactgcaacgggtggcgcaaaacacaacgcgtcacctggaagaaattcagactggagccgataaaatgcgggtggctgccgatcgctttgaaacagctggtaatcgtgtcgccgaagctaatcatctgactgcagaagttctgaatggtacccagcaagcaggcaaaaccctttccagtgccagctctgagctgggcgcattgatcgccgattaccgcaacacccgtgaggtggtggcgaacgccatcagcgcattagaaacgctgatcaatagcagccatgatgagcaaacatcccgcagccggtttgttgaggatctgaagtcgtattccgagcgtctgcaacaatataaccgtgaagcccaggagttcctccacaacgttgctgacgtgatgggcaccagctttgagtccttcacctccggggtggaaagcggcctgaaccgttcgctccaggagatggatacgcaactgacaaaagcggcgggtgccttaagttcttctgttgaaatcatcggtgaaagcgtggatacgctggaaaccgtgctccgtagtcgtcgcgcgtaa

SEQ ID NO: 8460 - DNA, 738 bp, Enterobacter cloacae
atgtttaaccgggcattcaatggcaggcagcgtcgtagtgatgaagcagaaaaaccgttctggatttcctatgccgacctgatgacagccatgatggtgctatttttggtcgtcatggtggcatcgcttagctccgtcacgcagaggatccagcaggcagaagcaggcgaaaagtcccgtgggcatgatatcgcccgactgtgtgaaaaacttgaacttcaggcaaagaacctgaataaaacgatacatgtcgattgccacgataatcgtattagttttggcgaagcagggcgttttgagcataaccgcttttcgctcaccccagaagggcagcaggctctacaggatgtggtgccgctggtcctggatgcggcaaatagcgacgaaggtaagaaatggtttaaacagatcgttattgaggggtttactgacacggacggttcgtatctctacaacttgcatctctctcttcagcgctcggaatgggtgatgtgcagtctgctggatagcagaagtgcgttacagcaaagaattactgcagatcaacaaatacagattcgaaaattatttttggcgggtggcgtgtcgttcaacaatgcgaaagagagtaaagaagccagccgtcgtgtcgagttacgtatgcagttctttggcctgaaagataaaaaacaggacgagagtatggacgtcgtccctggtattagtcaggaaacctgccaactgggtgtagtgcaatga

SEQ ID NO: 8461 - DNA, 1794 bp, Enterobacter cloacae
atgacgtccgcgattgagaagctgaaatcacaccttcttccttaccgagaaaagagtgcggttccggttgtgggtcacccgtttacctatctacagcgtgtcatcagccaactcgaaaagaaggtagatgctcgcgcagtccagatggttccccctaaggagaaacgcagacaggcaatttcccgattgcgttcgggagaaacgccacagccatctgaatggaagatgatcttttttggcctcaatgacgttgcagaagatgatctgtttgatacagcactcattgatgatgcggcaaactttgccaaaatctcggctgaaattcagagcaaaattgcacagaaacgattaacgcgtagggaatggctggcgttatgtaccagctactttgggcatgtcagcgatacgcccgaagaaaatccgcagtggcttcagttacgcatgcagattgtgagcgggtttaaacagttaaaagagagttcgcctcgtctgttgtcatggatgacggtaatcgacacgtatggggatatttttaccgataaggcgggttttcttctcgggcaacagctcgggcgtggggaaataaccgatatctccgtgctggaaaaagtggcacagatcccccagaccagttggctatggcgcaaaattgttaaccatctggtgagcgagatttttcgtcagactgacgatgagtttgaacaaaaaattaatgaactgatcgcgttgagccgtcaactttctcgttttaaagataatatcctggccgctacacttacccgttattaccagtcaatttttaaacaccggactcaccttgaacttaagctgttagccctggagtattggggaaaccctcagttaaccagccgcaataaaggctggcaggttcatgtcgataacgcggtgctgcttatggtacaggggtggttcgctaaagatgatctgaaactgttctttgagttgcttaaaggtaaccgggatgtcgatcaggcgcgtctgttctactggctacgatatgctaatcagatgagttatacgcgaattgtgttgggtgaagatgctcagcgttcgaaagataccgattatgttgagtttcgggcaaaaaatgccggtcggttaagtcgtctacaaggtcccggttctcgcgacaacaatgccatgatcatgaggattgggaattatctttttgtcgagttttcgaaagtaggagccatgtactcttatcatatcgataatgcaccttttaatccggaaacaggtattctcgacattgattatgatcttaaagataagcgtaataaccggcgtaaagtacgtctgcgtttaccgcatttgtctccagtaacgcactattcgcttaaccgtattgaagggtggatgagccgctatgatgaagaacttcgtagactaggcattagctacgttgcggaagattccaatcagccatcagccactatcgatatctcccgttttaatgcagatcaaagcggaggcaggtccgtatcttctccggctaaatcagaagtcaatgaatcaaggtcaaacagagaagagcagatcaaaattattgcagcttctttaaaagccaaaaaagaagaccaaaattttacgactcgagaacagcaaatcagggaagtgattcggtctgtcgattgtaaagtgatggataaacgtggcatgggtggcgcaattcatatccagttcaacgaaccagatcatgaggctgccaaaaaattgttaagcctcggatttaagcctgtgctgggtaaatttacttactggagcaaatag

SEQ ID NO: 8462 - DNA, 3240 bp, Enterobacter cloacae
gtgttcaaaaaattgttaggtaaatttattaatgataataaagcagttcctgcttcacttgtgccgctttatgcaattaaggcggagggcttcgctttcccctttagtcttgccgacactcaggataactggcttatcacttcatgcctggaacaactccatgaagaggattatgtatcacactggtcggattgctggtttatcagttgggatgacttctatcgtattctgaataatgaagattatgccagcagtctggcaattttcagcttccctcaacagcgtaatctgaccgcccatcttgctgcgacagggagcatcagcgatgacacctttcgagttttcattgataaatggacccagcctgacgattatcgccccgttgagatcactatccagggggccagcttttcctcccaggaaggcacttttgtgctcagcgaagagaactggcagcttctggactcactacagcagctcagattacagcagcgacagacgtcgggtgaaacggtaaaccaaaccgggtgggcaaaaatacgtcgacaggcaaaaaaggcaggagcaaaactggatgattacctgtctaaaacgatagttatcaggcccgagtcactgcagttaaagttgcggaaatcactggtggcggatacccgggtactggaaattgagccggtttttgacgagcagcctgcaaagtggctgcagagtttcgatcgcacgcaacaggtacaagatcggtatcgcattttgggtgatgacggtgaattaagccacgtcattctttcacctgaagtcaaagatgtgcttacctctgttcatgccatcaccggtcgccgagttgccggtgatgatgcgctctcgtttgttcgcaacccgtacacctggattggcgaagaagccagccaggttcttgatcccgatgtatatgagcagaatctacaggatgcagggatctacttttatgattttcgtctggagcctcagtttgatgactcaatgcatattgagtctgtctcgctgatcctgagccccaggactgaacagcccgtgccagatgaaacatacgtgtttaaccgaccaattgaattggcagcgttgattactgagctggaacaaaagttagcggcgcatcttcctgctggtgtctggcagggctatgacctcgagctgtccagattcactcagaatgaattgcaagagtatcaggcattgctggaaggctggcagcaacaggctgcgggattgaatttttctcacgtactcgatctcaacaagtacagcgatagggtcatagggataggtgagtttgagaaaatcagttcaccgtatctggtcaaaagtgaaagtgaaaattggcttccagacaatctcgctaaggagatgtgtgaagtcatgttctcgggctgggacctggataatcatcagcattttcaggagctagaaacgcgtctggaagatgcaaaagcctctgatgctccagaagtcgctatgccctggaacgataaccttctaccacgagaagaagcagaggttttccacgaaaagtggaaaaagaaaatcgatgccgaaacaaaagataccgcgaatgctgagccggtaagtcgggctgtcctgctgatcgaacaaaatattgagcaggcactgtatgtcaaacagcggagaacctccttgctggaagcacatttggctgacgccgagcttccgatgattctcaaggactctattcagctacgtgagcatcagtgtaaaggcgttgcctggctccagcagttgtaccttaaatccccaaccgagacggcgggatgtttactggcagacgatatggggctggggaaaacgttacagattttaaccttcctcatttggcatcgtgagcgtttcccggatgctcctccctctctgattgttgctccggtgtcgttactcgacaactgggagcgtgaagtcggtaattttttcctgcgcgagcaggtgtcgattttaaagctttacggcaatgaactcagagagaaaaagtgcgctaaggagagtatccctttggcgttaaagaataaggggattaaaaacctgctgcaaaatgactgggttggagaggctcagatagtattgaccacatacgaaacgttacgcgatcaggaattttctttggctcgccaaccttggtccatcatggtttgcgatgaggcacagaaaattaaaaatccagcagccctaattacccagtctgctaaggcaattcaggcgcaattcaaagttgcgtgtactggaacacctgttgaaaatacgcttgtcgatctatggtgcttgtttgactttgtgcagccaggtcttttgggagcactgaataattttggcaaagatttcctgcggccgatcgagcagcagagtgatgataagatgcttgaatcgctacgaaaattgattgaaccccagactctgcgtcgaacaaaggaagaagtggcgaaagatcttccggaaaaaattgaagataaatcctgtaagcagctcagtatgctgccgttgcaacgggacctctacactcactcggtagtgagctggcagaatcaacaggaaatcagcgaaggtcttgatcaacgtggttcaggtatgctcggactactccaccgcctgaaactgatttgtgcatggccttattccgtgagtgctgatttacgcttacgtaacgatgccccgaaagtgaaatggcttttgaatacattaaataatattcgccagtcatcagatgataaggtcattgtctttactgaactgcgcgatattcaacgtgaattgcagcatctggtctcgcagcattttggattcaagccttttatcattaatggtgataccagcacgaaatccggaagtgaccaaaaccgtcagagcttgattgataactttcagtcatcgccggggtttaacgtcatcatcctgtcaacgatagccgttgggtttggtgtcaatgtacaaaaagcaaatcatgtcatccattttactcgctgttggaaccctgccaaagaagatcaggcaactgaccgggcttaccgcatagggcagcaaaaagatgtctacgtttactatccaactgtgcgtgatagtcagttaatgactttcgaagagaccctggatgaattactgaaccgtcgcagagctctggcaagagatatgctcaaagcttcaaccgatctcactgctgctgattttgaagcggtacttacccgggctaacactaattaa

SEQ ID NO: 8463 - DNA, 2556 bp, Enterobacter cloacae; identical to SEQ ID NO: 8459

SEQ ID NO: 8464 - DNA, 738 bp, Enterobacter cloacae; identical to SEQ ID NO: 8460

SEQ ID NO: 8465 - DNA, 1794 bp, Enterobacter cloacae; identical to SEQ ID NO: 8461

SEQ ID NO: 8466 - DNA, 3240 bp, Enterobacter cloacae; identical to SEQ ID NO: 8462

SEQ ID NO: 8467 - DNA, 738 bp, Enterobacter cloacae subsp. cloacae; identical to SEQ ID NO: 8440

SEQ ID NO: 8468 - DNA, 1683 bp, Enterobacter cloacae subsp. cloacae; identical to SEQ ID NO: 8449

SEQ ID NO: 8469 - DNA, 3106 bp, Enterobacter cloacae subsp. cloacae
atgctgaaacgtctgctaagtaaactgacgggaaaccgtcagcagatagaacaccatctgagaaatcagtatcaggttgaggaaaacggactcagttttccgcaatctttagttgatgacccagatctttgggctctggcatcctggcttgagcaactggccgaagaagactatctgatttcactaacagaccgctggttattgagctgggataatttgtatcgcctactggaggacgaggaacactccagcagtctgcctctaattggcgttccagagatattaccattacgtgcaagactgagttcgcgtggggcattaaacgatagtgattttcgtgtctggattgcggaatggactttggttccaacccgtaagtcgattcgtttcaatcgtaccggcgcaatttttaattatgaaaatcaacagcatttgttatcacgggaaaactgggctcttttgcagacaatagagcagcttagtacccagcaaattcagaccccaggcgaaaccactaaccagttggggtgggccgcaattcgcaaatgtgcgaaacaggcctctgcaaaatttgatgactatttagaaaaaacgcacgttatcaaaccaacgtcgttgtcattacgccttcgtaaggctacggttgctgataccgcggttatcgagattgaacctcactttcaagaccagcccgctaactggctcgacagttttgacaagaactcacaggttcacgatagctatcgcatacccggagagaatggcgaactcagccatgtcatcatcccacctgaagtgaaagaagttctgaattcaatacatgcaatcccagggcgtagagtggccggtagtgaagcgctttcctttgttcgcaacccctatactttcctgggtgaagatgccgccagtgttatttcccctgaagaacatgagcaagcactttttgatgcccacattttcttccatcatttcagacttcagccccgtgtaaatgatgagaacaagatagacgatattaaactggtacttgagcctatctctcccataccacaaccggaagtgacatttcttttctccgcaccatgggaactggataaatttgttcagagcttaggtatcagtgttgctgcgcaaatgccagcaggttcctggcagggttacgaactggaactaagtcaattcactgaacagcaatggcatgattgccaatcgctgttgtcgcgctggcaacaggaagttgaaggtaaagaatttaacgatgtccttgatctcggtaaatatggcgatcgcgttatcggcattggtgaatttgaaaaaatatcctcgccatggctgaccaaggcgcaaagtgaaaactggctccctgatggggtcgacttctccgcattttcggttgaagccctggatggctggcaaccagataacctgcaacatttcgatgaactgcaggaaagaatcactcaggcagaagcgactggcgaaacgcatatcatcttcccctggaatgagactgaactgccattggatgcggcgaaaaccttcagtaagaactgggaaaagcagcaaaatatagcacatgatttaaagagtaacgttgttgaaaaagcagcccgggcagtgctcaaaattgaacagaatattgaagaagctgtttacattaaactgcgccgagattcactcctcaatgcgcgtcatgccgagcctgaaattccactgagccttaaagaacacatccggctcaaagaccatcagcgtgaaggcgtggcctggctccaacagcttttccttcgttcgcctcaggaaactacaggttgcctgctcgcggatgatatggggctggggaaaacgctgcagatcctgagctttttggtttggttcattgaaaaattccctgacgagccacccagcctcatcgttgcccctgtctctcttctggataactgggagcgtgaactggacaatttcttctatacatctggcattccagtaatgaaattgtatggcgacaccatcaaagcggtgaagtacccgaaacaggctattcctgctcatctgcagtctcaggggatcaaaaatctgcttaaacccggctggcagggtgacgcgaaaattattctgacaacctacgaaacacttcgcgatcaggaattttcactggggcgccagccctggtccattatggtgtgtgacgaggcacaaaaaataaagaacccggcagcattaattactcatgcagccaatgcgatacaagcacgatttaaagtggcatgcaccggcacgccagttgaaaacacgcttgtagatctctggagcctttttgatttcgctcagccgggtctcttaggagcgctcaatgaatttggcaaatcctacgttcgccctatcgagaacgaagcgggtcgtgatacaggacagcttgaaagtttacgagcgttgattgaaccacaaacattacgccgaactaaagaagaggttgcgcgtgacttgccacaaaaaatcgaagtcgtcagctgtaagcaactgccgctttctgcccctcaaaggcaactgtatctttcttcgatagcgaactggcaacaacagcaggcgcttagtgaaggaatgcagcaagcaggcgcgggtatgttagggttattgcatcgtcttaaactcatttgtgcacacccggcagtcgttaacccagaacctcgctatcgggaagcctcacccaagcttaattggatgttgaaaacattggatgaaattaagcacaccagcaaagacaaagtaatcatctttactgagctgcgcgatcttcagcgcgagatacaacacgctattcaacagcgatttggtttccgtccagtgatcatcaacggcgacaccagcactaaaagtcatagtcagaataaccgccagcgactgattgatgatttccaggcccaacccggctttggcgtgatcattctctccaccgtcgcggttggttttggggttaacgtacagaaagcaaaccacgttattcatttcacccgctgttggaatccggcaaaagaagatcaagcaactgaccgcgcttaccgtatcggccagacaaaggatgtgtatgtgtattatcccacggtaa

SEQ ID NO: 8470 - DNA, 738 bp, Enterobacter cloacae; identical to SEQ ID NO: 8440

SEQ ID NO: 8471 - DNA, 1683 bp, Enterobacter cloacae; identical to SEQ ID NO: 8449

SEQ ID NO: 8472 - DNA, 3243 bp, Enterobacter cloacae; identical to SEQ ID NO: 8442

SEQ ID NO: 8473 - DNA, 2190 bp, Enterobacter cloacae; identical to SEQ ID NO: 8439

SEQ ID NO: 8474 - DNA, 738 bp, Enterobacter cloacae; identical to SEQ ID NO: 8440

SEQ ID NO: 8475 - DNA, 1683 bp, Enterobacter cloacae
atgacgcccgcattgagttctctagcgcagcgcattgcagctaagctctcttccagccagcaggaggagcattttctgcgcaatgatttccacgcgctggcctctgctggccgcgagatggaaaagcgatttgataaagcagagaaaatcccccccccgccacatgaaatgcggctggcggcactgcgtcgttttcgccttgcagaagaactgaccgaacgtgagtggcgaatggtgttttatggcctcgccgataccgatccgctctaccctgacaggccagtattactggaggatgatacactcttcccccgcgtcgacagcgctattcaaaaacagattcaatccaggacactgaaacggaaggactgggcggcactttgttcaagttattttgcctacaaacacgaatcgccagaaatcaatccacactggtgtgtactgcgtggtcatatcgcccatggatactcagtagtaaaagccgctatccgcagagaaaaaccgtggatgaaaaccattgagttttatcacgacatttttacgcctcaggctggcggtgtgatatcacaacaactactttccggtgagagcaactccctatcatctttagagaaaatagcgcaaattcccgacagtagctggttgtggaaacgtattttcacggtgctgctggcgcagcttgatactctggatgatcctcaatacctggacaaaatcagctggctattgagcctggccgcgcagtgggtacgttttcgtgatgacattattacggcaacgctgactcgctattaccattcaacctatcgcgatcaagctcattccgccctgaaacaggcagctcttgaatactgggataacccgcagctcaagagtcagcagaataagtggcatcagtatgtttctgaacctgtcgctgcaatggtgcggggctggttagcaaaacaagacctgatgcatttctttgagctactacgcggcaacggcgatgtcgatcaggcacgactccactactggctgcgcttcgcaaaccagatgggatttacccgtatcgtgatgggacccgatgcctggcacgatggtagcagtgactttgtgaaattccgcgaggagaatcgtggaaggctgagccatctgcgtggtgggcgtagtttcgataatgctatgattatgcagataaacgattacattttcgttgagttttccgggacggggaacgcgatgtatgcctaccgagtgggtcaggctccctttaaccctgagtcacattcattagatattaatatccagttgaaagataaatatcgtaatgttcttcgtcttccacataccccaagagcagaagggtacaacaagacccgcatcaccggctggatgcttaaatacgaagatgaattgcgtaagttaggtatccgctggatggctgaagagcccgtcaaatttgtagataaaaaagcgccctctcccgcctcggtatctgacatcaaaatcatcaatccattgcgggatacagcaatacagcgcctggttgaaaacacctcatgcatcgtcagcgataaccgacaaaaaggtggcgtgctctctgtacagctcaaagcacccgacgacacgacggaaagagagttacttcgactgggtttcgcccctgtgctcaaagagccgcatcgctactggatcaaataa

SEQ ID NO: 8476 - DNA, 3243 bp, Enterobacter cloacae; identical to SEQ ID NO: 8442

SEQ ID NO: 8477 - DNA, 2037 bp, Pantoea ananatis AJ13355
atggattcgctgctgattcccggcgtgctggtgcgtaatggcattttgtctatcgcttcagttttaaaaaatgatgctgctcctggatttgtaactatccttctggttgccacgctttgctttgccgttgtccgctggcgcaagctagtaaaaagccgccgtaatgctctcagcattattcacagcattatcgcaaacacgcctgaagatcagttcagccagcatgtgactgaaattgacgccagtattgcagcagccgataaaacggaagaacaaaagaatgttgctgaagcctggtatgaatatcgtgaaacccacgtgatcgatgatcagaacggtacacttgtcgtgcgcaatgcggtccgtcccagccaattttttaacctggatgacctgcactttacgcaaggcttctggcgtatcgttccggggctgtttgtgactgtagggctatctctcacctttctgggcctgatttctgcgcttaattcgatgagtaccacactagacgatggtggtagcgcggcattagaaggcttgcttaccattgcctcggcgaagttcatcatgtctttgaccggcctgtgctgctctatcgtctttaccatatggctgcgtcgtggcacgtcacaactggaaaaagcggtacatagtcttaacagtttgattgagaagcatctgacatttatcagcctggaagatctctccattcgccagttgaaagcaaccactgaaagtcgcgagcatttgcgcaagctgggaatggaaatggctactgagattggtcgtccgctgcgcgaagaccttccaagagcgatctcagagtccattagtacggctattatgccggttattgaacaagtcagccggttgggcaacgatggtgtgggagaaatggtacaaaacctttcctctcgcctttctgaggatgtcggtcgggccctggcacaagccagcgaacgtatatccctggcaggagaccagattaaatttctggctgagcgcatggatcaaagctctggaaaaatgggcaatgaaatggaaagcgcaattggccgtttaggtcaggcagttgaaaccttgcgtgatggtatgcagcaaacggcagagacggcttcatcagcatttaatcagggtgccgaaaacctgctggcaaccatgaattcaaccctgcaaggtattaaagacaataccggtgaaggcgcacgtgcgatgggcgaagcggctgcagatatgaaagccgccgccttgggtattcgtttcgaactcgaagttgcagcgaaacagggtgctgaagcagcgcaggcgcgtatgtctgaatcagcgtctaaggccagcgacgcgattggccaggccgcgacacaagtgctgggtgcttttggcaataccgcatgtgaaatcacccaagcaactgaggcgatgacccagaaagccagcagcgaactgctttcccctctttctgttatcgctgaaaaactggaaggcgtgatggccatgctgaacgaaaccagcaccgcaatccaccgcgcttctgaagggattaaagaaggcgctgtcgcctcggaaaacgcttcgggcagtttccgcacatcagcacaatcactgaccagtgcagccgatccgattcgggcgatgatggagcgtattgaagtcagcacgcgccagttacgtgagagcagtgagaatagcctttcggccatcgccaatgccgctaaaaccaatgctgaacaatctgcaatgacgctttcagctgcacaagagacattgggtgggcaacatcgtgcggttgaatccacgctgactaatcttcagtctttgattgcggctttacgcagtcagggcgaacgtctggatggcattgacgagaaacttggcaaggcattcgacagctaccaacagcaagttgctacatcggttgaaacgctcttcgaccatgtcaaaaccatgcagaacgaactcatgccagcactggacacaatgcagagcattgtcgaccaggctgaaaacttcgcaccgaaacaggcgcggatgtcatga

SEQ ID NO: 8478 - DNA, 864 bp, Pantoea ananatis AJ13355
atgagagccaataccggccgtaagcgctcacatgaagaggaagaagagtccgtttttgtctcaatgacagatatgacagtcagctttcttttcattgtcatggtgttgctcgctttttttgccagccgctacaacgataagaacactgtcccacgtgataagtatgaacaggcagtacaaacacgcgataaaaccatcgtggatttgcgcgctgagattgcgttgttaaagcaggttgatccgctggaacagtatatgtcgcaggctgctgctgcccggctcaacttactctatcaattgcgcaataatctgaagcagtcgtttccagaactgccggttgatgtcattcctgaagaaggcacgctgcgctttcagggggagggtttgtttaccagcaatagcttcacgctaagcgacgataagcgaaaaatcgtcgaagcattggcgaagacgctcgattccctactgccctgttataccttcagccaaagtgtcggatggaataaaagctgtaatccttcgtttgccattattgaagcggtacagattgagggtcacaccgattccaaaggcgaagacgtatataacctgaatctttcgactaaccgagccatcaccacgtttaccagcatgcttgccgcagcgccagacctggtcgcacattttaatatgcgcagccaacccgttctttctgtggcgggctacggcaaaatgcgtccggttaagcccaatgataccccgcaaaatatggcaatgaatcgccgtatcgatctccgcatcattatgcatacaccggccaatgcagcggaaattgaagacatccgcaagcgcctgatcgagcccctgaagaagggtaagccatga

SEQ ID NO: 8479 - DNA, 1326 bp, Pantoea ananatis AJ13355
atgaaattaagcgacttttttctaaagccggtaaaccttttcaagccagcaatagctgtatcaaaaggcttaacggtaaaggtgcagtccattcatgagcgctggcccgatgtcgttaaagagattgccgagcgcgatcgtgaaaaagtgttacgcaagctgcgtggatatgtagagcgctgggaatgggatgatgtaaaaatgtcttttatctgttcaggcgctccgattgtgtttgataaggagttcagaactcaggaagaatttgctgtactacaagaattttatctgcgggaaaccattgttacggattcagctccctttatttctgcaatgatatcggcctatatccgtagttatgaaccgggctctgcacacacaaacaaaattaaaaactgccttgatatcgctagcgaacatatgagcgataagtggaaagatattgtcgagcaactacccaagttctttgacgctaaccaggcacatcaagctttagcaaacagaatgatggcgatggattcgccatggaaagagcttaaactgtttggcattacacgcccgcacgatccgggattaatgtcgcacgctcatctggcctatgtagcattaatggcacctggattgaatgaaagacccgctattgagaagctgtttgcctggttaaaacccgatggcagaagtggcgctttgatgaatggcgcagcggaagccatcaatgcgctgttatcacactggttgtataaacaacccgacgaagaactttctcgttatctgactgaaacgctggtggccttttatgaagatccgcgcctgagccgcggtggcgtatggggcagcgtagatgaagcttgtcgaaatctgattataaactggcttacacgcgagaatattctgttttttctggacgtggtttctgatgtcgaagacagccatatgtgggaacctcgacgtaaattttggcttaatttataccatcagaaaaaaattgattccgcatgggtagcttttagtgatgaggcagatattcgggccagatcaataaaaaaaaccatgcgggaaagtgcgaccttaaaatttggccgacaagttgctggcagccgcaaaaacacctcgttacttattcttaaaattgggcattgcattgtggtagaaggttctcacaattacaaagtacatatctttagaagtgataataaaaaagcgcctgaactattcaggttaaaatatgactgtgaacatatccgcactctaccaaattcttttgcaattccacacttgagtggttggcaggaaaaagtgcgtgaacacattgagtatctgtcatga

SEQ ID NO: 8480 - DNA, 3129 bp, Pantoea ananatis AJ13355
atgacatttgctttcaatcataatgcagaagcgattaccctcaatattgctggagaaaaacagagcttgattaatcgcctgtttaaaagacagcagtccgtaactttgtctggcctgacacataacgatcgcgccttggctttcgctatcgccgatctgaaagcgctggcagaagaatttggagagcttttacacatcagtgatgacgctatcgtaatgagtcatcatctggcaggccgacttgacgccgaaacggcgcagacgctgggcctaccccctctcgtcgatctgacgttgaaaaccgatatcgaaggctcacttgggagcgatacctttcgcctgcagcatgaatggctacgcaacggtgttcgccagctaccacaccggaccggctcaattttaaccacatctcaagggccacgccggttgccattgtggatgatggaggctgttgaagttgccgaaaactttacgccaggcggcggcgaggcatcggactgggaatcgctggctcgcttccgtcaggcccttgatcctggcgtccagatgagccatgaaatcaatgccgtccgtgtctcgctgaccgactttatgcaaggtttagaagtccgcattgccgatcgtttttctatttccaccagctcaaatggggctgatgatttcgaaatcgtccctttttctggtaagaacgtggaagaactggaaagaagcggagaagcggttagcgaggctgcaggtgagctaagtgaacaaacgttacgtcggttccaacaacgtgtccgaactcaaggagcgctttccgcttaccgtgttggcgaaggcaattatctggtcattgaccgcagcgctcgccccattcttgatgtgatggtggaaaagcaaaagtcttcacctgaagaacgacgcgcttttattgaaaacccacgacctgcaattactagtgctgttgaaaaatacttaagacaatcgggcaagctggatggtctcgacgatgtgggtgaagaagaagctattgaagctgcagcaggtcctgcatttgttgaaaccgttgaatattccgaacgtgttaagggaattctgcattaccgaaaaggtaccgtttcttcgacaatgaccggagaaacaatctggttgcctgagatgatccccgatgccctgaccaaaattatcgatgcaatggatagccagacactggcaaacgtctgcgatcagatacgtaatgccatagatgcatctcaggatgaagttgaggtcgcgtctcatcccgttagagtgacagaagagacattgcgcgcatttgagaagcgtttggctaatcttatagagatcgaaggttcagcagaaacaacagaacgcgaagataaggtggctgttgatgctcaacctcccgctacggtaatactagacactaaagacaactttgaagagctgttatggcaacctgaccttaaaaaacgtttcgttttcatagatgagcaacttcccgcgggcgttaaaacggcattgaggccgcatcagctggacagctttagtttacagctttcatcatggaaatcaggcatgcctggcattttgaacgcggatgagcaggggttaggtaagacacttcagacaattgcctttctacgctggttaaaagagaacaataacgtcagtactgtcagcaataaagagcgcggaccaatacttattgttgcaccgacctcgttgctggaaaactggaatgctgaggtcaggcagcatactgatagtgatggccttggccatttgctgcgcctctatggttcatctttaagccagtataaagatttcaatgctaaaggtatcgagacaaaagatggtaatactttactgaattttcagcagttgcatgaggcaatcaaagaaggtaaaggtcatcgtttctggatattaacgacatatacaacgttgactaattaccaacactcttttgcgaaaatccatttctcagctgtgatattcgatgaaatacaagccgtcaaaaatcctgactcgcttcgagctcgcgccgcacgcgccgtcaatgctgattatcgaattggactgacaggcacgccaatagaaaacaccacgactgacctatgggcagtaatggaccagttggccccaggttctttggatacgttgcgtaatttcaatacgctgtatagcgaacctgatgagcaaaatatgcttcagctataccagagagtatttgaatattgcaatcagctaccacctttagcattccgccgtttaaaagaagatgtggcaaaagagcttcctgcaaaaacacgcttaattcatccacgcctgatgccggaaggacaagctattgcttacgaaacagcccggttaaaactttctcagggcggtcccggcgctgcacttaaaatgttgcagcatatccgcggcgtttcagtacatccagctatggaaatgagcggcgacaatcagagttttatcgatgcctctgcgcgtctgaatgcatgttttgatattttgcatcgtattaaagcaaaaggtgagcgtgttttggttttcattgaacaccggaaaatgcagttccggtttatggaactggctcgccaggaattcgggcttgaacatattgaccatattaacggcgacacgcccattcagaagcgccaggctatcgtgcgtcgattccagcaccatcttgagcaagatggtggctttgacttgctggtgctcggccctaaagcagccggaacgggtttaacattgactgccgcaacacatgtcattcacctgtctcgctggtggaaccctgcagttgaagagcaatgtaatgatcgtgtacatcgtatcggccagcagcacccagtccaaatccatatgccaatggccatacatgctggctaccaggaacactctttcgactgtttactccaggggcttatgtcacgcaaacgaagtttagcgcgagcggccctctggccaatgggtgacagtgctagtgacatctcacagctacaggcagctttaagaaaagacaagtctgaggcgagtggagatattttagaaacgagcatccgaatgatgtttgaaagagatgttgaaactgatggtacacgaatggatgacggttcatatcgaatcagttag

SEQ ID NO: 8481 - DNA, 2037 bp, Pantoea ananatis LMG 5342
atggattcgctgctgattcccggcgtgctggtgcgtaatggcattttgtctatcgcttcagttttaaaaaatgatgctgctcctggatttgtaactatccttctggttgccacgctttgctttgccgttgtccgctggcgcaagctagtaaaaagccgccgtaatgctctcagcattattcacagcattatcgcaaacacgcctgaagatcagttcagccagcatgtgactgaaattgacgccagtattgcagcagccgataaaacggaagaacaaaagaatgttgctgaagcctggtatgaatatcgtgaaacccacgtgatcgatgatcagaacggtacacttgtcgtgcgcaatgcggtccgtcccagccaattttttaacctggatgacctgcactttacgcaaggcttctggcgtatcgttccggggctgtttgtgactgtagggctatctctcacctttctgggcctgatttctgcgcttaattcgatgagtaccacactagacgatggtggtagcgcggcattagaaggcttgcttaccattgcctcggcgaagttcatcatgtctttgaccggcctgtgctgctctatcgtctttaccatatggctgcgtcgtggcacgtcacaactggaaaaagcggtacatagtcttaacagtttgattgagaagcatctgacatttatcagcctggaagatctctccattcgccagttgaaagcaaccactgaaagtcgcgagcatttgcgcaagctgggaatggaaatggctactgagattggtcgtccgctgcgcgaagaccttccaagagcgatctcagagtccattagtacggctattatgccggttattgaacaagtcagccggttgggcaacgatggtgtgggagaaatggtacaaaacctttcctctcgcctttctgaggatgtcggtcgggccctggcacaagccagcgaacgtatatccctggcaggagaccagattaaatttctggctgagcgcatggatcaaagctctggaaaaatgggcaatgaaatggaaagcgcaattggccgtttaggtcaggcagttgaaaccttgcgtgatggtatgcagcaaacggcagagacggcttcatcagcatttaatcagggtgccgaaaacctgctggcaaccatgaattcaaccctgcaaggtattaaagacaataccggtgaaggcgcacgtgcgatgggcgaagcggctgcagatatgaaagccgccgccttgggtattcgtttcgaactcgaagttgcagcgaaacagggtgctgaagcagcgcaggcgcgtatgtctgaatcagcgtctaaggccagcgacgcgattggccaggccgcgacacaagtgctgggtgcttttggcaataccgcatgtgaaatcacccaagcaactgaggcgatgacccagaaagccagcagcgaactgctttcccctctttctgttatcgctgaaaaactggaaggcgtgatggccatgctgaacgaaaccagcaccgcaatccaccgcgcttctgaagggattaaagaaggcgctgtcgcctcggaaaacgcttcgggcagtttccgcacatcagcacaatcactgaccagtgcagccgatccgattcgggcgatgatggagcgcattgaagtcagcacgcgccagttacgtgagagcagtgagaatagcctttcggccatcgccaatgccgctaaaaccaatgctgaacaatctgcaatgacgctttcagctgcacaagagacattgggtgggcaacatcgtgcggttgaatccacgctgactaatcttcagtctttgattgcggctttacgcagtcagggcgaacgtctggatggcattgacgagaaacttggcaaggcattcgacagctaccaacagcaagttgctacatcggttgaaacgctcttcgaccatgtcaaaaccatgcagaacgaactcatgccagcactggacacaatgcagagcattgtcgaccaggctgaaaacttcgcaccgaaacaggcgcggatgtcatga

SEQ ID NO: 8482 - DNA, 864 bp, Pantoea ananatis LMG 5342; identical to SEQ ID NO: 8478

SEQ ID NO: 8483 - DNA, 1071 bp, Pantoea ananatis LMG 5342
atgaaattaagcgacttttttctaaagccggtaaaccttttcaagccagcaatagctgtatcaaaaggcttaacggtaaaggtgcagtccattcatgagcgctggcccgatgtcgttaaagagattgccgagcgcgatcgtgaaaaagtgttacgcaagctgcgtggatatgtagagcgctgggaatgggatgatgtaaaaatgtcttttatctgttcaggcgctccgattgtgtttgataaggagttcagaactcaggaagaatttgctgtactacaagaattttatctgcgggaaaccattgttacggattcagctccctttatttctgcaatgatatcggcctatatccgtagttatgaaccgggctctgcacacacaaacaaaattaaaaactgccttgatatcgctagcgaacatatgagcgataagtggaaagatattgtcgagcaactacccaagttctttgacgctaaccaggcacatcaagctttagcaaacagaatgatggcgatggattcgccatggaaagagcttaaactgtttggcattacacgcccgcacgatccgggattaatgtcgcacgctcatctggcctatgtagcattaatggcacctggattgaatgaaagacccgctattgagaagctgtttgcctggttaaaacccgatggcagaagtggcgctttgatgaatggcgcagcggaagccatcaatgcgctgttatcacactggttgtataaacaacccgacgaagaactttctcgttatctgactgaaacgctggtggccttttatgaagatccgcgcctgagccgcggtggcgtatggggcagcgtagatgaagcttgtcgaaatctgattataaactggcttacacgcgagaatattctgttttttctggacgtggtttctgatgtcgaagacagccatatgtgggaacctcgacgtaaattttggcttaatttataccatcagaaaaaaattgattccgcatgggtagcttttagtgatgaggcagatattcgggccagatcaataaaaaaaccatgcgggaaagtgcgaccttaa

SEQ ID NO: 8484 - DNA, 3129 bp, Pantoea ananatis LMG 5342
atgacatttgctttcaatcataatgcagaagcgattaccctcaatattgctggagaaaaacagagcttgattaatcgcctgtttaaaagacagcagtccgtaactttgtctggcctgacacataacgatcgcgccttggctttcgctatcgccgatctgaaagcgctggcagaagaatttggagagcttttacacatcagtgatgacgctatcgtaatgagtcatcatctggcaggccgacttgacgccgaaacggcgcagacgctgggcctaccccctctcgtcgatctgacgttgaaaaccgatatcgaaggctcacttgggagcgatacctttcgcctgcagcatgaatggctacgcaacggtgttcgccagctaccacaccggaccggctcaattttaaccacatctcaagggccacgccggttgccattgtggatgatggaggctgttgaagttgccgaaaactttacgccaggcggcggcgaggcatcggactgggaatcgctggctcgcttccgtcaggcccttgatcctggcgtccagatgagccatgaaatcaatgccgtccgtgtctcgctgaccgactttatgcaaggtttagaagtccgcattgccgatcgtttttctatttccaccagctcaaatggggctgatgatttcgaaatcgtccctttttctggtaagaacgtggaagaactggaaagaagcggagaagcggttagcgaggctgcaggtgagctaagtgaacaaacgttacgtcggttccaacaacgtgtccgaactcaaggagcgctttccgcttaccgtgttggcgaaggcaattatctggtcattgaccgcagcgctcgccccattcttgatgtgatggtggaaaagcaaaagtcttcacctgaagaacgacgcgcttttattgaaaacccacgacctgcaattactagtgctgttgaaaaatacttaagacaatcgggcaagctggatggtctcgacgatgtgggtgaagaagaagctattgaagctgcagcaggtcctgcatttgttgaaaccgttgaatattccgaacgtgttaagggaattctgcattaccgaaaaggtaccgtttcttcgacaatgaccggagaaacaatctggttgcctgagatgatccccgatgccctgaccaaaattatcgatgcaatggatagccagacactggcaaacgtctgcgatcagatacgtaatgccatagatgcatctcaggatgaagttgaggtcgcgtctcatcccgttagagtgacagaagagacattgcgcgcatttgagaagcgtttggctaatcttatagagatcgaaggttcagcagaaacaacagaacgcgaagataaggtggctgttgatgctcaacctcccgctacggtaatactagacactaaagacaactttgaagagctgttatggcaacctgaccttaaaaaacgtttcgttttcatagatgagcaacttcccgcgggcgttaaaacggcattgaggccgcatcagctggacagctttagtttacagctttcatcatggaaatcaggcatgcctggcattttgaacgcggatgagcaggggttaggtaagacacttcagacaattgcctttctacgctggttaaaagagaacaataacgtcagtactgtcagcaataaagagcgcggaccaatacttattgttgcaccgacctcgttgctggaaaactggaatgctgaggtcaggcagcatactgatagtgatggccttggccatttgctgcgcctctatggttcatctttaagccagtataaagatttcaatgctaaaggtatcgagacaaaagatggtaatactttactgaattttcagcagttgcatgaggcaattaaagaaggtaaaggtcatcgtttctggatattaacgacatatacaacgttgactaattaccaacactcttttgcgaaaatccatttctcagctgtgatattcgatgaaatacaagccgtcaaaaatcctgactcgcttcgagctcgcgccgcacgcgccgtcaatgctgattatcgaattggactgacaggcacgccaatagaaaacaccacgactgacctatgggcagtaatggaccagttggccccaggttctttggatacgttgcgtaatttcaatacgctgtatagcgaacctgatgagcaaaatatgcttcagctataccagagagtatttgaatattgcaatcagctaccacctttagcattccgccgtttaaaagaagatgtggcaaaagagcttcctgcaaaaacacgcttaattcatccacgcctgatgccggaaggacaagctattgcttacgaaacagcccggttaaaactttctcagggcggtcccggcgctgcacttaaaatgttgcagcatatccgcggcgtttcagtacatccagctatggaaatgagcggcgacaatcagagttttatcgatgcctctgcgcgtctgaatgcatgttttgatattttgcatcgtattaaagcaaaaggtgagcgtgttttggttttcattgaacaccggaaaatgcagttccggtttatggaactggctcgccaggaattcgggcttgaacatattgaccatattaacggcgacacgcccattcagaagcgccaggctatcgtgcgtcgattccagcaccatcttgagcaagatggtggctttgacttgctggtgctcggccctaaagcagccggaacgggtttaacattgactgccgcaacacatgtcattcacctgtctcgctggtggaaccctgcagttgaagagcaatgtaatgatcgtgtacatcgtatcggccagcagcacccagtccaaatccatatgccaatggccatacatgctggctaccaggaacactctttcgactgtttactccaggggcttatgtcacgcaaacgaagtttagcgcgagcggccctctggccaatgggtgacagtgctagtgacatctcacagctacaggcagctttaagaaaagacaggtctgaggcgagtggagatattttagaaacgagcatccgaatgatgtttgaaagagatgttgaaactgatggtacacgaatggatgacggttcatatcgaatcagttag

SEQ ID NO: 8485 - DNA, 2190 bp, Pectobacterium carotovorum subsp. carotovorum PCC21
atgccctggcttaattccattttattggcgcttacgtctgtgcaaccctatatggtgccagcaaccgttattggcctcgtcagtgttgcatttctctgttttattttcttttatctctacaggtcggttaaaattgttaaccaactgaaaaaatatacacagtcaattaataatattgaaaatgatgagccagataatcaactagagcatctgaagaatttgtttgttcaaccagagctaaagcatgcctggaatgaatttgcagactccttgcatccgcagcgcgaactggttggcagtgaagagaaaattgtgaaaattcgcgccaccgcaccgagcgccaactttttctcagaacagcaactggtagatattccacttaatactgaattctttaagcatctccccggcatactgactggggtggggattatcggcacgttctatgggttgatgattggcctgaatcattttgaccccagcacaccggagcaagtggccagcagcgtcaataatctgctgcacgatgtgctttacgctttccttggctctgcagttgctatatttgcgtccatcgttgtcacatggctggagaaattctctctggcgaaatgctataaatatctggaaaaatttaccgcttccatcgacaagctttatatcagcggggtgggagaggaatatctcgcctcacttgtgaagtccagcaacgaaagcgccactcaggcgcgccagctgaaagagagcctggtcaccgatcttcgtgacatgctgctccatctcgccgaaagccagaaagttgaaaatgaacggctcgcgaatacattaagcaacacctaccgcgaatcaagcgcacagtttgccgaccaagtgagtggcgcaatcgaaaatagcctgaagtcaccgctggataaaattgcgggtgcagttcagaccgccagcggcgatcaaagcggcatggtacagaacatgctgcaggatgtactgactgcatttatggcgaagctcgacactacctttggtcagcagtttacgaatctcaacgaaatgatggggcaaaccgtcggtgcgattcagacgatgcaaagcggcttctccgccctgctacaggacatgcgtcaggtcagcgacgattcccgtcagggcagcgcgcagttaattgaacaactgctctctgaaatgaaatcgggccaacaggccatgcaggcgggcatgaatgacatgctcaccagcttacagtcctctgtcgccaaaattggcgctgaaggcgaaggtgctggtgaacgtatggcacgccaactggagaaaatgttcgccgacagcgaagcgcgagaaaaagcccaggcagaacatatgtccgcctttattgaagccattcagaattccgtgcagcaggggcaaagtgccacaatggaaaaaatggcggcttctgtcgaagcactcggggagcagttgagcagtctgtttgggcagatagataagggtcagcaacagatatcagcgaaccagcaggctaaccagcagtccctgcacgaacagacgcagcgggtgatgagtgaagtagacgatcagattaaacagctgattgaaaccgttgccagccaacatcaagggacgacggaaacactgaataaactcgcagaacaaaccaaccgacagattcaggatatgcaaaacggcgcggacaagatgcgtgttgcggccgagcgctttgagcatgcaggagaaaaggtgtcggaagccaatcacctcacggctgacgtactgaataaagcacaatcggcaggttcatcgctcgcccttgccaccagcgaactcacttccgttgtcgcggattatcgtaacaatcgggaagccgtcagcaaatccattgccatgctggagttgcttgcagccaatactcagtctgaacagactacccgcagccaattcattaccgacctcaagcagcatggtgagcgcttgcagagctataaccgtgaagcgcagacctttatggagaatgtcagtgacgtgctcggaaaaggttttgaagacttctcagaaggtgtttcgcgcagcctggataaaacgctgggcaaactggacgttgagatggccaaagcctctaatctgcttgcaggttctgtcgaacagctcggagaaagcgtcagtgagcttgacgatgttctgtcacgcgttcgtgcctga

SEQ ID NO: 8486 - DNA, 741 bp, Pectobacterium carotovorum subsp. carotovorum PCC21
atgtttggaaatgcatttggtgttagaaaacgccgctgtgatgaagcagagaaacccttctggatctcctatgccgatctgatgaccgccatgatggtgctatttctggtggtgatggtcgcgtcgctaagctccgttacacaacgtattcaacgcgcggagcaaggggaaaaagtcagagggcaggatatcaccagattatgtgagcgcctggagctgcatgcacgtaatgtgaacaaaaccatcgtggtggattgccacgataaccgcatcagctttggtgaggcaggtcgtttcgaccacaatcgttttttcctgaacgccgaagggcaaaaagcattacaggatgtcgttccacttgtactggaggcatctgacagcgatgaaggcaaaaagtggtttaaacaaatcgtcattgaaggatttaccgacaccgatggttcgtacctttacaacctacatctctcccttcagcgctctgaatgggtcatgtgcagtttgctggatagtcgtagtcctctgcaaaaaagtatttctgcagaacagcagctccaaattcgtaagcttttccttgctggtggtgtctcgtttaataatgcgaaagagagcaaagaagccagccgccgcgtcgagttgcgcatgcagtttttcgggcttaaggataaacgtggtggggccgaagaagtggatttccctccggtcgtgaataaagaagtttgccagttggtaatgccgcaatga

SEQ ID NO: 8487 - DNA, 1683 bp, Pectobacterium carotovorum subsp. carotovorum PCC21
atgacacccgcactgaattctctatcgcagcgtattgcagcgaagatgtcttcctgccagcaggatgataattatctacgcaatgattttcacgcgttggcctctgcagccctcgatatagaaaaacgttttgataaagcagagaagatacccacaccgccgcatgaaatgcgactggcagccctgcgtcgttttcgccttgcggaagaactgactgaacgtgagtggcggatggtgttttatggccttgccgataatgaccctctatcccccgaccagccggtattgctggaggatgagcattttttcccgaaggtaaacagcgctatcaaaagacggctcgaaaccaaaacgttgaaacgccgggactgggcagcactctgttcaagctattttgcctacaggcacgaatatccggagaacaacccacactggtgtgtgctgcgtgggcatatcgcccagggttacttcgtagtgaaaaccgcaattcgcagagaaaagtcatggatgaaaactattgagttttaccacgacatttttacgccccaggctggcggagtgatatcccatcagctactttccggcgagagcaactctttatcatcattagaaaaaatagcgcaaatccccgacagcagctggttgtggaaacgtattttcaccgtattgctggcgcagcttgatactctggatgatcctcattatctggacaaaatcagttggctattaggcctggcggcgcagtggatacgttttcgcgatgacatcataacggcgacgctgacccgctattaccattctacttatcgtgatcaagcacattccgctctgaaacaggccgccctggaatactgggataacccgcaactgaaaagccaacagaacaaatggcatcagtatgtttctgaacccgtcgcagcaatggtacggggctggctggcaaagcaagatctgatgcacttctttgagctattacgcgggaatgacgatgttgatcaggcacgattgcactactggctacgcttcgcgaaccagatgggatttacccgtattgttatggggcccgatgcctggcaagatcgtggcagcgattttatgagattccgcgaggagaatcgtggacgactgagtcatctgcgcggtggacgtagtttcgataacgccatgatcatgcagattaacgattacattttcgttgagttttcagggacggggaacgcgatgtatgcctaccgagtgggtcaggctccatttaacccagagtcacactcattggatattaatatccaattaaaagacaaataccgtaatgttcttcgtcttccacatactccacgagccgaaggctacaccaaagcccgactcactggctggatgctgaaatatgatgatgaactgcgcaaactgggtatccgctggatggctgaagagcccatcaaatttgttgataaaaaagccccctcacccgcctcggtatctgatatcaaaatcatcaatccattgcgggatacggcaatacagcgcttggttgaaaacacctcatgcatagtcagcgataaccgacaaaaaggtggtgtgctctccgttcagctcaaatctccggatgacacaacggaaagagagttgctacgactgggtttcgcccctgtgactaaagaacctcatcgctactggatcaaataa

SEQ ID NO: 8488 - DNA, 3243 bp, Pectobacterium carotovorum subsp. carotovorum PCC21
atgctgaaacgtttgttaaacaaactgacgggaaaccgtcagcagatagaacgccacctgaagaatcagtaccaaattgaggaaaacggactcaattttcagcaatcgctggttgatgacctggaactttgggctctggcatcctggcttgaacaactggctgaagaagactatctgatatcactaacagaccgctggttgttgagttgggatgcattgtatcgtctattggaagacgaggaacatgccagcagcctgcctttgattggcgtgcctgagattttgcccctacgtgcaagtttgagttcgcgaggagctctaagcgatagcgatttccgcgtctggattgctgaatgggctacacttcccgcgcgtcaacctatccgctttagccgtaccggagctatttttactcatgaaaatcagcagcatctgttgtcacgagaaaactgggcactcttgcaggcaaccgagcagctcagcatgcagcaaactcaggctcccggcgaaaccaccaatcaactgggatgggctgtaattcgcaaatgtgcgaaacaggccgccgcaaaatttgatgattatttagaaaaaacgcatgtcatcaaaccaacttcattgtcgttacgcctgcgtaaggcgacagttgctgatactgccgttatcgaaattgagccccacttcgaggaccagccagctaactggctcggtagttttgacaaaaacttgcaggttcatgatagctaccgtatacccggagagaatggcgaactcagccatgtcatcatccctcccgaagtgaaagaagtcctgaattcaatacactcaatcccaggccgtcgggtggccggtagtgaagcgctttcctttgttcgcaacccctataccttcctgggtgaagatgccgccagtgttattgcccccgaagaacatgaacaggcactgtttgatgcccatattttcttccatcacttcaagcttcagcctcgcgtaaatgatgagaacaaaatagaggatattgcgttggttctggagccaatctcaccggtaccacaaccggaagtgtcattcctcttctctgccccatgggagttggataaatttgttcaggctctgggtatcagcgttgccgcacaaatgccagcaggttcctggcagggttacgaactggaattgagccaattcaccgaactgcagtggcatgattgccagtcactgctgacgcgctggcaacaggaagtcgaaggtaaagagttcaccgatgttctggatatcaacaaatatggcgatcgcgttattggtatcggtgaatttgaaaaaatatcatctcgctggctgagcaaagcgcaaagcgaagactggctccctgacgatatcgatttctccgcattttcggtcgaaacgctggatggctggcaacctgataacctgcagcatttcgatgaactgcaggagagaatcacccaggcagaagctattggcgaaacgcatatcatctccccctggaatgatactgaattgccgctggatgcagctaaaacgttcagtaggaactgggaaaaacagaaaaatacagcaaatgaatctgagcgcaatgctgttgataaaacagtccgggctgtcctcaaaattgaacagaacattgaagatgtggcctacatcaaacagcgccgcgattcactcctcaatgcacgtcatgctgaacctgaaattcctctgagtctgaaagagcatatccgactcaaagaccatcagcgtgaaggcgtggcctggcttcagcaacttttccttcgttcacctcaggaaacggcaggctgcctgctggcggatgacatgggactagggaaaacgctgcaaattctgagttttctggtctggttcattgaaaaattcccagacgaaccaccaagtctcattgtcgccccggtctctcttttagataactgggaacgtgagctggataatttcttctacaccacaggtattccggtattgaaattgtatggtgagaccattaaagcggtgaaatacccgaaacaagccattccagctcatctacagtctcaagggatcaagaatttactcaaacccggctggcagagtgaggcgaaaattattctgacaacttacgaaacccttcgcgatcaggagttctcactggcgcgtcagcattggtccattatggtgtgcgacgaagctcaaaaaataaaaaatccagcagcattaatcacccatgcagcgaatgccgtacaagccaggttcaaagtagcctgcaccggcacaccggtggaaaatacgcttgtagacctttggagcctatttgatttcgctcagccgggtctattaggggcgctcaatgaatttggcaagcactatgttcgccctatagaaaatgaagcgggtcgtgatacggggcgacttgaaagtttacgagcgttgattgaaccacaaacattacgccgaactaaagaagaggtagcgcgcgatctgccgcaaaaaatcgaagtcaccagctgtaagcaactgtcgttttcaggagttcaaaagcaactgtatctttcctctattgccaactggcaacaacaacaggcgctaagcgaaggaatgcagcagtcgggcgttgggatgttagggttgttacatcgactcaaactcatttgcgcgcatccggcagtggttagcccggggcctcgctatcgggaaggctcgccaaaacttaactggatgctgaaaacgctggatgaaattaaacacagcagtaaagacaaggtgattatcttcactgagctgcgtgatctacagcgcgagatacagcatgcgattcagcagcggtttggcttccgcccggtgataattaatggtgataccagcactaaaagtcagagccagaacagccgtcagcgattgattgatgatttccaggaccaacccggctttggcgtgattattctttccacggtagcggttggttttggggttaacgttcagaaagccaaccacgttattcatttcacccgctgctggaacccggcaaaagaagatcaggcaactgatcgcgcctaccgtatcggtcagacaaaagatgtgtatgtgtattacccgaccgtaagggacggcgatattacgacatttgaggaaactttagatgtgttgctcaaccgcaggcgtgcgcttgcaagagatatgctttgcacttccccggatttaagcggggtagatttcgaaggtgtgttcaaaggagcatga

SEQ ID NO: 8489 - DNA, 2190 bp, Pectobacterium carotovorum subsp. brasiliense
atgccctggcttaattccattttattggcgcttacgtctgtgcaaccctatatggtgccagcaaccgttattggcctcgtcagtgttgcatttctctgttttattttcttttatctctacaggtcggttaaaattgttaaccaactgaaaaaatatacacagtcaattaataatattgaaaatgatgagccagataatcaactagagcatctgaagaatttgtttgttcaaccagagctaaagcatgcctggaatgaatttgcagactccttgcatccgcagcgcgaactggttggcagtgaagagaaaattgtgaaaattcgcgccaccgcaccgagcgccaactttttctcagaacagcaactggtagatattccacttaatactgaattctttaagcatctccccggcatactgactggggtggggattatcggcacgttctatgggttgatgattggcctgaatcattttgaccccagcacaccggagcaagtggccagcagcgtcaataatctgctgcacgatgtgctttacgctttccttggctctgcagttgctatatttgcgtccatcgttgtcacatggctggagaaattctctctggcgaaatgctataaatatctggaaaaatttaccgcttccatcgacaagctttatatcagcggggtgggagaggaatatctcgcctcactggtgaagtccagcaacgaaagcgccactcaggcgcgccagctgaaagagagcctggtcaccgatcttcgtgacatgctgctccatctcgccgaaagccagaaagttgaaaatgaacggctcgcgaatacattaagcaacacctaccgcgaatcaagcgcacagtttgccgaccaggtgagtggcgcaatcgaaaatagcctgaagtcaccgctggataaaattgcgggtgcagttcagaccgccagcggcgatcaaagcggcatggtacagaacatgctgcaggatgtactgactgcatttatggcgaagctcgacactacctttggtcagcagtttacgaatctcaacgaaatgatggggcaaaccgtcggtgcgattcagacgatgcaaagcggcttctccgccctgctacaggacatgcgtcaggtcagcgacgattcccgtcagggcagcgcgcagttaattgaacaactgctctctgaaatgaaatcgggccaacaggccatgcaggcgggcatgaatgacatgctcaccagcttacagtcctctgtcgccaaaattggcgctgaaggcgaaggtgctggtgaacgtatggcacgccaactggagaaaatgttcgccgacagcgaagcgcgagaaaaagcccaggcagaacatatgtccgcctttattgaagccattcagaattccgtgcagcaggggcaaagtgccacaatggaaaaaatggcggcttctgtcgaagcactcggggagcagttgagcagtctgtttgggcagatagataagggtcagcaacagatatcagcgaaccagcaggctaaccagcagtccctgcacgaacagacgcagcgggtgatgagtgaagtagacgatcagattaaacagctgattgaaaccgttgccagccaacatcaagggacgacggaaacactgaataaactcgcagaacaaaccaaccgacagattcaggatatgcaaaacggcgcggacaagatgcgtgttgcggccgagcgctttgagcatgcaggagaaaaggtgtcggaagccaatcacctcacggctgacgtactgaataaagcacaatcggcaggttcatcgctcgcccttgccaccagcgaactcacttccgttgtcgcggattatcgtaacaatcgggaagccgtcagcaaatccattgccatgctggagttgcttgcagccaatactcagtctgaacagactacccgcagccaattcattaccgacctcaagcagcatggtgagcgcttgcagagctataaccgtgaagcgcagacctttatggagaatgtcagtgacgtgctcggaaaaggttttgaagacttctcagaaggtgtttcgcgcagcctggataaaacgctgggcaaactggacgttgagatggccaaagcctctaatctgcttgcaggttctgtcgaacagatcggagaaagcgtcagtgagcttgacgatgttctgtcacgcgttcgtgcctga

SEQ ID NO: 8490 - DNA, 741 bp, Pectobacterium carotovorum subsp. brasiliense
atgtttggaaatgcatttggtgttagaaaacgccgcggtgatgaagcagagaaacccttctggatctcctatgccgatctgatgaccgccatgatggtgctatttctggtggtgatggtcgcgtcgctaagctccgttacacaacgtattcaacgcgcggagcaaggggaaaaagtcagagggcaggatatcaccagattatgtgagcgcctggagctgcatgcacgtaatgtgaacaaaaccatcgtggtggattgccacgataaccgcatcagctttggtgaggcaggtcgtttcgaccacaatcgttttttcctgaacgccgaagggcaaaaagcattacaggatgtcgttccacttgtactggaggcatctgacagtgatgaaggcaaaaagtggtttaaacaaatcgtcattgaaggatttaccgacaccgatggttcgtacctttacaacctacatctctcccttcagcgctctgaatgggtcatgtgcagtttgctggatagtcgtagtcctctgcaaaaaagtatttctgcagaacagcagatccaaattcgtaagcttttccttgctggtggtgtctcgtttaataatgcgaaagagagcaaagaagccagccgccgcgtcgagttgcgcatgcagtttttcgggcttaaggataaacgtggtggggccgaagaagtggatttccctccggtcgtgaataaagaagtttgccagttggtaatgccgcaatga

SEQ ID NO: 8491 - DNA, 1683 bp, Pectobacterium carotovorum subsp. brasiliense
atgacacccgcactgaattctctatcgcagcgtattgcagcgaagatgtcttcctgccagcaggatgataattatctacgcaatgattttcacgcgttggcctctgcagccctcgatatagaaaaacgttttgataaagcagagaaggtacccacaccgccgcatgaaatgcgactggcagccctgcgtcgttttcgccttgcggaagaactgactgaacgtgagtggcggatggtgttttatggccttgccgataatgaccctctatcccccgaccagccggtattgctggaggatgagcattttttcccgaaggtaaacagcgctatcaaaagacggctcgaaaccaaaacgttgaaacgccgggactgggcagcactctgttcaagctattttgcctacaggcacgaatatccggagaacaacccacactggtgtgtgctgcgtgggcatatcgcccagggttacttcgtagtgaaaaccgcaattcgcagagaaaagtcatggatgaaaactattgagttttaccacgacatttttacgccccaggctggcggagtgatatcccatcagctactttccggcgagagcaactctttatcatcattagaaaaaatagcgcaaatccccgacagcagctggttgtggaaacgtattttcaccgtattgctggcgcagcttgatactctggatgatcctcattatctggacaaaatcagttggctattaggcctggcggcgcagtggatacgttttcgcgatgacatcataacggcgacgctgacccgctattaccattctacttatcgtgatcaagcacattccgctctgaaacaggccgccctggaatactgggataacccgcaactgaaaagccaacagaacaaatggcatcagtatgtttctgaacccgtcgcagcaatggtacggggctggctggcaaagcaagatctgatgcacttctttgagctattacgcgggaatgacgatgttgatcaggcacgattgcactactggctacgcttcgcgaaccagatgggatttacccgtattgttatggggcccgatgcctggcaagatcgtggcagcgattttatgagattccgcgaggagaatcgtggacgactgagtcatctgcgcggtggacgtagtttcgataacgccatgatcatgcagattaacgattacattttcgttgagttttcagggacggggaacgcgatgtatgcctaccgagtgggtcaggctccatttaacccagagtcacactcattggatattaatatccaattaaaagacaaataccgtaatgttcttcgtcttccacatactccacgagccgaaggctacaccaaagcccgactcactggctggatgctgaaatatgatgatgaactgcgcaaactgggtatccgctggatggctgaagagcccatcaaatttgttgataaaaaagccccctcacccgcctcggtatctgatatcaaaatcatcaatccattgcgggatacggcaatacagcgcttggttgaaaacacctcatgcatagtcagcgataaccgacaaaaaggtggtgtgctctccgttcagctcaaatctccggatgacacaacggaaagagagttgctacgactgggtttcgcccctgtgactaaagaacctcatcgctactggatcaaataa

SEQ ID NO: 8492 - DNA, 3243 bp, Pectobacterium carotovorum subsp. brasiliense
atgctgaaacgtttgttaaacaaactgacgggaaaccgtcagcagatagaacgccacctgaagaatcagtaccaaattgaggaaaacggactcaattttcagcaatcgctggttgatgacctggaactttgggctctggcatcctggcttgaacaactggctgaagaagactatctgatatcactaacagaccgctggttgttgagttgggatgcattgtatcgtctattggaagacgaggaacatgccagcagcctgcctttgattggcgtgcctgagattttgcccctacgtgcaagtttgagttcgcgaggagctctaagcgatagtgatttccgcgtctggattgctgaatgggctacacttcccgcgcgtcaacctatccgctttagccgtaccggagctatttttactcatgaaaatcagcagcatctgttgtcacgagaaaactgggcactcttgcaggcaaccgagcagctcagcatgcagcaaactcaggctcccggcgaaaccaccaatcaactgggatgggctgtaattcgcaaatgtgcgaaacaggccgccgcaaaatttgatgattatttagaaaaaacgcatgtcatcaaaccaacttcattgtcgttacgcctgcgtaaggcgacagttgctgatactgccgttatcgaaattgagccccacttcgaggaccagccagctaactggctcggtagttttgacaaaaacttgcaggttcatgatagctaccgtatacccggagagaatggcgaactcagccatgtcatcatccctcccgaagtgaaagaagtcctgaattcaatacactcaatcccaggccgtcgggtggccggtagtgaagcgctttcctttgttcgcaacccctataccttcctgggtgaagatgccgccagtgttattgcccccgaagaacatgaacaggcactgtttgatgcccatattttcttccatcacttcaagcttcagcctcgcgtaaatgatgagaacaaaatagaggatattgcgttggttctggagccaatctcaccggtaccacaaccggaagtgtcattcctcttctctgccccatgggagttggataaatttgttcaggctctgggtatcagcgttgccgcacaaatgccagcaggttcctggcagggttacgaactggaattgagccaattcaccgaactgcagtggcatgattgccagtcactgctgacgcgctggcaacaggaagtcgaaggtaaagagttcaccgatgttctggatatcaacaaatatggcgatcgcgttattggtatcggtgaatttgaaaaaatatcatctcgctggctgagcaaagcgcaaagcgaagactggctccctgacgatatcgatttctccgcattttcggtcgaaacgctggatggctggcaacctgataacctgcagcatttcgatgaactgcaggagagaatcacccaggcagaagctactggcgaaacgcatatcatctccccctggaatgatactgaattgccgctggatgcagctaaaacgttcagtaggaactgggaaaaacagaaaaatacagcaaatgaatctgagggcaatgctgttgataaaacagtccgggctgtcctcaaaattgaacagaacattgaagatgtggcctacatcaaacagcgccgcgattcactcctcaatgcacgtcatgctgaacctgaaattcctctgagtctgaaagagcatatccgactcaaagaccatcagcgtgaaggcgtggcctggcttcagcaacttttccttcgttcacctcaggaaacggcaggctgcctgctggcggatgacatgggactagggaaaacgctgcaaattctgagttttctggtctggttcattgaaaaattcccagacgaaccaccaagtctcattgtcgccccggtctctcttttagataactgggaacgtgagctggataatttcttctacaccacaggtattccggtattgaaattgtatggtgagaccattaaagcggtgaaatacccgaaacaagccattccagctcatctacagtctcaagggatcaagaatttactcaaacccggctggcagagtgaggcgaaaattattctgacaacttacgaaacccttcgcgatcaggagttctcactggcgcgtcagcattggtccattatggtgtgcgacgaagctcaaaaaataaaaaatccagcagcattaatcacccatgcagcgaatgccgtacaagccaggttcaaagtagcctgcaccggcacaccggtggaaaatacgcttgtagacctttggagcctatttgatttcgctcagccgggtctattaggggcgctcaatgaatttggcaagcactatgttcgccctatagaaaatgaagcgggtcgtgatacggggcgacttgaaagtttacgagcgttgattgaaccacaaacattacgccgaactaaagaagaggtagcgcgcgatctgccgcaaaaaattgaagtcaccagctgtaagcaactgtcgttttcaggagttcaaaagcaactgtatctttcctctattgccaactggcaacaacaacaggcgctaagcgaaggaatgcagcagtcgggcgttgggatgttagggttgttacatcgactcaaactcatttgcgcgcatccggcagtggttagcccggggcctcgctatcgggaaggctcgccaaaacttaactggatgctgaaaacgctggatgaaattaaacacagcagtaaagacaaggtgattatcttcactgagctgcgtgatctacagcgcgagatacagcatgcgattcagcagcggtttggcttccgcccggtgataattaatggtgataccagcactaaaagtcagagccagaacagccgtcagcgattgattgatgatttccaggaccaacccggctttggcgtgattattctttccacggtagcggttggttttggggttaacgttcagaaagccaaccacgttattcatttcacccgctgctggaacccggcaaaagaagatcaggcaactgatcgcgcctaccgtatcggtcagacaaaagatgtgtatgtgtattacccgaccgtaagggacggcgatattacgacatttgaggaaactttagatgtgttgctcaaccgcaggcgtgcgcttgcaagagatatgctttgcacttccccggatttaagcggggtagatttcgaaggtgtgttcaaaggagcatga

SEQ ID NO: 8493 - DNA, 2190 bp, Pectobacterium carotovorum subsp. brasiliense; identical to SEQ ID NO: 8489

SEQ ID NO: 8494 - DNA, 741 bp, Pectobacterium carotovorum subsp. brasiliense
atgtttggaaatgcatttggtgttagaaaacgccgcggtgatgaagcagagaaacccttctggatctcctatgccgatctgatgaccgccatgatggtgctatttctggtggtgatggtcgcgtcgctaagctccgttacacaacgtattcaacgcgcggagcaaggggaaaaagtcagagggcaggatatcaccagattatgtgagcgcctggagctgcatgcacgtaatgtgaacaaaaccatcgtggtggattgccacgataaccgcatcagctttggtgaggcaggtcgtttcgaccacaatcgttttttcctgaacgccgaagggcaaaaagcattacaggatgtcgttccacttgtactggaggcatctgacagcgatgaaggcaaaaagtggtttaaacaaatcgtcattgaaggatttaccgacaccgatggttcgtacctttacaacctacatctctcccttcagcgctctgaatgggtcatgtgcagtttgctggatagtcgtagtcctctgcaaaaaagtatttctgcagaacagcagctccaaattcgtaagcttttccttgctggtggtgtctcgtttaataatgcgaaagagagcaaagaagccagccgccgcgtcgagttgcgcatgcagtttttcgggcttaaggataaacgtggtggggccgaagaagtggatttccctccggtcgtgaataaagaagtttgccagttggtaatgccgcaatga

SEQ ID NO: 8495 - DNA, 1683 bp, Pectobacterium carotovorum subsp. brasiliense
atgacacccgcactgaattctctatcgcagcgtattgcagcgaagatgtcttcctgccagcaggatgataattatctacgcaatgattttcacgcgttggcctctgcagccctcgatatagaaaaacgttttgataaagcagagaaggtacccacaccgccgcatgaaatgcgactggcagccctgcgtcgttttcgccttgcggaagaactgactgaacgtgagtggcggatggtgttttatggccttgccgataatgaccctctatcccccgaccagccggtattgctggaggatgagcattttttcccgaaggtaaacagcgctatcaaaagacggctcgaaaccaaaacgttgaaacgccgggactgggcagcactctgttcaagctattttgcctacaggcacgaatatccggagaacaacccacactggtgtgtgctgcgtgggcatatcgcccagggttacttcgtagtgaaaaccgcaattcgcagagaaaagtcatggatgaaaactattgagttttaccacgacatttttacgccccaggctggcggagtgatatcccatcagctactttccggcgaaagcaactctttatcatcattagaaaaaatagcgcaaatccccgacagcagctggttgtggaaacgtattttcaccgtattgctggcgcagcttgatactctggatgatcctcattatctggacaaaatcagttggctattaggcctggcggcgcagtggatacgttttcgcgatgacatcataacggcgacgctgacccgctattaccattctacttatcgtgatcaagcacattccgctctgaaacaggccgccctggaatactgggataacccgcaactgaaaagccaacagaacaaatggcatcagtatgtttctgaacccgtcgcagcaatggtacggggctggctggcaaagcaagatctgatgcacttctttgagctattacgcgggaatgacgatgttgatcaggcacgattgcactactggctacgcttcgcgaaccagatgggatttacccgtattgttatggggcccgatgcctggcaagatcgtggcagcgattttatgagattccgcgaggagaatcgtggacgactgagtcatctgcgcggtggacgtagtttcgataacgccatgatcatgcagattaacgattacattttcgttgagttttcagggacggggaacgcgatgtatgcctaccgagtgggtcaggctccatttaacccagagtcacactcattggatattaatatccaattaaaagacaaataccgtaatgttcttcgtcttccacatactccacgagccgaaggctacaccaaagcccgactcactggctggatgctgaaatatgatgatgaactgcgcaaactgggtatccgctggatggctgaagagcccatcaaatttgttgataaaaaagccccctcacccgcctcggtatctgatatcaaaatcatcaatccattgcgggatacggcaatacagcgcttggttgaaaacacctcatgcatagtcagcgataaccgacaaaaaggtggtgtgctctccgttcagctcaaatctccggatgacacaacggaaagagagttgctacgactgggtttcgcccctgtgactaaagaacctcatcgctactggatcaaataa

SEQ ID NO: 8496 - DNA, 3243 bp, Pectobacterium carotovorum subsp. brasiliense
atgctgaaacgtttgttaaacaaactgacgggaaaccgtcagcagatagaacgccacctgaagaatcagtaccaaattgaggaaaacggactcaattttcagcaatcgctggttgatgacctggaactttgggctctggcatcctggcttgaacaactggctgaagaagactatctgatatcactaacagaccgctggttgttgagttgggatgcattgtatcgtctattggaagacgaggaacatgccagcagcctgcctttgattggcgtgcctgagattttgcccctacgtgcaagtttgagttcgcgaggagctctaagcgatagtgatttccgcgtctggattgctgaatgggctacacttcccgcgcgtcaacctatccgctttagccgtaccggagctatttttactcatgaaaatcagcagcatctgttgtcacgagaaaactgggcactcttgcaggcaaccgagcagctcagcatgcagcaaactcaggctcccggcgaaaccaccaatcaactgggatgggctgtaattcgcaaatgtgcgaaacaggccgccgcaaaatttgatgattatttagaaaaaacgcatgtcatcaaaccaacttcattgtcgttacgcctgcgtaaggcgacagttgctgatactgccgttatcgaaattgagccccacttcgaggaccagccagctaactggctcggtagttttgacaaaaacttgcaggttcatgatagctaccgtatactcggagagaatggcgaactcagccatgtcatcatccctcccgaagtgaaagaagtcctgaattcaatacactcaatcccaggccgtcgggtggccggtagtgaagcgctttcctttgttcgcaacccctataccttcctgggtgaagatgccgccagtgttattgcccccgaagaacatgaacaggcactgtttgatgcccatattttcttccatcacttcaagcttcagcctcgcgtaaatgatgagaacaaaatagaggatattgcgttggttctggagccaatctcaccggtaccacaaccggaagtgtcattcctcttctctgccccatgggagttggataaatttgttcaggctctgggtatcagcgttgccgcacaaatgccagcaggttcctggcagggttacgaactggaattgagccaattcaccgaactgcagtggcatgattgccagtcactgctgacgcgctggcaacaggaagtcgaaggtaaagagttcaccgatgttctggatatcaacaaatatggcgatcgcgttattggtatcggtgaatttgaaaaaatatcatctcgctggctgagcaaagcgcaaagcgaagactggctccctgacgatatcgatttctccgcattttcggtcgaaacgctggatggctggcaacctgataacctgcagcatttcgatgaactgcaggagagaatcacccaggcagaagctactggcgaaacgcatatcatctccccctggaatgatactgaattgccgctggatgcagctaaaacgttcagtaggaactgggaaaaacagaaaaatacagcaaatgaatctgagggcaatgctgttgataaaacagtccgggctgtcctcaaaattgaacagaacattgaagatgtggcctacatcaaacagcgccgcgattcactcctcaatgcacgtcatgctgaacctgaaattcctctgagtctgaaagagcatatccgactcaaagaccatcagcgtgaaggcgtggcctggcttcagcaacttttccttcgttcacctcaggaaacggcaggctgcctgctagcggatgacatgggactagggaaaacgctgcaaattctgagttttctggtctggttcattgaaaaattcccagacgaaccaccaagtctcattgtcgccccggtctctcttttagataactgggaacgtgagctggataatttcttctacaccacaggtattccggtattgaaattgtatggtgagaccattaaagcggtgaaatacccgaaacaagccattccagctcatctacagtctcaagggatcaagaatttactcaaactcggctggcagagtgaggcgaaaattattctgacaacttacgaaacccttcgcgatcaggagttctcactggcgcgtcagcattggtccattatggtgtgcgacgaagctcaaaaaataaaaaatccagcagcattaatcacccatgcagcgaatgccgtacaagccaggttcaaagtagcctgcaccggcacaccggtggaaaatacgcttgtagacctttggagcctatttgatttcgctcagccgggtctattaggggcgctcaatgaatttggcaagcactatgttcgccctatagaaaatgaagcgggtcgtgatacggggcgacttgaaagtttacgagcgttgattgaaccacaaacattacgccgaactaaagaagaggtagcgcgcgatctgccgcaaaaaattgaagtcaccagctgtaagcaactgtcgttttcaggagttcaaaagcaactgtatctttcctctattgccaactggcaacaacaacaggcgctaagcgaaggaatgcagcagtcgggcgttgggatgttagggttgttacatcgactcaaactcatttgcgcgcatccggcagtggttagcccggggcctcgctatcgggaaggctcgccaaaacttaactggatgctgaaaacgctggatgaaattaaacacagcagtaaagacaaggtgattatcttcactgagctgcgtgatctacagcgcgagatacagcatgcagttcagcagcggtttggcttccgcccggtgataattaatggtgataccagcactaaaagtcagagccagaacagccgtcagcgattgattgatgatttccaggaccaacccggctttggcgtgattattctttccacggtagcggttggttttggggttaacgttcagaaagccaaccacgttattcatttcacccgctgctggaacccggcaaaagaagatcaggcaactgatcgcgcctaccgtatcggtcagacaaaagatgtgtatgtgtattacccgaccgtaagggacggcgatattacgacatttgaggaaactttagatgtgttgctcaaccgcaggcgtgcgcttgcaagagatatgctttgcacttccccagatttaagcggggtagatttcgaaggtgtgttcaaaggagcatga

SEQ ID NO: 8497 - DNA, 2190 bp, Pectobacterium carotovorum subsp. brasiliense; identical to SEQ ID NO: 8489

SEQ ID NO: 8498 - DNA, 741 bp, Pectobacterium carotovorum subsp. brasiliense; identical to SEQ ID NO: 8490

SEQ ID NO: 8499 - DNA, 1683 bp, Pectobacterium carotovorum subsp. brasiliense; identical to SEQ ID NO: 8491

SEQ ID NO: 8500 - DNA, 3243 bp, Pectobacterium carotovorum subsp. brasiliense; identical to SEQ ID NO: 8492

SEQ ID NO: 8501 - DNA, 2220 bp, Escherichia coli O139:H28 str. E24377A
gtgttttttgaatatataacaggtaaaactatgtcctggcttaattctgtcttattggcgcttacctcggtgcaaccttatatggtaccggcaaccgttatcggcctcgtcagttttgcattcctctgttttattttcttttatttttttagagcagttaaaattattaacggcctgaaaaaatatactcagtcaattaatggcatcgaaaataatgagcctggtaatcagcttcagcatctgcaaagtttgtttgtacagcctgagttaaagcacgcctggaatgaattcgaagaatcgttgcactcacaatatgaactggaggacggggaagagaaaatcgtccgtattagggctactgcaccgagcgccagtttcttctcggagcaacaactggtcgatattccgctgaacaccgaatttttcaaacacctgcccggtattctgaccggtgtggggattatcggtaccttctacggtctgatgattggtctcaaccacttcgaccccagcacaccagagcaggtctccagcagcgtcaataatctgcttcgcgatgtgctgtacgccttcctcggttcagcatttgcgattacgttctctatccttatcacctggctggagaaattctgtctggcgaaatgctacaaatatctggaaaaattcaccgcagctctcgacgccctctatgacagcggtgttggcgaggagtaccttgcctcactggtaaaatccagtaatgaaagcgcgacccaggcacgccatctgaaagagagcctggttaccgatttacgcgatatgctgctgcatctggccaacagccagaaagtggaaaacgagcggctagcgaccaccctcagcaccacctatcgcgaaacaggacaacagtttgccgagcaagtcagcggtgcgattgaaaacagcctgaaatcaccgctggataaaatagcgggcgcggttcagaccgccagtggcgatcaaagcggcatggtacaaaacatgctgcaggatgtgctgaccgcgtttatggcgaaactcgacaccacctttggtcagcagtttactaatctcaacgaaatgatgggacaaaccgttggcgctattcagacaatgcaaaccggtttcggcgcgttattacaggacatgcgtcaggtgagcgatgattcccgccagggcagcgcgcagctcatcgagcaactgttatcagagatgaaatctggccagcaagctatgcaggctggcatgaatgacatgctcaccagccttcagacctcggtggctaaaattggcgcagaaggtgaaggtgccggcgagcgaatggctcgccaactagagaaaatgttcgctgatagcgaggcgcgagaaaaagcccaggcagaacatatgaccgcctttattgaagccattcagaattcagtgcagcagggacaaagcgccacaatggaaaaaatggcagcctctgtcgagtcgcttggtgaacaactgggtagcctgtttgggcagattgataagggtcagcaacagatttcagcaaatcagcaagcgaatcagcagtccctgcacgaacagactcagcgggtaatgagtgaggtagacgatcagattaaacaattggtcgaaactgttgccagccagcatcagggaacaactgaaacacttcgtttactcgcagaacaaactaaccgccagattcaggatatgcataccggcgcggacaaaatgcgtctggcggccgagcgctttgaacatgccggtgatcgggtgtcggaagcaaaccaccttaccgctgacgtgctgaataaagcgcaatcggcaggttcatcactctcccttgccaccagcgaactcacctctgtggtggctgattatcgtaacaatcgggaagcggttagcaaatccattgccatgctggagttgctcgccgcaaatacgcagtctgaacaaaccacgcgcacccaattcatcgccgaccttaagcagcacggtgagcgtctgcagagctataaccgggaagcacaggcctttatggaaaatgtcagtgacgtgctagggaaagggtttgaagacttctctgaaggtgtttcacgcagcctggataaaacgctgggcaaactggacgttgaaatggcgaaggcttctactctgctcgcgggttctgtcgaacagatcggagaaagcgtcagcgagcttgatgatgtcctgtcacgcgttcgtgcctaa

SEQ ID NO: 8502 - DNA, 741 bp, Escherichia coli O139:H28 str. E24377A
atgtttggaaatgcatttggcgttaaaaaacgccgcagcgatgaagcagagaaacccttctggatctcctatgccgatttgatgactgccatgatggtgttatttctggtcgttatggttgcgtcgctgagttccgttacgcagcgtattcaacgtgcggagcaaggtgaaaaaacacgggggcaggatatttccagattgtgtgagcgcctggaattgcatgcccgcaacgtgaacaaaaccattgtggtggattgccatgataaccgtatcagttttggtgaagccgggcgtttcgatcacaaccaatttttcctgaacgctgaggggcaaaaagccttgcaggatgtggttcctcttgtgctggaagcgtccaacagtgaagaaggtaaaaaatggtttaagcagatcgttattgaagggtttaccgacaccgacggttcgtacttatacaacctacatctctccctgcaacgttctgagtgggtaatgtgtagtctgctcgatagccgcagccctctgcaaaaaaatatctccgcagaacagcagctccaaatccgtaaacttttcctcgcgggtggtgtctccttcaataatgccaaggaaagcaaggaagccagccgccgcgtcgagttgcgcatgcagttcttcgggcttaaagataaacgtgataaggccgatgaggtggatttcccccccgtcgtcaataaagaagtttgccagttggtaatgcccctatga

SEQ ID NO: 8503 - DNA, 1704 bp, Escherichia coli O139:H28 str. E24377A
ttgccagttggtaatgcccctatgacgcctgcactgaattctctttctcaacgcattgcagcgaggctctcttccagccaacgggatgaccattatctgcataatgatttccacgcgctggcctcagctgctctcgacatggaaaagcggtttgataaggcagaaaaaatccctttaccgccacaaaaaatgcgactggcagctctgcgtcgccttcgccttgcacaagaactcacggagcgagagtggcggatggtgttttatggtctcgccgataatgatccgtcatatcctgaccagccagtactgctggaggatgatacgtttttccctgaagtaaacaatgcaatcaaaaagcggcttgaaactaaaaccctgaaacgccgagactgggccgcactctgttcaagctattttgcttaccagaacccatcacctgagacaaacccgcactggtgcgtactgcgtggtcatatcgctcagggttacatggtggtgaaagcggctatacgacgagaaaaatcgtggatgaaaaccattgagttttatcacgatatttttaccccgcaggcgggaggcgtgatctccagacagttacttgcgggtgagagcaattcactctcgtcattagaaaaaatcgcgcaaatccctgatagcagttggttgtggaaacgtattttcacggtgcttttagcgcaactggacacactcgacgatccccagtttctggacaaaattagctggttgttaggtctggctgcccagtgggtacgtttccgtgatgacatcatgactgcgaccttgactcgctattaccattctatttatcgcgatcaggctcattcagctttgaagcaggccgcgctggaatactgggataacccgcaactgaaaagccagcagaataaatggcatcagtatgtctctgagccggtggctgcgatggtccggggctggctggcaaaacaagatctgatgcatttctttgaattgctgcgcggtaatggcgatgttgaccaggcacgattgcactattggctacgtttcgccaatcagatgggatttacccgtatcgtcatggggactgatgcctggcaagaccgtggtagtgactttgtgaaattccgcgaggagaataagggacgattgagttacttacgaggtggacgtaactttgataacgccatgattatgcagatcaacgattatctgttcgttgagttttccgggacagggaatgcaatgtatgcctatcgaataggtcacgcgccatttaaccctgaatcacgcacgcttgatatcaacattcatctaaaagataaggggcgctgcgtgctccgactgccccatacaccgcgcgcagaagggtataacaaagtccggataaccggctggatgttgaaatacgacgacgagctgcgtcagttgggcattcggtggatggcagaagaagccatcaagtttgtcgataagaaagcgtcctctcccgcctctatgtccgacattaaaatcatcaacccgttgcgtgatacggctatacagcatctggttgaaggtagttcatgtatcgtcagcgataatcgacaaaaaggtggcgtactgtccgtacaactcaatactcctgacgacaccatagaaagagagttgttacggctaggctttgcgcccgtggctaaagaaccgcatcgttactggatcaaataa

SEQ ID NO: 8504 - DNA, 3243 bp, Escherichia coli O139:H28 str. E24377A
atgctgaaacgtctgttaagtaaactgacgggaaaccgtcagcagatagaacatcacctaaaaaatcagtaccaggttgaggaaaacggacttagctttccgctatcgctggttgatgattcgcagctttgggcactggcatcctggctagaacaactggctgaagaagactatctgatatcacttacagaccggtggttgttgagttgggacgcactgtatcgcctgctggaggatgaggaacatgccagcagcctgcctcttatcggtgtacctgacgtactgcctttacgcgcaagcctgagttcacgaggagcattaagcgatagcgattttcgcgtctggattgctgaatgggctacgcttccagcccgcaagccgatccgtttcagtcgtaccggtgccattttaacccatgaaaatcagcaatacctgttatcgcgtgaaaactgggcactcttacaggcaacagaacaactcagtgcacagaaaaatcagactcctggtgaaaccactaaccagttgggatgggccgctatccgcaaatgtgcgaagcaagcagccgcaaaatttgatgattatttagaaaaaacgcatgtcgtcaaaccaacttcattgtcattacgtctgcgtaaagcaacggttgccgatactgctgttatcgaaattgagccccatttcgaggaccagcctgctaactggctaggcagttttgacaaaaactcgcaggttcacgatagctaccgcatccctggagagaatggcgaactcagccatgtcattatccctcccgaagtgaaagaagtcctgaattcaatacactcgattccaagccgtcgagtggccggaagcgaagcgctttcctttgttcgcaatccttataccttcctgggtgaagatgccgccagtgttattgcccctgaagaacatgaacaggcactgtttgatgccaggattttctttcatcatttcaggttgataccgcaactgaatgcggaaaataagatcgcagaagttacgctggtacttgagcctgtttcacctgttccccagccagaaatcacttttgggttctcagccccccgggagctggataaattcatacagcaactcggtattagcgtcgctgcacagatgcctgccggttcatggcaaggttacgagctggaattaagtcagttcactgaacagcagtggcacgattgccaggcacttctaactcgctggcagcaagaaatagaaggaaaagaatttagcgatgtgctggatattgcgaagtatggcgatcgcgtgattggcattggtgaatttgaaaaaatctcctctccctggctgaccaaagcgcagagtgaaaactggcttccagatgacatcgatttctccgcgttttcagtcgaaacactgtctggctggcaacctgaaaaccttcaccatttcgatgaactgcaggagagaattactcaggcagaagctgtaggtgaaacgcatatcaccgcaccatggaatgacagccaattaccgttggatgctgctaaaaccttcagtaagaactgggaaaaacagcaaagcactgcaaatgaatctcaaggcaacgttgcagataaaacggcccgagccgtactcaaaattgagcagaatattgaagaaacggcctacatcaaacagcgccgcaattcactcctcaatgcgcgtcatgccgagcctgaaattcctctgagccttaaagagcatatccgactcaaagaccatcaacgtgaaggcgtagcctggctccagcaactcttccttcgttcacctgaggaaaccgcaggttgcctgctggcggatgatatggggcttgggaaaacgctgcaaattctgagcttcctggtatggttcattgaaaaattcccgcaagaaccgccaagtctcattgttgctcctgtctctcttttagataactgggaacgtgaactggacaatttcttctataccgcaggaataccggtattgaaattgtatggcgagaccattaaagcggtgaaatatcccaaacaggctatccctgctcatctgcaatctcaggggatcaaaaacctgcttaaacctggctggcagggtgaggcgaaaatcatcctgacaacctacgaaacgcttcgcgaccaggagttttctctggcacgccagccgtggtccattatggtgtgcgacgaggcacaaaaaataaaaaacccagctgcgttaatcacacatgcggccaacgcggtacaagccaggtttaaagtggcatgtacaggaacacctgtcgaaaacacacttgtcgacctgtggagcttatttgattttgcccagccaggattgttaggggcactaaatgaatttggtaaacactatgttcgccccatcgagaacgaagatggccgcgatacggaacggttggaaagcctgcgagcgctgatagaacctcagactttacgccgaaccaaagaagaggttgcgcgtgatttacctcagaaaattgaagtggaaagctgcaagcaattgacgttgtctggcgtgcaaaaacagctctacctttcgtccgttgcaaattggcaacaacagcaagcactgagcgaagggatgcagcaggccggaaccggtatgttaggtttgttacaccgactgaaactcatctgtgcacaccctgcagtagttaatccagaaccacgttttcgtgataactcacccaagcttaactggctgctgaaaatactcgcagaactaaaacacaccacgaaagataaggtcattatttttacggagcttcgagatttacagcgcgaacttcaacatgcgatccaccaaaagtttggtttccgccctgtcattatcaatggtgataccagcactaaaagtcaaagtcaaaacagccgccagcgcctgattgatgattttcaggctcagcctgggtttggggtgattattctctctacggttgccgtcggattcggcgttaacgtccagaaagccaatcatgttattcatttcactcgctgctggaacccagccaaagaagatcaggcaacagaccgggcgtaccgaattgggcaaactaaagatgtgtatgtctattacccgacggtgaaggacactgaaatcaccacatttgaagaaacactggatgaccttctgcagcgtcgacgtgcattggccagagatatgctctgcgctactcccgatttgagtggtgcggattttgaggccattttgaagggggcttaa

SEQ ID NO: 8505 - DNA, 2190 bp, Escherichia coli EC1738
atgtcctggcttaattccattttagtaacacttacatctgtagaaccctataaggtacctgtcactgttatcgtcactgttacctttgcctttgtctgctttattttcttttatttactgagatccatcagaattatttatggattaaaaaaatacacgcgttcaattaacagcattgaaaaaagtgcgccagaggttcagcttgaacaccttaagagcctgtttcagcggtctgaactcaagcatgcgtggaatgagttcgaagaatcgttgcactcacaatatgaactggagaacggcgaagagaaaatcgtccgtattcgggctactgcgccgagcgccagcttcttctcggagcaacaactggtcgatattccgctgaacactgaatttttcaaacacctgcccggtattctgaccggtatgggaattatcggtaccttctacggtctgatgattggtctcaaccacttcgaccccagcacaccagagcaggtctccagtagcgtcaataatctactacgcgatgtactgtacgccttcctgggttctgcatttgctatttttgcttccattctggtcacctggcttgaaaaattatccatcgctaaaagctacaaatatctggaaaaattcaccgcagccctcgactccctgtatgacagcggcgttggcgaggagtaccttgcctcactggtgaagtccagtaatgaaagcgcgacccaggcacgccatctgaaagagagcctggttacagatttacgcgatatgttactacatctggccgaaagtcagaaaatcgaaaatgaacgcctcgcaaatacgttaagcgcaacttaccgcgaatcaggttcacaatttgccgaccaggtcagcggtgcgattgaaaacagcttgaagtcaccattggataaaattgccggtgcggttcagaccgccagcggcgatcaaagcggcatggtacaaaacatgctgcagaatgtactgaccgcgtttatggcgaaactcgacaccacctttggtcagcagtttacaaacctcaacgaaatgatggggcaaaccgttggtgcaattcagaccatgcaaaccggtttctccgcgttattacaggacatgcgtcaggtgagcgacgattcccgccagggcagcgcgcagcttatcgagcaactgttatcagagatgaaatctggccagcaagctctacaggctggcatgaatgatatgctcaccagccttcaagtctcagtggcgaaaattggcgcagaaggtgaaggggccggtgaacgtatagctcgccaactggaaaaaatgttcgctgatagcgaggcgcgagaaaaagcccaggcagaacatatggctgcttttgttgaagccattcagaattcagtacaacagggacaaagcgccacaatggaaaaaatggcagcctctgtcggggcgcttggtgaacaactgggtagcctgtttggacagatcgataagggtcagcaacaaatttcagcgactcagcaagcgaatcagcagtccctgcacgaacagactcaacgggtaatgagtgaggtagacgatcagattaaacaattggtcgaaactgttgccagccagcatcagggaacaacagaaactcttcgtttgctcgcagaacaaactaaccggcagattcaggatatgcaagctggcgcggacaagatgcgtctggctgctgaacgctttgaacatgccggtgagcgggtgtcggaagcaaaccaccttaccgctgatgtgctgaataaagcgcaatcggcaggttcatcactttcccttgccaccagcgagctcacctccgttgtggctgattatcgtaacaatcgggaagcggttagcaaatccattgccatgctggagttgctcgccgcaaatacgcagtcagaacaaaccacgcgcaaccaattcatcgcagatcttaagcaacacggtgagcgtctacagagctataaccgggaagcacaggtctttatggaaaatgtaagtgacgtgctcgggaaaggatttgaagacttctctgaaggtgtttcacgcagcctggataaaacgctgggtaaactggacgtcgaaatggcgaaagcctctaatctgctcgcgggatctgtcgaacagctcggagaaagcgtcagcgaacttgatgatgttctgtcacgcgtacgaacctaa

SEQ ID NO: 8506 - DNA, 741 bp, Escherichia coli EC1738
atgtttggaaacgcatttggcgttaaaaaacgccgcagcgatgaagcagaaaaaccattctggatctcctatgccgatctgatgactgcaatgatggtgttatttctggtcgtcatggttgcgtcactgagttccgttacacagcgtattcaacgtgcggagcaaggcgaaaaagcaagggggcaggatatttccagattgtgtgaacgcctggaactgcatgcccgcaatgtgaacaaaaacatcgtagtggattgccacgataaccgtatcagctttggcgaagccgggcgtttcgctcataaccaatttttcctgaacgccgaggggcaaaaagcgttgcaggatgtagttcctcttgtactggaagcgtccaacagtgaagagggtaagaagtggtttaagcagatcgttattgaagggtttaccgacaccgacggttcgtacttatacaacctacatctctccctgcaacgctctgaatgggtaatgtgtagtctgctcgatagccgcagccctctgcaaaaaaatatctccgcagaacagcagctccaaatccgtaagcttttcctcgcgggtggcgtctccttcaataatgctaaggaaagcaaggaagccagccgccgggtcgagttgcgcatgcagttcttcgggcttaaagataaacgtgataaggccgatgaggtggattttccccccgtcgttaataaagaagtttgccagttggttatgccactatga

SEQ ID NO: 8507 - DNA, 1452 bp, Escherichia coli EC1738
atggtgttttatggcctcgccgataatgatccattatatcctgaccagccgatcctgctggaggatgatacatttttccccagagtaaacagtgcaatcaaaaaacgtattgaaaccaaaacgttgaaacgccgggattgggcagcactttgttcaagctattttgcctaccaacaccaatcacccgagacaaaccctcactggtgcgtactgcgggggcatatcgctcagggttacctggtagtgaaagccgctatacgacgagaaaaatcgtggatgaaaaccattgagttttatcacgacatttttaccccacaagcgggaggagtgatctccaggcagttacttgcaggtgagaacaattcactctcatcattagagaaaatcgcgcaaatccctgatagcagttggttatggaagcgcattttcactgtgcttttagctcaactggacacgctcgacgatccccagtttctgagcaaaattagctggttgttaggcttagctgcgcagtgggtgcgtttccgtgatgacatcatgactgcaaccctgactcgctattaccattctggctatcgcgatcagtcacatccagcgttgaagcaggccgcgctggaatactgggataacccccagttgaaaagccagcaaaataaatggcatcagtatgtctccgagtcggttgccgcaatggtccggggctggttggcaaaacaggacctgacacatttctttgaactgctgcgcggtaatggcgatgtcgatcaggctcgactgcactactggctgcgtttcgctaatcagatgggatttactcgtatcatcatggggtccgatgcctggcaagatcgtggtagcgattttgtgaaattccgcgaggagaataagggacgattgagttacttacgaggtgggcgtaactttgataacgccatggttatgcaaatcaacgattatctgtttgtcgagttttccgggacaggaaatgcgatgtatgcctatcaaataggtcacgcgccatttaaccctgaatcacgcacgcttgatatcaacattcatctaaaagatcaggggcgatgcgcactcagactcccccatgcacctcgtgctgaggggtataacaaagtccggataaccggctggatgttgaaatacgacgatgagctacgtaagttgggcattcggtggatggctgaagaacccgtcaggtttgtcgataagaaagtgccccctcccgtcgctatgtctgacatcaaaatcatcaacccgttgcgtgatacggctatacaacgcctggttaaatgtagttcatgtatcgtcagcgataatcgacataaaggtggcatactgtccgtacaactcattacacctgacgacaccgtagaaagagagttgttacgactaggctttgcacctgtagctaaagaaccgcatcgttactggatcaaataa

SEQ ID NO: 8508 - DNA, 663 bp, Escherichia coli EC1738
atgctgaaacgtctgttaagtaaactgacgggaaaccgtcagcagatagaacaccacctaaagaatcagtatcaggttgaggaaaacggtctcagctttccgctatcgctggttgatgattcacagctttgggcactggcatcctggcttgaacaacttgctgaagaagactatctgatatcacttacagatcggtggttattgagttgggaggcactatatcgcctgctggaggatgaggaacatgccagcagcctgcctcttatcggtgtacctgacatattgcccttacgcgcaagcctgagttcacgaggagcattaagcgatagcgattttcgcgtctggattgctgaatgggctacatttccagcccgcaagccgattcgtttcagtcgtaccggtgccattttaacgcatgataatcagcaatacctgttatcgcgggaaaactgggcgctcttacaggcaacagaacaactcagtgcacagcaaattcagactcccggcgaaaccactaaccagctgggatgggccgctatccgcaaatgtgcgaaactcgccgccgccaaatttgatgattatttagaaaaaacgcacgtcatcaaaccgacttcattgtcattacgtctgcgtaaagcaacagttgccgataccgcagtttga

SEQ ID NO: 8509 - DNA, 2190 bp, Escherichia coli PA10; identical to SEQ ID NO: 8505

SEQ ID NO: 8510 - DNA, 741 bp, Escherichia coli PA10; identical to SEQ ID NO: 8506

SEQ ID NO: 8511 - DNA, 1515 bp, Escherichia coli PA10
atgcggctggaggctctacgtcgctttcgcctggcacaagaactcacggaacgagagtggcggatggtgttttatggcctcgccgataatgatccattatatcctgaccagccgatcctgctggaggatgatacatttttccccagagtaaacagtgcaatcaaaaaacgtattgaaaccaaaacgttgaaacgccgggattgggcagcactttgttcaagctattttgcctaccaacaccaatcacccgagacaaaccctcactggtgcgtactgcgggggcatatcgctcagggttacctggtagtgaaagccgctatacgacgagaaaaatcgtggatgaaaaccattgagttttatcacgacatttttaccccacaagcgggaggagtgatctccaggcagttacttgcaggtgagaacaattcactctcatcattagagaaaatcgcgcaaatccctgatagcagttggttatggaagcgcattttcactgtgcttttagctcaactggacacgctcgacgatccccagtttctgagcaaaattagctggttgttaggcttagctgcgcagtgggtgcgtttccgtgatgacatcatgactgcaaccctgactcgctattaccattctggctatcgcgatcagtcacatccagcgttgaagcaggccgcgctggaatactgggataacccccagttgaaaagccagcaaaataaatggcatcagtatgtctccgagtcggttgccgcaatggtccggggctggttggcaaaacaggacctgacacatttctttgaactgctgcgcggtaatggcgatgtcgatcaggctcgactgcactactggctgcgtttcgctaatcagatgggatttactcgtatcatcatggggtccgatgcctggcaagatcgtggtagcgattttgtgaaattccgcgaggagaataagggacgattgagttacttacgaggtgggcgtaactttgataacgccatggttatgcaaatcaacgattatctgtttgtcgagttttccgggacaggaaatgcgatgtatgcctatcaaataggtcacgcgccatttaaccctgaatcacgcacgcttgatatcaacattcatctaaaagatcaggggcgatgcgcactcagactcccccatgcacctcgtgctgaggggtataacaaagtccggataaccggctggatgttgaaatacgacgatgagctacgtaagttgggcattcggtggatggctgaagaacccgtcaggtttgtcgataagaaagtgccccctcccgtcgctatgtctgacatcaaaatcatcaacccgttgcgtgatacggctatacaacgcctggttaaatgtagttcatgtatcgtcagcgataatcgacataaaggtggcatactgtccgtacaactcattacacctgacgacaccgtagaaagagagttgttacgactaggctttgcacctgtagctaaagaaccgcatcgttactggatcaaataa

SEQ ID NO: 8512 - DNA, 3243 bp, Escherichia coli PA10
atgctgaaacgtctgttaagtaaactgacgggaaaccgtcagcagatagaacaccacctaaagaatcagtatcaggttgaggaaaacggtctcagctttccgctatcgctggttgatgattcacagctttgggcactggcatcctggcttgaacaacttgctgaagaagactatctgatatcacttacagatcggtggttattgagttgggaggcactatatcgcctgctggaggatgaggaacatgccagcagcctgcctcttatcggtgtacctgacatattgcccttacgcgcaagcctgagttcacgaggagcattaagcgatagcgattttcgcgtctggattgctgaatgggctacatttccagcccgcaagccgattcgtttcagtcgtaccggtgccattttaacgcatgataatcagcaatacctgttatcgcgggaaaactgggcgctcttacaggcaacagaacaactcagtgcacagcaaattcagactcccggcgaaaccactaaccagctgggatgggccgctatccgcaaatgtgcgaaactcgccgccgccaaatttgatgattatttagaaaaaacgcacgtcatcaaaccgacttcattgtcattacgtctgcgtaaagcaacagttgccgataccgcagttatcgaaattgaacctcatttcgaggaccagcctgctaactggctgggcagttttgacaagaacttacaggttcacgatagctaccgcatcccaggagagaatggcgaactcagtcacgtcatcatccctcccgaagtgaaagaagtcctgaattcaatacactcaatcccagggcgtcgagtggccggaagtgaagcgctttcctttgttcgcaatccttataccttcctgggtgaggatgccgccagtgttattgcccctgaagaacatgaacaggcactgtttgatgccaggattttctttcatcatttcaggttgataccgcaactgaatacggaaaataagatcacagaagttacgctgatacttgagcctgtttcacctgttccccagccagaaatcacttttgtgttctcagcgccctgggagctggataaattcatacagcaactcggtattagcgtcgctgcacagatgcctgccggttcatggcaaggttacgagctggaattaagtcagttcaccgaacagcagtggcacgattgccaggcactgctaactcgctggcaacaagaaattgaaggaaaagaatttagcgatgtgctggatattgcgaagtatggagatagagtgattggcattggtgaatttgaaaaaatatcctctccctggctgaccaaagcgcagagtgaaaactggcttcctgatggcatcgatttctccgcgttttcaatcgaaacactatctggctggcaacctgaaaatcctctccattttgatgaactacaggagataattactcaggcagaagccgctggtgaaacgtatatcaccacaccatggaatgacagccaattaccgttggatgccgctaaaaccttcagtaagaactgggaaaaacagcaaatcactgctaatgaatatcaaggcaacgttgcagataaaacggcccgagccgtactcaaaattgagcagaatattgaagaaacggcctacatcaaacagcgccgcaattcactcctcaatgcgcgtcatgccgaaccagaaattcctctgagccttaaagagcatatccgacttaaagaccatcaacgtgaaggcgtagcctggctccagcaactcttccttcgttcacctgaggaaacagcaggctgcctgctggcggatgatatggggcttggaaaaacgctgcaaattctgagcttcctggtatggttcattgaaaaattcccgcaagaaccgccaaatctcattgttgctcctgtctctcttttagataactgggaacgtgagctgaacaatttcttctataccgcaggaataccagtattgaaattgtatggcgagaccattaaagcggtgaaatatcccaaacaggccatccctgctcatctgcagtctaaggggatcaaaaacctgcttaaacctggctggcaaggtgaggcaaaaatcatcctgacgacctacgaaacgcttcgcgaccaggagttttctctggcacgccagccatggtccattatggtgtgcgacgaggcacaaaaaataaaaaacccagctgcgttaatcacacatgcggccaacgcggtacaagccaggtttaaagtggcatgcacaggaacgccagtcgaaaacacacttgtcgatctgtggagcttatttgattttgcccagcctggattgttaggggcactaaatgaatttggtaaacagtatgttcgccccatcgagaacgaagatggccgcgatacagaacggctggaaagcctgcgggcgctgatagaacctcagactttacgccgaaccaaagaagaggttgcacgtgatttacctcagaaaattgaagtagaaagctgcaagcaactgacgttgtctggcgtgcaaaaacagctctacctttcgtctgttgcaaattggcaacaacagcaagcactgcgcgaagggatgcagcaggccggaaccggtatgttaggtttgttacaccgactgaaactcatctgtgcacaccctgcaatagttaatccagagccacgttttcgtgataactcacccaagcttaactggctgctgaaaatactcgcagaaataaaacatacctcgaaagataaggtcattatttttacggagcttcgagatttacagcgcgagcttcaacatgcaatccaccaaaattttggtttccgccctgtcattatcaatggtgatagcagcactaaaagtcaaagccaaaacagccgccaacgcctgattgatgattttcaggctcagcctgggtttggggtgattattctctctacggttgctgtcgggtttggcgttaacgtccagaaagccaatcatgttattcattttactcgctgctggaatccagccaaagaagatcaggctacggatcgggcgtatcgcattgggcaaactaaaaatgtgtatgtctattacccaactgtgagagatactgaaatcacaacatttgaagaaacactggatgatctcttacaacgccgacgagcattggccagagatatgctctgcgctactcccgatttgaactgtgcggattttgagaccattttgaagggagcctaa

SEQ ID NO: 8513 - DNA, 2190 bp, Escherichia coli 5.2239; identical to SEQ ID NO: 8505

SEQ ID NO: 8514 - DNA, 741 bp, Escherichia coli 5.2239; identical to SEQ ID NO: 8506

SEQ ID NO: 8515 - DNA, 1515 bp, Escherichia coli 5.2239; identical to SEQ ID NO: 8511

SEQ ID NO: 8516 - DNA, 3243 bp, Escherichia coli 5.2239; identical to SEQ ID NO: 8512

SEQ ID NO: 8517 - DNA, 2190 bp, Escherichia coli 95.0943; identical to SEQ ID NO: 8505

SEQ ID NO: 8518 - DNA, 741 bp, Escherichia coli 95.0943; identical to SEQ ID NO: 8506

SEQ ID NO: 8519 - DNA, 1209 bp, Escherichia coli 95.0943
gtgaaagccgctatacgacgagaaaaatcgtggatgaaaaccattgagttttatcacgacatttttaccccacaagcgggaggagtgatctccaggcagttacttgcaggtgagaacaattcactctcatcattagagaaaatcgcgcaaatccctgatagcagttggttatggaagcgcattttcactgtgcttttagctcaactggacacgctcgacgatccccagtttctgagcaaaattagctggttgttaggcttagctgcgcagtgggtgcgtttccgtgatgacatcatgactgcaaccctgactcgctattaccattctggctatcgcgatcagtcacatccagcgttgaagcaggccgcgctggaatactgggataacccccagttgaaaagccagcaaaataaatggcatcagtatgtctccgagtcggttgccgcaatggtccggggctggttggcaaaacaggacctgacacatttctttgaactgctgcgcggtaatggcgatgtcgatcaggctcgactgcactactggctgcgtttcgctaatcagatgggatttactcgtatcatcatggggtccgatgcctggcaagatcgtggtagcgattttgtgaaattccgcgaggagaataagggacgattgagttacttacgaggtgggcgtaactttgataacgccatggttatgcaaatcaacgattatctgtttgtcgagttttccgggacaggaaatgcgatgtatgcctatcaaataggtcacgcgccatttaaccctgaatcacgcacgcttgatatcaacattcatctaaaagatcaggggcgatgcgcactcagactcccccatgcacctcgtgctgaggggtataacaaagtccggataaccggctggatgttgaaatacgacgatgagctacgtaagttgggcattcggtggatggctgaagaacccgtcaggtttgtcgataagaaagtgccccctcccgtcgctatgtctgacatcaaaatcatcaacccgttgcgtgatacggctatacaacgcctggttaaatgtagttcatgtatcgtcagcgataatcgacataaaggtggcatactgtccgtacaactcattacacctgacgacaccgtagaaagagagttgttacgactaggctttgcacctgtagctaaagaaccgcatcgttactggatcaaataa

SEQ ID NO: 8520 - DNA, 3243 bp, Escherichia coli 95.0943; identical to SEQ ID NO: 8512

SEQ ID NO: 8521 - DNA, 2190 bp, Escherichia coli 99.1781; identical to SEQ ID NO: 8505

SEQ ID NO: 8522 - DNA, 741 bp, Escherichia coli 99.1781; identical to SEQ ID NO: 8506

SEQ ID NO: 8523 - DNA, 1452 bp, Escherichia coli 99.1781; identical to SEQ ID NO: 8507

SEQ ID NO: 8524 - DNA, 3243 bp, Escherichia coli 99.1781; identical to SEQ ID NO: 8512

SEQ ID NO: 8525 - DNA, 2115 bp, Escherichia coli 99.1753
gtgacaaccaatgacgttattctctttattttcttttatttactgagatccatcagaattatttatggattaaaaaaatacacgcgttcaattaacagcattgaaaaaagtgcgccagaggttcagcttgaacaccttaagagcctgtttcagcggtctgaactcaagcatgcgtggaatgagttcgaagaatcgttgcactcacaatatgaactggagaacggcgaagagaaaatcgtccgtattcgggctactgcgccgagcgccagcttcttctcggagcaacaactggtcgatattccgctgaacactgaatttttcaaacacctgcccggtattctgaccggtatgggaattatcggtaccttctacggtctgatgattggtctcaaccacttcgaccccagcacaccagagcaggtctccagtagcgtcaataatctactacgcgatgtactgtacgccttcctgggttctgcatttgctatttttgcttccattctggtcacctggcttgaaaaattatccatcgctaaaagctacaaatatctggaaaaattcaccgcagccctcgactccctgtatgacagcggcgttggcgaggagtaccttgcctcactggtgaagtccagtaatgaaagcgcgacccaggcacgccatctgaaagagagcctggttacagatttacgcgatatgttactacatctggccgaaagtcagaaaatcgaaaatgaacgcctcgcaaatacgttaagcgcaacttaccgcgaatcaggttcacaatttgccgaccaggtcagcggtgcgattgaaaacagcttgaagtcaccattggataaaattgccggtgcggttcagaccgccagcggcgatcaaagcggcatggtacaaaacatgctgcagaatgtactgaccgcgtttatggcgaaactcgacaccacctttggtcagcagtttacaaacctcaacgaaatgatggggcaaaccgttggtgcaattcagaccatgcaaaccggtttctccgcgttattacaggacatgcgtcaggtgagcgacgattcccgccagggcagcgcgcagcttatcgagcaactgttatcagagatgaaatctggccagcaagctctacaggctggcatgaatgatatgctcaccagccttcaagtctcagtggcgaaaattggcgcagaaggtgaaggggccggtgaacgtatagctcgccaactggaaaaaatgttcgctgatagcgaggcgcgagaaaaagcccaggcagaacatatggctgcttttgttgaagccattcagaattcagtacaacagggacaaagcgccacaatggaaaaaatggcagcctctgtcggggcgcttggtgaacaactgggtagcctgtttggacagatcgataagggtcagcaacaaatttcagcgactcagcaagcgaatcagcagtccctgcacgaacagactcaacgggtaatgagtgaggtagacgatcagattaaacaattggtcgaaactgttgccagccagcatcagggaacaacagaaactcttcgtttgctcgcagaacaaactaaccggcagattcaggatatgcaagctggcgcggacaagatgcgtctggctgctgaacgctttgaacatgccggtgagcgggtgtcggaagcaaaccaccttaccgctgatgtgctgaataaagcgcaatcggcaggttcatcactttcccttgccaccagcgagctcacctccgttgtggctgattatcgtaacaatcgggaagcggttagcaaatccattgccatgctggagttgctcgccgcaaatacgcagtcagaacaaaccacgcgcaaccaattcatcgcagatcttaagcaacacggtgagcgtctacagagctataaccgggaagcacaggtctttatggaaaatgtaagtgacgtgctcgggaaaggatttgaagacttctctgaaggtgtttcacgcagcctggataaaacgctgggtaaactggacgtcgaaatggcgaaagcctctaatctgctcgcgggatctgtcgaacagctcggagaaagcgtcagcgaacttgatgatgttctgtcacgcgtacgaacctaa

SEQ ID NO: 8526 - DNA, 741 bp, Escherichia coli 99.1753; identical to SEQ ID NO: 8506

SEQ ID NO: 8527 - DNA, 1176 bp, Escherichia coli 99.1753
atgaaaaccattgagttttatcacgacatttttaccccacaagcgggaggagtgatctccaggcagttacttgcaggtgagaacaattcactctcatcattagagaaaatcgcgcaaatccctgatagcagttggttatggaagcgcattttcactgtgcttttagctcaactggacacgctcgacgatccccagtttctgagcaaaattagctggttgttaggcttagctgcgcagtgggtgcgtttccgtgatgacatcatgactgcaaccctgactcgctattaccattctggctatcgcgatcagtcacatccagcgttgaagcaggccgcgctggaatactgggataacccccagttgaaaagccagcaaaataaatggcatcagtatgtctccgagtcggttgccgcaatggtccggggctggttggcaaaacaggacctgacacatttctttgaactgctgcgcggtaatggcgatgtcgatcaggctcgactgcactactggctgcgtttcgctaatcagatgggatttactcgtatcatcatggggtccgatgcctggcaagatcgtggtagcgattttgtgaaattccgcgaggagaataagggacgattgagttacttacgaggtgggcgtaactttgataacgccatggttatgcaaatcaacgattatctgtttgtcgagttttccgggacaggaaatgcgatgtatgcctatcaaataggtcacgcgccatttaaccctgaatcacgcacgcttgatatcaacattcatctaaaagatcaggggcgatgcgcactcagactcccccatgcacctcgtgctgaggggtataacaaagtccggataaccggctggatgttgaaatacgacgatgagctacgtaagttgggcattcggtggatggctgaagaacccgtcaggtttgtcgataagaaagtgccccctcccgtcgctatgtctgacatcaaaatcatcaacccgttgcgtgatacggctatacaacgcctggttaaatgtagttcatgtatcgtcagcgataatcgacataaaggtggcatactgtccgtacaactcattacacctgacgacaccgtagaaagagagttgttacgactaggctttgcacctgtagctaaagaaccgcatcgttactggatcaaataa

SEQ ID NO: 8528 - DNA, 3243 bp, Escherichia coli 99.1753; identical to SEQ ID NO: 8512

SEQ ID NO: 8529 - DNA, 2190 bp, Escherichia coli 99.1775; identical to SEQ ID NO: 8505

SEQ ID NO: 8530 - DNA, 741 bp, Escherichia coli 99.1775; identical to SEQ ID NO: 8506

SEQ ID NO: 8531 - DNA, 1452 bp, Escherichia coli 99.1775; identical to SEQ ID NO: 8507

SEQ ID NO: 8532 - DNA, 3243 bp, Escherichia coli 99.1775; identical to SEQ ID NO: 8512

SEQ ID NO: 8533 - DNA, 2190 bp, Escherichia coli 09BKT078844; identical to SEQ ID NO: 8505

SEQ ID NO: 8534 - DNA, 741 bp, Escherichia coli 09BKT078844; identical to SEQ ID NO: 8506

SEQ ID NO: 8535 - DNA, 1515 bp, Escherichia coli 09BKT078844
atgcggctggaggctctacgtcgctttcgcctggcacaagaactcacggaacgagagtggcggatggtgttttatggcctcgccgataatgatccattatatcctgaccagccgatcctgctggaggatgatacatttttccccagagtaaacagtgcaatcaaaaaacgtattgaaaccaaaacgttgaaacgccgggattgggcagcactttgttcaagctattttgcctaccaacaccaatcacccgagacaaaccctcactggtgcgtactgcgggggcatatcgctcagggttacctggtagtgaaagccgctatacgacgagaaaaatcgtggatgaaaaccattgagttttatcacgacatttttaccccacaagcgggaggagtgatctccaggcagttacttgcaggtgagaacaattcactctcatcattagagaaaatcgcgcaaatccctgatagcagttggttatggaagcgcattttcactgtgcttttagctcaactggacacgctcgacgatccccagtttctgagcaaaattagctggttgttaggcttagctgcgcagtgggtgcgtttccgtgatgacatcatgactgcaaccctgactcgctattaccattctggctatcgcgatcagtcacatccagcgttgaagcaggccgcgctggaatactgggataacccccagttgaaaagccagcaaaataaatggcatcagtatgtctccgagtcggttgccgcaatggtccggggctggttggcaaaacaggacctgacacatttctttgaactgctgcgcggtaatggcgatgtcgatcaggctcgactgcactactggctgcgtttcgctaatcagatgggatttactcgtatcatcatggggtccgatgcctggcaagatcgtggtagcgattttgtgaaattccgcgaggagaataagggacgattgagttacttacgaggtgggcgtaactttgataacgccatggttatgcaaatcaacgattatctgtttgtcgagttttccgggacaggaaatgcgatgtatgcctatcaaataggtcacgcgccatttaaccctgaatcacgcacgcttgatatcaacattcatctaaaagatcaggggcgatgcgcactcagactcccccatgcacctcgtgctgaggggtataacaaagtccggataaccggctggatgttgaaatacgacgatgagctacgtaagttgggcattcggtggatggctgaagaacccgtcaggtttgtcgataagaaagtgccccctcccgtcgctatgtctgacatcaaaatcatcaacccgttgcgtgatacggctatacaacacctggttaaatgtagttcatgtatcgtcagcgataatcgacataaaggtggcatactgtccgtacaactcattacacctgacgacaccgtagaaaaagagttgttacgactaggctttgcacctgtagctaaagaaccgcatcgttactggatcaaataa

SEQ ID NO: 8536 - DNA, 3243 bp, Escherichia coli 09BKT078844
atgctgaaacgtctgttaagtaaactgacgggaaaccgtcagcagatagaacaccacctaaagaatcagtatcaggttgaggaaaacggtctcagctttccgctatcgctggttgatgattcacagctttgggcactggcatcctggcttgaacaacttgctgaagaagactatctgatatcacttacagatcggtggttattgagttgggaggcactatatcgcctgctggaggatgaggaacatgccagcagcctgcctcttatcggtgtacctgacatattgcccttacgcgcaagcctgagttcacgaggagcattaagcgatagcgattttcgcgtctggattgctgaatgggctacatttccagcccgcaagccgattcgtttcagtcgtaccggtgccattttaacgcatgataatcagcaatacctgttatcgcgggaaaactgggcgctcttacaggcaacagaacaactcagtgcacagcaaattcagactcccggcgaaaccactaaccagctgggatgggccgctatccgcaaatgtgcgaaactcgccgccgccaaatttgatgattatttagaaaaaacgcacgtcatcaaaccgacttcattgtcattacgtctgcgtaaagcaacagttgccgataccgcagttatcgaaattgaacctcatttcgaggaccagcctgctaactggctgggcagttttgacaagaacttacaggttcacgatagctaccgcatcccaggagagaatggcgaactcagtcacgtcatcatccctcccgaagtgaaagaagtcctgaattcaatacactcaatcccagggcgtcgagtggccggaagtgaagcgctttcctttgttcgcaatccttataccttcctgggtgaggatgccgccagtgttattgcccctgaagaacatgaacaggcactgtttgatgccaggattttctttcatcatttcaggttgataccgcaactgaatacggaaaataagatcacagaagttacgctgatacttgagcctgtttcacctgttccccagccagaaatcacttttgtgttctcagcgccctgggagctggataaattcatacagcaactcggtattagcgtcgctgcacagatgcctgccggttcatggcaaggttacgagctggaattaagtcagttcaccgaacagcagtggcacgattgccaggcactgctaactcgctggcaacaagaaattgaaggaaaagaatttagcgatgtgctggatattgcgaagtatggagatagagtgattggcattggtgaatttgaaaaaatatcctctccctggctgaccaaagcgcagagtgaaaactggcttcctgatggcatcgatttctccgcgttttcaatcgaaacactatctggctggcaacctgaaaatcctctccattttgatgaactacaggagataattactcaggcagaagccgctggtgaaacgtatatcaccacaccatggaatgacagccaattaccgttggatgccgctaaaaccttcagtaagaactgggaaaaacagcaaatcactgctaatgaatatcaaggcaacgttgcagataaaacggcccgagccgtactcaaaattgagcagaatattgaagaaacggcctacatcaaacagcgccgcaattcactcctcaatgcgcgtcatgccgaaccagaaattcctctgagccttaaagagcatatccgacttaaagaccatcaacgtgaaggcgtagcctggctccagcaactcttccttcgttcacctgaggaaacagcaggctgcctgctggcggatgatatggggcttggaaaaacgctgcaaattctgagcttcctggtatggttcattgaaaaattcccgcaagaaccgccaaatctcattgttgctcctgtctctcttttagataactgggaacgtgagctgaacaatttcttctataccgcaggaataccagtattgaaattgtatggcgagaccattaaagcggtgaaatatcccaaacaggccatccctgctcatctgcagtctaaggggatcaaaaacctgcttaaacctggctggcaaggtgaggcaaaaatcatcctgacgacctacgaaacgcttcgcgaccaggagttttctctggcacgccagccatggtccattatggtgtgcgacgaggcacaaaaaataaaaaacccagctgcgttaatcacacatgcggccaacgcggtacaagccaggtttaaagtggcatgcacaggaacgcctgtcgaaaacacacttgtcgatctgtggagcttatttgattttgcccagcctggattgttaggggcactaaatgaatttggtaaacagtatgttcgccccatcgagaacgaagatggccgcgatacagaacggctggaaagcctgcgggcgctgatagaacctcagactttacgccgaaccaaagaagaggttgcacgtgatttacctcagaaaattgaagtagaaagctgcaagcaactgacgttgtctggcgtgcaaaaacagctctacctttcgtctgttgcaaattggcaacaacagcaagcactgcgcgaagggatgcagcaggccggaaccggtatgttaggtttgttacaccgactgaaactcatctgtgcacaccctgcaatagttaatccagagccacgttttcgtgataactcacccaagcttaactggctgctgaaaatactcgcagaaataaaacatacctcgaaagataaggtcattatttttacggagcttcgagatttacagcgcgagcttcaacatgcaatccaccaaaattttggtttccgccctgtcattatcaatggtgatagcagcactaaaagtcaaagccaaaacagccgccaacgcctgattgatgattttcaggctcagcctgggtttggggtgattattctctctacggttgctgtcgggtttggcgttaacgtccagaaagccaatcatgttattcattttactcgctgctggaatccagccaaagaagatcaggctacggatcgggcgtatcgcattgggcaaactaaaaatgtgtatgtctattacccaactgtgagagatactgaaatcacaacatttgaagaaacactggatgatctcttacaacgccgacgagcattggccagagatatgctctgcgctactcccgatttgaactgtgcggattttgagaccattttgaagggagcctaa

SEQ ID NO: 8537 - DNA, 2190 bp, Escherichia coli KTE60
atgtcctggcttaattctgtcttattggcgcttacctcggtgcaaccttatatggtaccggcaaccgttatcggcctcgtcagttttgcattcctctgttttattttcttttatttttttagagcagttaaaattattaacggcctgaaaaaatatactcagtcaattaatggcatcgaaaataatgagcctggtaatcagcttcagcatctgcaaagtttgtttgtacagcctgagttaaagcacgcctggaatgaattcgaagaatcgttgcactcacaatatgaactggaggacggggaagagaaaatcgtccgtattagggctactgcaccgagcgccagtttcttctcggagcaacaactggtcgatattccgctgaacaccgaatttttcaaacacctgcccggtattctgaccggtgtggggattatcggtaccttctacggtctgatgattggtctcaaccacttcgaccccagcacaccagagcaggtctccagcagcgtcaataatctgcttcgcgatgtgctgtacgccttcctcggttcagcatttgcgattacgttctctatccttatcacctggctggagaaattctgtctggcgaaatgctacaaatatctggaaaaattcaccgcagctctcgacgccctctatgacagcggtgttggcgaggagtaccttgcctcactggtaaaatccagtaatgaaagcgcgacccaggcacgccatctgaaagagagcctggttaccgatttacgcgatatgctgctgcatctggccaacagccagaaagtggaaaacgagcggctagcgaccaccctcagcaccacctatcgcgaaacaggacaacagtttgccgagcaagtcagcggtgcgattgaaaacagcctgaaatcaccgctggataaaatagcgggcgcggttcagaccgccagtggcgatcaaagcggcatggtacaaaacatgctgcaggatgtgctgaccgcgtttatggcgaaactcgacaccacctttggtcagcagtttactaatctcaacgaaatgatgggacaaaccgttggcgctattcagacaatgcaaaccggtttcggcgcgttattacaggacatgcgtcaggtgagcgatgattcccgccagggcagcgcgcagctcatcgagcaactgttatcagagatgaaatctggccagcaagctatgcaggctggcatgaatgacatgctcaccagccttcagacctcggtggctaaaattggcgcagaaggtgaaggtgccggcgagcgaatggctcgccaactagagaaaatgttcgctgatagcgaggcgcgagaaaaagcccaggcagaacatatgaccgcctttattgaagccattcagaattcagtgcagcagggacaaagcgccacaatggaaaaaatggcagcctctgtcgagtcgcttggtgaacaactgggtagcctgtttgggcagattgataagggtcagcaacagatttcagcaaatcagcaagcgaatcagcagtccctgcacgaacagactcagcgggtaatgagtgaggtagacgatcagattaaacaattggtcgaaactgttgccagccagcatcagggaacaactgaaacacttcgtttactcgcagaacaaactaaccgccagattcaggatatgcataccggcgcggacaaaatgcgtctggcggccgagcgctttgaacatgccggtgatcgggtgtcggaagcaaaccaccttaccgctgacgtgctgaataaagcgcaatcggcaggttcatcactctcccttgccaccagcgaactcacctctgtggtggctgattatcgtaacaatcgggaagcggttagcaaatccattgccatgctggagttgctcgccgcaaatacgcagtctgaacaaaccacgcgcacccaattcatcgccgaccttaagcagcacggtgagcgtctgcagagctataaccgggaagcacaggcctttatggaaaatgtcagtgacgtgctagggaaagggtttgaagacttctctgaaggtgtttcacgcagcctggataaaacgctgggcaaactggacgttgaaatggcgaaggcttctactctgctcgcgggttctgtcgaacagatcggagaaagcgtcagcgagcttgatgatgtcctgtcacgcgttcgtgcctaa

SEQ ID NO: 8538 - DNA, 741 bp, Escherichia coli KTE60
atgtttggaaatgcatttggcgttaaaaaacgccgcagcgatgaagcagagaaacccttctggatctcctatgccgatttgatgactgccatgatggtgttatttctggtcgttatggttgcgtcgctgagttccgttacgcagcgtattcaacgtgcggagcaaggtgaaaaaacacgggggcaggatatttccagattgtgtgagcgcctggaattgcatgcccgcaacgtgaacaaaaccattgtggtggattgccatgataaccgtatcagttttggtgaagccgggcgtttcgatcacaaccaatttttcctgaacgctgaggggcaaaaagcgttgcaggatgtggttcctcttgtgctggaagcgtccaacagtgaagaaggtaaaaaatggtttaagcagatcgttattgaagggtttaccgacaccgacggttcgtacttatacaacctacatctctccctgcaacgttctgagtgggtaatgtgtagtctgctcgatagccgcagccctctgcaaaaaaatatctccgcagaacagcagctccaaatccgtaaacttttcctcgcgggtggtgtctccttcaataatgccaaggaaagcaaggaagccagccgccgcgtcgagttgcgcatgcagttcttcgggcttaaagataaacgtgataaggccgatgaggtggatttcccccccgtcgtcaataaagaagtttgccagttggtaatgcccctatga

SEQ ID NO: 8539 - DNA, 1683 bp, Escherichia coli KTE60
atgacgcctgcactgaattctctttctcaacgcattgcagcgaggctctcttccagccaacgggatgaccattatctgcataatgatttccacgcgctggcctcagctgctctcgacatggaaaagcggtttgataaggcagaaaaaatccctttaccgccacaaaaaatgcgactggcagctctgcgtcgccttcgccttgcacaagaactcacggagcgagagtggcggatggtgttttatggtctcgccgataatgatccgtcatatcctgaccagccagtactgctggaggatgatacgtttttccctgaagtaaacaatgcaatcaaaaagcggcttgaaactaaaaccctgaaacgccgagactgggccgcactctgttcaagctattttgcttaccagaacccatcacctgagacaaacccgcactggtgcgtactgcgtggtcatatcgctcagggttacatggtggtgaaagcggctatacgacgagaaaaatcgtggatgaaaaccattgagttttatcacgatatttttaccccgcaggcgggaggcgtgatctccagacagttacttgcgggtgagagcaattcactctcgtcattagaaaaaatcgcgcaaatccctgatagcagttggttgtggaaacgtattttcacggtgcttttagcgcaactggacacactcgacgatccccagtttctggacaaaattagctggttgttaggtctggctgcccagtgggtacgtttccgtgatgacatcatgactgcgaccttgactcgctattaccattctatttatcgcgatcaggctcattcagctttgaagcaggccgcgctggaatactgggataacccgcaactgaaaagccagcagaataaatggcatcagtatgtctctgagccggtggctgcgatggtccggggctggctggcaaaacaagatctgatgcatttctttgaattgctgcgcggtaatggcgatgttgaccaggcacgattgcactattggctacgtttcgccaatcagatgggatttacccgtatcgtcatggggactgatgcctggcaagaccgtggtagtgactttgtgaaattccgcgaggagaataagggacgattgagttacttacgaggtggacgtaactttgataacgccatgattatgcagatcaacgattatctgttcgttgagttttccgggacagggaatgcaatgtatgcctatcgaataggtcacgcgccatttaaccctgaatcacgcacgcttgatatcaacattcatctaaaagataaggggcgctgcgtgctccgactgccccatacaccgcgcgcagaagggtataacaaagtccggataaccggctggatgttgaaatacgacgacgagctgcgtcagttgggcattcggtggatggcagaagaagccatcaagtttgtcgataagaaagcgtcctctcccgcctctatgtccgacattaaaatcatcaacccgttgcgtgatacggctatacagcatctggttgaaggtagttcatgtatcgtcagcgataatcgacaaaaaggtggcgtactgtccgtacaactcaatactcctgacgacaccatagaaagagagttgttacggctaggctttgcgcccgtggctaaagaaccgcatcgttactggatcaaataa

SEQ ID NO: 8540 - DNA, 3243 bp, Escherichia coli KTE60
atgctgaaacgtctgttaagtaaactgacgggaaaccgtcagcagatagaacatcacctaaaaaatcagtaccaggttgaggaaaacggacttagctttccgctatcgctggttgatgattcgcagctttgggcactggcatcctggctagaacaactggctgaagaagactatctgatatcacttacagaccggtggttgttgagttgggacgcactgtatcgcctgctggaggatgaggaacatgccagcagcctgcctcttatcggtgtacctgacgtactgcctttacgcgcaagcctgagttcacgaggagcattaagcgatagcgattttcgcgtctggattgctgaatgggctacgcttccagcccgcaagccgatccgtttcagtcgtaccggtgccattttaacccatgaaaatcagcaatacctgttatcgcgtgaaaactgggcactcttacaggcaacagaacaactcagtgcacagaaaaatcagactcctggtgaaaccactaaccagttgggatgggccgctatccgcaaatgtgcgaagcaagcagccgcaaaatttgatgattatttagaaaaaacgcatgtcgtcaaaccaacttcattgtcattacgtctgcgtaaagcaacggttgccgatactgctgttatcgaaattgagccccatttcgaggaccagcctgctaactggctaggcagttttgacaaaaactcgcaggttcacgatagctaccgcatccctggagagaatggcgaactcagccatgtcattatccctcccgaagtgaaagaagtcctgaattcaatacactcgattccaggccgtcgagtggccggaagcgaagcgctttcctttgttcgcaatccttataccttcctgggtgaagatgccgccagtgttattgcccctgaagaacatgaacaggcactgtttgatgccaggattttctttcatcatttcaggttgataccgcaactgaatgcggaaaataagatcgcagaagttacgctggtacttgagcctgtttcacctgttccccagccagaaatcacttttgggttctcagccccccgggagctggataaattcatacagcaactcggtattagcgtcgctgcacagatgcctgccggttcatggcaaggttacgagctggaattaagtcagttcactgaacagcagtggcacgattgccaggcacttctaactcgctggcagcaagaaatagaaggaaaagaatttagcgatgtgctggatattgcgaagtatggcgatcgcgtgattggcattggtgaatttgaaaaaatctcctctccctggctgaccaaagcgcagagtgaaaactggcttccagatgacatcgatttctccgcgttttcagtcgaaacactgtctggctggcaacctgaaaaccttcaccatttcgatgaactgcaggagagaattactcaggcagaagctgtaggtgaaacgcatatcaccgcaccatggaatgacagccaattaccgttggatgctgctaaaaccttcagtaagaactgggaaaaacagcaaagcactgcaaatgaatctcaaggcaacgttgcagataaaacggcccgagccgtactcaaaattgagcagaatattgaagaaacggcctacatcaaacagcgccgcaattcactcctcaatgcgcgtcatgccgagcctgaaattcctctgagccttaaagagcatatccgactcaaagaccatcaacgtgaaggcgtagcctggctccagcaactcttccttcgttcacctgaggaaaccgcaggttgcctgctggcggatgatatggggcttgggaaaacgctgcaaattctgagcttcctggtatggttcattgaaaaattcccgcaagaaccgccaagtctcattgttgctcctgtctctcttttagataactgggaacgtgaactggacaatttcttctataccgcaggaataccggtattgaaattgtatggcgagaccattaaagcggtgaaatatcccaaacaggctatccctgctcatctgcaatctcaggggatcaaaaacctgcttaaacctggctggcagggtgaggcgaaaatcatcctgacaacctacgaaacgcttcgcgaccaggagttttctctggcacgccagccgtggtccattatggtgtgcgacgaggcacaaaaaataaaaaacccagctgcgttaatcacacatgcggccaacgcggtacaagccaggtttaaagtggcatgtacaggaacacctgtcgaaaacacacttgtcgacctgtggagcttatttgattttgcccagccaggattgttaggggcactaaatgaatttggtaaacactatgttcgccccatcgagaacgaagatggccgcgatacggaacggttggaaagcctgcgagcgctgatagaacctcagactttacgccgaaccaaagaagaggttgcgcgtgatttacctcagaaaattgaagtggaaagctgcaagcaattgacgttgtctggcgtgcaaaaacagctctacctttcgtccgttgcaaattggcaacaacagcaagcactgagcgaagggatgcagcaggccggaaccggtatgttaggtttgttacaccgactgaaactcatctgtgcacaccctgcagtagttaatccagaaccacgttttcgtgataactcacccaagcttaactggctgctgaaaatactcgcagaactaaaacacaccacgaaagataaggtcattatttttacggagcttcgagatttacagcgcgaacttcaacatgcgatccaccaaaagtttggtttccgccctgtcattatcaatggtgataccagcactaaaagtcaaagtcaaaacagccgccagcgcctgattgatgattttcaggctcagcctgggtttggggtgattattctctctacggttgccgtcggattcggcgttaacgtccagaaagccaatcatgttattcatttcactcgctgctggaacccagccaaagaagatcaggcaacagaccgggcgtaccgaattgggcaaactaaagatgtgtatgtctattacccgacggtgaaggacactgaaatcaccacatttgaagaaacactggatgaccttctgcagcgtcgacgtgcattggccagagatatgctctgcgctactcccgatttgagtggtgcggattttgaggccattttgaagggggcttaa

SEQ ID NO: 8541 - DNA, 2190 bp, Escherichia coli KTE9
atgtcctggcttaattccctcttagtggcgcttacgtctgtggaaccccattgggttcctttcaccgttatcggcctcgttacctttgcctttgtctgctttattttcttttatttgctgagatccatcagaattatttatggactaaaaaaatacacgcgatcaattaccagcattgaaaaaagtgcgccagaggtccagcttgagcaccttaagagcctgtttcagcggcctgaactcaggcatgcgtggaatgagttcgaagaatcgttgcactcacaatatgaactggaggatggcgaagagaaaatcgtccgtattcgagctactgcaccgagcgctagctttttctcggagcaacaactggtcgatattccgctgaacaccgaatttttcaaacacctgcccggtattctgaccggtatggggattatcggcaccttctacggtctgatgattggtctcaaccacttcgaccccagcacaccggagcaggtctccagcagcgtcaataatctgctgcgcgatgtgctgtacgcctttctgggttctgcatttgctattttcgcctccattctggtcacctggcttgaaaaattatccatcgctaagtgctacaaatatctggaaaaattcaccgcatctctcgactcgctttatgacagcggcgttggcgaggagtaccttgcctcactggtgaaatcaagtaatgaaagcgcaacccaggcacgccatctgaaagagagtctggtcactgatttacgcgatatgttgctgcatctggccgagagccagaaagtcgaaaatgaacgccttgctaatacgttaagcgcaacttaccgcgagtcaggttcacagtttgccgaccaggtcagcggcgcgattgaaaacagcctgaagtcgccattggataaaattgccggtgcggttcagaccgccagcggtgatcaaagcggcatggtacaaaacatgctgcaggatgtgctgaccgcgtttatgtcgaaactagacaccacctttggtcagcagtttacaaacctcaacgaaatgatgggacaaaccgttggcgccattcaaacaatgcaaaccggtttcgccacgttattacaagatatgcgtcaggtgagcgatgatacccgccagggcagcgcgcagctcatcgagcaactgttatcagagatgaaatctggccagcaagctatgcaggctggcatgaatgacatgctcactagccttcaggcctcggtggctaaaattggcgcagaaggtgaaggtgccggagagcgaatggctcgccaactggaaaaaatgttcgctgatagcgaggcgcgagaaaaagcccaagcagaacatatgaccgcctttattgaagccattcagaattcagtgcagcagggacaaagcgccacaatggaaaaaatggcagcctctgtcgagttgcttggtgaacaactgggtagcctgtttgggcagattgataagggccagcaacagatttcagcgactcagcaagcgaatcagcagtcccttcacgaacagacacagcgtgtgatgagtgaggtagacgatcagattaaacagctgatcgacactgttgccagccagcatcagggaacgacagaaacacttcgcttgctcgcagaacaaaccaaccgacagattcaggatatgcaaaacggcgcggacaaaatgcgtatggctgccgaacgctttgagcatgcaggtgatcgggtgtcagaagcaaaccaccttaccgctgacgtgctgaataaagcgcaatcggcaggttcatcactctcccttgccaccagcgaactcacttccgttgtggctgattatcgtaacaatcgggaagctgttagcaaatccattgcaatgctggagctgctcgccgcaaatacgcagtctgaacaaaccacgcgcaaccaattcatcgccgacctcaagcagcacggtgaacgtctgcagagctataaccgggaagcacaggcctttatggaaaatgtcagtgacgtgctcgggaaagggtttgaagacttctccgaaggtgtttcacgcagcctggataaaacgctgggcaaactggatgtcgaaatggcgaaagcctctactctgctcgcgggttctgtcgaacagatcggagaaagcgtcagcgagcttgatgatgtcctgtcacgcgttcgtgcctaa

SEQ ID NO: 8542 - DNA, 741 bp, Escherichia coli KTE9
atgtttggaaatgcatttggcgttaaaaaacgccgcagcgatgaagcggagaaacccttctggatctcctatgccgatttgatgactgccatgatggtgttatttctggtcgttatggttgcgtcgctgagttccgttacacagcgtattcaacgtgcggagcaaggtgaaaaaacaaggggacaggatatatccagattgtgtgagcgcctggaactgcatgcccgcaacgtgaacaaaaccatcgtggtggattgccacgataaccgtatcagctttggcgaagccgggcgtttcgatcacaaccaatttttcctgaacgctgaggggcaaaaagcgttgcaggatgtggttcctcttgtgctggaagcgtccaatagtgaagaaggtaaaaagtggtttaagcaaattgtcattgaagggtttaccgacaccgacggttcgtacttatacaacctacatctctccctgcaacgctctgaatgggtaatgtgtagtctgctcgatagccgcagctctctgcaaaaaaatatctccgcagaacagcagctccaaatccgtaaacttttcctcgcgggtggcgtctccttcaataatgctaaggaaagcaaggaagccagccgccgggtcgagttgcgcatgcagttcttcgggcttaaagataaacgtgataaggccgatgaactggatttcccccccgtcgtcaataaagaagtttgccagttggtaatgcccctatga

SEQ ID NO: 8543 - DNA, 1683 bp, Escherichia coli KTE9
atgacgcctgccctgaattctctttctcaacgcattgcagcgaggctctcttccagccaacgggatgaccattatctacataatgatttccacgcgctggcctcagctgcactcgacatggaaaagcggtttgataaggcagaaaaaatccctttaccgccacaaaaaatgcgactggcagctcttcgtcgccttcgccttgcacaagaactctcggaacgagagtggcggatggtgttttatggcctcgccgataatgatccgtcatatcccgatcagccaatactgcttgaggatgatgcgtttttccctgaagtaaacaatgcaatcaaaaagcggcttgaaactaaaaccctgaaacgccgagactgggccgcactctgttcaagctattttgcttaccagaacccatcacctgagacaaacccgcactggtgcgtactgcgtggtcatatcgctcagggttacctggtggtgaaagcggctatacgacgagaaaaatcgtggatgaaaacaattgagttttatcacgatatttttaccccgcaggcgggaggcgtgatctccatgcagttacttgcaggtgagagcaattcactctcgtcattagaaaaaatcgcgcaaatccctgatagcagttggttgtggaaacgtattttcacggtgcttttagcgcaactggacacactcgacgatcccaagtttctggacaaaattagctggttgttaggtctggctgcccagtgggtacgtttccgtgatgacatcataactgcgaccttgactcgctattaccactctatatatcgcgatcaggttcattcagctttgaagcaggccgcgctggaatactgggataacccgcaactgaaaagccagcagaataaatggcatcagtatgtctctgagccggtggctgcgatggtccgaggttggctggcaaaacaagatctgatgcatttctttgaattgctgcgcggtaatggcgatgttgatcaggcacgattgcactactggctgcgtttcgccaaccagatgggatttactcgtattgtcatggggactgatgcctggcaagaccgtggtagcgactttgtgaaattccgcgaagagaataaggggcgattgagctatttgcgaggcggacgtagctttgataacgccatgattatgcagatcaatgattatctgttcgtcgaattttccgggacaggaaatgcgatgtatgcctatcgaataggtcacgcgccatttaaccctgaaacacgcacgcttgatatcaatattcatctaaaagatcaggggcgctgcacgctcaggctgccccatgcacctcgtgcagaggggtataacaaagttcggataaccggctggatgttgaaatacgatgatgagctacgcaagttgggcattcggtggatggcggaagaacccgtcaagtttatcgataaaaaagcgtcctctcccgcctctatgtccgaaatcaaaatcatcaacccgttgcgtgatacggctatacagcacctggttgaaggtaattcatgtatcgtcagcgataatcgacagaaaggtggcgtactgtccgtacaactcaatacacctgacgacaccatagaaagagagttgttacgactaggttttgcgcccgtggctaaagaactgcatcgttactggatcaaataa

SEQ ID NO: 8544 - DNA, 3255 bp, Escherichia coli KTE9
atgctaaaacgtctgttaagtaaactgacgggaaaccgtcagcagatagaacatcacctaaaaaatcagtaccaggttgagaaaaacggacttagctttccgctatcgctggttgatgattcgcagctttgggcactggtatcctggcttgaacaactggctgaagaagactatctgatatcacttacagaccggtggttgttgagttgggacgcactgtatcgcctgctggaggatgaggaacatgccagcagcctgcctcttatcggtgtacctgacgtactgcctttacgcgcaagcctgagttcacgaggagcattaagcgatagcgattttcgcgtctggattgctgaatgggctacgcttccagcccgcaagccggtccgtttcagtcgtaccggtgccattttaacccatgaaaatcagcaatacctgttatcgcgtgaaaactgggctctcttacaggcaacagaacaactcagtgcacagcaaaatcagactcctggcgaaaccactaaccagttgggatgggccgctatccgcaaatgtgcgaaacaagctgctgcaaaatttgatgattatttggaaaaaacgcatgtcgtcaaaccaacttcattgtcattacgtctgcgtaaagcaacggttgccgatactgctgttatcgaaattgagccccatttcgaggaccagcctgctaactggctgggcagttttgacaaaaactcgcaagttcacgatagctatcgtatccccggcgagaatggcgaactcagccatgtcattatccctcccgaagtgaaagatgtcttaaactcaatacactcaatcccaggccgtcgagtggccggaagtgaagcgctttcctttgttcgcaatccctatacatttttgggcgaagatgccgccagtgttattgcccctgaggaacatgaacaggcactgtttgatgccaagattttctttcatcatttcaggttgataccgcaactgaatgcggaaagtaagatcgcagaagttacgctgatacttgagcctgtttcacctgttccccagcctgaaatcatttttgtgttctcagccccttgggagctggataaattcatacagcaactcggtattagcgtcgctgcacagatgcctgccggttcatggcaaggttacgagctggaattaagtcagttcaccgaacagcagtggcacgattgccaggcactgctaactcgctggcaacaagaaattgaaggaaaagaatttagcgatgtgctggatattgcgaagtatggcgatagagtgattggcattggtgaatttgaaaaaatatcttctccttggctgaccaaagcgcagagtgaaaactggcttcctgatgacatcgatttctccgcgttttcagtcgaaacactgtctggctggcaacctgaaaatcttctccattttgatgaactgcaggagagaattactcgggcagaagccgctggtgaaacgcatatcaccgcaccatggaatgacagccaattaccgttggatgctgctaaaaccttcagtaagaactgggaaaaacagcaaagcactgcaaatgaatctcaaggcaacgttgcagataaaacggcccgagccgtactcaaaattgagcagaatattgaagaaacggcctacatcaaacagcgccgcaattcactcctcaatgcgcgtcatgccgaacctgaaattcctctgagccttaaagagcatatccgactcaaagaccatcaacgtgaaggcgtagcctggctccagcaactcttccttcgttcacctgaggaaaccgcaggttgcctgctggcggatgatatggggcttgggaaaacgctgcaaattctgagcttcctggtatggttcattgaaaaattcccgcaagaaccgccaagtctcattgttgcacctgtctctcttttagataactgggaacgtgaactggacaatttcttctataccgcaggaataccggtattgaaattgtatggcgagaccattaaagcggtgaaatatcccaaacaggctatccctgctcatctgcaatctcagggaatcaaaaacctgcttaaacctggctggcagggtgaggcgaaaatcatcctgacaacctacgaaacgcttcgcgaccaggagttttctctggcacgccagccgtggtccattatggtgtgcgacgaggcacaaaaaataaaaaacccagctgcgttaatcacacatgcggccaacgcggtacaagccaggtttaaagtggcatgcacaggaacgccagtcgaaaacacacttgtcgacctgtggagcttatttgattttgcccagccaggattgttaggggcactaaatgaatttggtaaacactatgttcgccccatcgagaacgaagatggccgcgatacggaacgactggaaagcctgcgggcgcttatagaacctcagactttacgccgaaccaaagaagaggttgcgcgtgatttacctcagaaaattgaagtggagagctgcaagcaattgacgttgtctggcgtgcaaaaacagctctacctttcgtctgttgcaaattggcaacaacagcaagcactgagcgaagggatgcagcaggccggaaccggtatgttaggtttgttacaccgactgaaactcatttgcgcacaccctgcagtagttaatccagagccacgttttcgtgataactcacccaagcttaactggctgctgaaaatactcgcagaaataaaacataccacgaaagataaggtcattatttttacggagcttcgagatttacagcgcgagcttcaacatgcaatccaccaaaagtttggtttccgccctgtcattatcaatggtgatactagcactaaaggtcaaagccaaaacagccgccagcgcctgattgatgattttcaggctcagcctgggtttggggtgattattctctctacggttgctgtcgggttcggcgttaacgtccagaaagccaatcatgttattcatttcactcgctgctggaatccagccaaagaagatcaggctacggaccgggcgtaccgaatagggcaaaccaaagatgtatatgtttattacccgacggtaagggacactgaaatcaccacatttgaagaaacgctggatgaccttctgcagcgtcgacgtgcattggccagggatatgctatgtgcaactcctgatttgagtagtgttgattttgaggtcatattgaaaggtgatcttacccagcaatag

SEQ ID NO: 8545 - DNA, 2190 bp, Escherichia coli P0299917.10
atgctctggcttgattcttttttattggtgcttacctcagtacaaccttatatggtaccggcaaccgttatcggcattgtcagtgttgcatttatcatttttacgctgttttatctttttagagcggttaaaattgttaacggtctggaaaaatataaacagtcaattaatagcatcaaaaataatgagcctgataatcaacttcagcatctgcagaatttgtttgtacagcctgagttaaagcacgcctggagtgaattcaaagaatcgttgcactcacaatatgagctggaggacggggaagagaaaatcgtccgtattagggctacagcaccaagcgccagcttcttctcagagcaacaactggtcgatattccgctgaacaccgaattatttaaacacctacccggtattctgactggcgtggggattatcggcaccttctacggcctgatgattggtctcaagcacttcgaccccagcacacctgagcaggtcaccagtagcgtcaataatctgctgcatgatgtgttatacgcgttcctcggttcagcatttgcaattacgttctctatccttatcacctggctggagaaattctatctggcgaaatgctacaaaaatctggaaaagttcaccgctgagcttgattccctctacgacagcggcgttggcgaggagtaccttgcatcactggtaaaatccagtaatgaaagcgcgacccaggcacgccatctgaaagagagcctggttaccgatttacgcgatatgttgctgcatctggccaacagccagaaagtggaaaacgagcggctggcgaccaccctcagcaccacctatcgcgaaacaggacaacagtttgccgagcaagtcagcggtgcgattgaaaacagcctgaaatcaccgctggataaaatagcgggcgcggttcagaccgccagtggcgatcaaagcggcatggtacaaaacatgctgcaggatgtgctgaccgcgtttatggcgaaactcgacaccacctttggtcagcagtttactagtctcaacgaaatgatggggcaaaccgttggcgctattcagaccatgcaaaccggtttctccgcgttattacaggacatgcgtcaagtaagcgatgattcccgccagggcagcgcgcagctcatcgagcaactgttatcagagatgaaatctggccagcaagctctgcaggctggcatgaatgacatgctcaccagccttcaggcctcagtggcgaaaattggcgcagaaggtgaaggtgccggtgaacgtatggctcgccaaatggaaaaaatgttcgccgatagcgaagcgcgagaaaaggcccaagcagaacatatggctgcctttgttgaagccattcagaattcagtgcagcagggacaaagcgctacaatggaaaaaatggcagcctctgtcggtgcgctaggtgaacaactggggagcctgtttggacagattgataaaggtcagcaacagatttcagcaaatcagcaagcgaatcagcagtccctgcacgaacagactcagcgggtaatgagtgaggtagacgatcagattaaacaattggtcgaaactgttgccagccagcatcagggaacaactgaaacacttcgtttactcgcagaacaaactaaccggcagattcaggatatgcaaactggcgcggacaaaatgcgtctggcagccgagcgctttgaacatgctggtgatcgagtgtcggaagcaaaccaccttaccgctgacgtgctgaataaagcgcaatcggcaggttcatcactttcccttgccaccagcgagctcacctccgttgtggctgattatcgtaacaatcgggaagcggttagcaaatccattgccatgctggagttgctcgccgcaaatacgcagtcagaacaaaccacgcgcaaccaattcattgccgatcttaagcagcacggtgaacgcctgcaaagctataaccgggaagcacaggcctttatggaaaatgtcagtgacgtgctcgggaaaggatttgaggacttctctgaaggtgtttcacgcagcctggataaaacgctgggcaaactggacgtcgaaatggcgaaagcctctagtctgctcgcgggttctgtcgaacagatcggagaaagcgtcagcgagcttgatgatgttctgtcacgcgtacgagcctaa

SEQ ID NO: 8546 - DNA, 741 bp, Escherichia coli P0299917.10
atgtttggaaacgcatttggcgttaaaaaacgccgcagcgatgaagcggagaaaccattctggatctcctatgccgatttgatgactgccatgatggtgttatttctggtcgttatggttgcgtcgctgagttccgttacacagcgtattcaacgtgcggagcaaggcgaaaaagcaagggggcaggatatttccagattgtgtgagcgcctggaactgcatgcccgcaacgtgaacaaaaccattgtggtggattgccatgataaccgtatcagctttggcgaagccgggcgtttcgatcacaaccaatttttcctgaacgctgaggggcaaaaagcgttgcaggatgtggttcctcttgtgctggaagcgtccaacagtgaagaaggtaaaaagtggtttaagcagatcgttattgaagggtttaccgacaccgatggttcgtacttatacaacctgcatctctccctgcaacgctctgaatgggtaatgtgtagtttgctcgatagccgcagtcctctgcaaaaaaatatctccgcagaacaacagctccaaatccgtaaacttttcctcgcaggtggcgtctccttcaataatgcgaaggaaagcaaggaagccagccgccgggtcgagttgcgcatgcagttcttcgggcttaaagataaacgtgataaggccgatgaggtggattttccccccgtcgtcaataaagaagtgtgccagttggtaatgcccctatga

SEQ ID NO: 8547 - DNA, 1515 bp, Escherichia coli P0299917.10
atgcggctggcggcactgcgtcgctttcgccttgcacaagaactcacagaacgagagtggcggatggtgttttatggcctcgccgataatgatccgtcatatcctgaccagcccgtactgctggaggatgatacgtttttccccagagtaagcagtgcaatcaaaaaacgtcttgaaaccaaaacgttgaaacgccgggactgggcagcactttgttcaagctattttgcctaccagcacgaatcacccgagacaaacccgcactggtgcgtactgcgtgggcatatcgctcagggttacctggtggtgaaagccgccatacgacgagaaaaatcgtggatgaaaaccattgagttttatcacgacatttttaccccgcaagcgggaggcgtgatctccaggcagttacttgcaggtgagagcaattcactctcgtcattagagaaaatcgcgcaaatccctgatagcagttggttatggaggcgcattttcacggtgcttttagcgcaactggacacgctcgacgatccgcagtttctggaaaaaattagctggttgttaggtttagctgcgcagtgggtacgtttccgtgatgacatcatgactgcgaccctgactcgctattaccattctggctatcgcgatcaggcacattcagcgttgaagcaggccgcgctggaatactgggataacccccaactgaaaagccagcagaataaatggcatcagtatgtctccgagccggttgctgcaatggtccggggctggttagcaaaacaggacctgacacatttctttgaactgctgcgaggtaatggcgatgtcgatcaggctcgactgcactactggctgcgtttcgccaatcagatgggatttactcgtatcgtcatggggtctgatgcctggcaagatcctggtagcgattttgtgaaattccgcgaggagaataagggacgattgagttacttacgaggcggacgtaactttgataacgccatgattatgcagatcaacgattatctatttgtcgagttttccgggacagggaatgcaatgtacgcctatcgaataggtcacgcgccatttaaccctgaatcacgcacgcttgacatcaatattcatctaaaagataaggggcgctgtgcactcagattgccacatacaccgcgcgctgaggggtataacaaagtccgaatcaccggctggatgttgaaatacgacgacgagctgcgtcagttgggcattcggtggatggcggaagaacccgtcaagtttgtcgataagaaagcgtcctcccccgtttctctgtctgccatcaaaatcatcaatccgttgcgtgatacggctatacagcacctggttgaaggtagttcatgtatcgtcagcgataatcgacaaaaaggtggcgtgctgtccgtacagctcaatacacctgacgacacaatagaaagagaattgttgcgactaggctttgcgcctgtggctaaagaaccgcatcgttactggatcaaataa

SEQ ID NO: 8548 - DNA, 3243 bp, Escherichia coli P0299917.10
atgctgaaacgtctgttaagtagactgacgggtaaccgtcagcagatagaacgccatcttaggaatcagtatcaggttgaggaaaacggactcagctttcctctatcgctggttgatgattcgcagctttggacactggcatcctggcttgagcaactggctgaagaagactatctgatatcgctgacagcccggtggttgttgagttgggacgcattgtatcgcctgctggaagatgaggatcatgccagcagcctgcctcttatcagtgtacctgaagtactgcctttacgcgcaagcctgagttcacgtggtgcgttaagcgatagcgattttcgcgtatggatttccgaatgggctacggttccagcccgcaagccgatccgtttcagtcgtaccggtgccattttaacgcacgataatcagcaatacctgttatcgcgggaaaactgggcgctcttacaggcaacagaacaactcagtgcgcagcaaattcagactcccggcgaaaccactaaccagctgggatgggccgctatccgcaaatgtgcgaaactcgccgccgcaaaatttgatgattatttagaaaaaacgcacgtcgtcaaaccgacttcattgtcattacgtctgcgtaaagcaacagttgccgataccgcagttatcgaaattgaacctcatttcgaggaccagccagctaactggctgggcagttttgacaagaactcgcaggttcacgatagctaccgcatccccggagagaatggcgaactcagccacgtcatcatccctcccgaagtgaaagaagtcctgaattcaatacactcgatcccaggtcgtcgagtggcaggaagtgaagcgctttcctttgttcgaaatccctatacatttttgggtgaagatgctgccggtgttattgcccccgaagaacatgaacaggcgttgtttgatgccaaaattttctttcatcatttcaggttgatgccgcaactgaatgctgaaaataagatcgcggaggttacgctggtacttgaacctgtttcacctgttccccagccagaaatcacttttgtgttctcagcgccctgggagcttgaaaaattcatacaacaactcggtattagcgtcgctgcacagatgcctgccggttcatggcaaggttacgagctggaattaagtcagttcactgaacagcagtggcacgattgccaggcactgctaacccgctggcagcaagaaattgaaggaaaagaatttagcgatgtgctggatattgcgaagtatggcgatcgggtgattggcattggtgaatttgaaaaaatctcctctccctggctgacgaaagcgcatagtgagaactggattcctgatgacatcgatttctccgcattttcagtcgaaacactggctggctggcaacctgaaaatcttcaccatttcgatgaactgcaggagagaataactcaggcagaagccgctgatgaaacgcatatcaccgcaccatggaatgacagccaattaccgttggatgcagctaaaaccttcagtaagcactgggaaaaacagcaaagcactgcaaatgaatctcaaggtaacgttgcagataaaacggcccgagccgtactcaaaattgagcagaatattgaagaagcggcctacatcaaacagcgccgcaattcactcctcaatgcgcgtcatgccgagcctgaaattcctctgagccttaaagagcatatccgactcaaagaccatcagcgtgaaggcgtagcctggctccagcaactcttccttcgttcacctgaggaaaccgcaggttgcctgctggcggatgatatggggcttgggaaaacgctgcaaattctgagcttcctggtatggttcattgaaaaattcccgcaagaaccgccaagtctcattgttgctcccgtctctcttttagataactgggaacgtgagctggataatttcttctataccgcaggaataccggtattgaaattgtatggcgagaccattaaagcggtgaaatatcccaaacaggctatccctgctcatctgcaatctcaagggatcaaaaacctgcttaaacctggctggcaaggtgaggcgaaaatcatcctgacgacctacgaaacgcttcgcgaccaagagttttctctggcgcgccagccgtggtctattatggtgtgcgacgaggcacaaaaaataaaaaacccagcagcgttaatcacccatgcggccaacgcggtacaagccaggtttaaagtggcatgtacaggaacgccagtcgaaaacacacttgtcgacctgtggagcttatttgattttgcccagcctgggcttttaggggcgttaaatgaatttggtaaacattatgttcgtcctatcgagaacgaaactggccgtgatacgggacgactagagagattacgagcgctgattgaaccccagacattgcgccgaaccaaagaagaggttgcgcgtgatttaccacagaaaattgaagtggaaagctgcaagcaattgacgttgtctggcgtgcaaaaacagctctacctttcgtctgttgcaaattggcaacaacagcaagcactgagcgaagggatgcagcaggccggaaccggtatgttaggcttgttacaccgactgaaactcatctgcgcaccccctgcggtagttaatccagagccacgttttcgtgataactcacccaagcttaactggctgctgaaaatactcgcagaaataaagcataccacgaaagataaggtcattatttttacggagcttcgagatttacaacgcgaacttcaacatgcgatccaccaaaagtttggtttccgccctgtcattatcaatggtgataccagcactaaaagtcatagccaaaatagccgccaacgcctgattgatgattttcaggctcagcctgggtttggggtgattattctctctacggttgccgtcggattcggcgttaacgtccagaaagccaatcatgttattcatttcacccgctgctggaacccagccaaagaagatcaggcaacagaccgggcgtaccgaattgggcaaactaaagatgtgtatgtctattacccgacggtgagagacactgaaatcaccacatttgaagaaacactggatgaccttctgcagcgtcgacgtgcattggccagagatatgctctgcgctactcccgatttgagtggtgcggattttgaggccattttgaagggggcttaa

SEQ ID NO: 8549 - DNA, 2190 bp, Escherichia coli P0299917.2
atgctctggcttgattcttttttattggtgcttacctcagtacaaccttatatggtaccggcaaccgttatcggcattgtcagtgttgcatttatcatttttacgctgttttatctttttagagcggttaaaattgttaacggtctggaaaaatataaacagtcaattaatagcatcaaaaataatgagcctgataatcaacttcagcatctgcagaatttgtttgtacagcctgagttaaagcacgcctggagtgaattcaaagaatcgttgcactcacaatatgagctggaggacggggaagagaaaatcgtccgtattagggctacagcaccaagcgccagcttcttctcagagcaacaactggtcgatattccgctgaacaccgaattatttaaacacctacccggtattctgactggcgtggggattatcggcaccttctacggcctgatgattggtctcaagcacttcgaccccagcacacctgagcaggtcaccagtagcgtcaataatctgctgcatgatgtgttatacgcgttcctcggttcagcatttgcaattacgttctctatccttatcacctggctggagaaattctatctggcgaaatgctacaaaaatctggaaaagttcaccgctgagcttgattccctctacgacagcggcgttggcgaggagtaccttgcatcactggtaaaatccagtaatgaaagcgcgacccaggcacgccatctgaaagagagcctggttaccgatttacgcgatatgttgctgcatctggccaacagccagaaagtggaaaacgagcggctggcgaccaccctcagcaccacctatcgcgaaacaggacaacagtttgccgagcaagtcagcggtgcgattgaaaacagcctgaaatcaccgctggataaaatagcgggcgcggttcagaccgccagtggcgatcaaagcggcatggtacaaaacatgctgcaggatgtgctgaccgcgtttatggcgaaactcgacaccacctttggtcagcagtttactagtctcaacgaaatgatggggcaaaccgttggcgctattcagaccatgcaaaccggtttctccgcgttattacaggacatgcgtcaagtaagcgatgattcccgccagggcagcgcgcagctcatcgagcaactgttatcagagatgaaatctggccagcaagctctgcaggctggcatgaatgacatgctcaccagccttcaggcctcagtggcgaaaattggcgcagaaggtgaaggtgccggtgaacgtatggctcgccaaatggaaaaaatgttcgccgatagcgaagcgcgagaaaaggcccaagcagaacatatggctgcctttgttgaagccattcagaattcagtgcagcagggacaaagcgctacaatggaaaaaatggcagcctctgtcggtgcgctaggtgaacaactggggagcctgtttggacagattgataaaggtcagcaacagatttcagcaaatcagcaagcgaatcagcagtccctgcacgaacagactcagcgggtaatgagtgaggtagacgatcagattaaacaattggtcgaaactgttgccagccagcatcagggaacaactgaaacacttcgtttactcgcagaacaaactaaccggcagattcaggatatgcaaactggcgcggacaaaatgcgtctggcagccgagcgctttgaacatgctggtgatcgagtgtcggaagcaaaccaccttaccgctgacgtgctgaataaagcgcaatcggcagggtcatcactttcccttgccaccagcgagctcacctccgttgtggctgattatcgtaacaatcgggaagcggttagcaaatccattgccatgctggagttgctcgccgcaaatacgcagtcagaacaaaccacgcgcaaccaattcattgccgatcttaagcagcacggtgaacgcctgcaaagctataaccgggaagcacaggcctttatggaaaatgtcagtgacgtgctcgggaaaggatttgaggacttctctgaaggtgtttcacgcagcctggataaaacgctgggcaaactggacgtcgaaatggcgaaagcctctagtctgctcgcgggttctgtcgaacagatcggagaaagcgtcagcgagcttgatgatgttctgtcacgcgtacgagcctaa

SEQ ID NO: 8550 - DNA, 741 bp, Escherichia coli P0299917.2; identical to SEQ ID NO: 8546

SEQ ID NO: 8551 - DNA, 1515 bp, Escherichia coli P0299917.2
atgcggctggcggcactgcgtcgctttcgccttgcacaagaactcacagaacgagagtggcggatggtgttttatggcctcgccgataatgatccgtcatatcctgaccagcccgtactgctggaggatgatacgtttttccccagagtaagcagtgcaatcaaaaaacgtcttgaaaccaaaacgttgaaacgccgggactgggcagcactttgttcaagctattttgcctaccagcacgaatcccccgagacaaacccgcactggtgcgtactgcgtgggcatatcgctcagggttacctggtggtgaaagccgccatacgacgagaaaaatcgtggatgaaaaccattgagttttatcacgacatttttaccccgcaagcgggaggcgtgatctccaggcagttacttgcaggtgagagcaattcactctcgtcattagagaaaatcgcgcaaatccctgatagcagttggttatggaggcgcattttcacggtgcttttagcgcaactggacacgctcgacgatccgcagtttctggaaaaaattagctggttgttaggtttagctgcgcagtgggtacgtttccgtgatgacatcatgactgcgaccctgactcgctattaccattctggctatcgcgatcaggcacattcagcgttgaagcaggccgcgctggaatactgggataacccccaactgaaaagccagcagaataaatggcatcagtatgtctccgagccggttgctgcaatggtccggggctggttagcaaaacaggacctgacacatttctttgaactgctgcgaggtaatggcgatgtcgatcaggctcgactgcactactggctgcgtttcgccaatcagatgggatttactcgtatcgtcatggggtctgatgcctggcaagatcctggtagcgattttgtgaaattccgcgaggagaataagggacgattgagttacttacgaggcggacgtaactttgataacgccatgattatgcagatcaacgattatctatttgtcgagttttccgggacagggaatgcaatgtacgcctatcgaataggtcacgcgccatttaaccctgaatcacgcacgcttgacatcaatattcatctaaaagataaggggcgctgtgcactcagattgccacatacaccgcgcgctgaggggtataacaaagtccgaatcaccggctggatgttgaaatacgacgacgagctgcgtcagttgggcattcggtggatggcggaagaacccgtcaagtttgtcgataagaaagcgtcctcccccgtttctctgtctgccatcaaaatcatcaatccgttgcgtgatacggctatacagcacctggttgaaggtagttcatgtatcgtcagcgataatcgacaaaaaggtggcgtgctgtccgtacagctcaatacacctgacgacacaatagaaagagaattgttgcgactaggctttgcgcctgtggctaaagaaccgcatcgttactggatcaaataa

SEQ ID NO: 8552 - DNA, 3243 bp, Escherichia coli P0299917.2
atgctgaaacgtctgttaagtagactgacgggtaaccgtcagcagatagaacgccatcttaggaatcagtatcaggttgaggaaaacggactcagctttcctctatcgctggttgatgattcgcagctttggacactggcatcctggcttgagcaactggctgaagaagactatctgatatcgctgacagaccggtggttgttgagttgggacgcattgtatcgcctgctggaagatgaggatcatgccagcagcctgcctcttatcagtgtacctgaagtactgcctttacgcgcaagcctgagttcacgtggtgcgttaagcgatagcgattttcgcgtatggatttccgaatgggctacggttccagcccgcaagccgatccgtttcagtcgtaccggtgccattttaacgcacgataatcagcaatacctgttatcgcgggaaaactgggcgctcttacaggcaacagaacaactcagtgcgcagcaaattcagactcccggcgaaaccactaaccagctgggatgggccgctatccgcaaatgtgcgaaactcgccgccgcaaaatttgatgattatttagaaaaaacgcacgtcgtcaaaccgacttcattgtcattacgtctgcgtaaagcaacagttgccgataccgcagttatcgaaattgaacctcatttcgaggaccagccagctaactggctgggcagttttgacaagaactcgcaggttcacgatagctaccgcatccccggagagaatggcgaactcagccacgtcatcatccctcccgaagtgaaagaagtcctgaattcaatacactcgatcccaggtcgtcgagtggcaggaagtgaagcgctttcctttgttcgaaatccctatacatttttgggtgaagatgctgccggtgttattgcccccgaagaacatgaacaggcgttgtttgatgccaaaattttctttcatcatttcaggttgatgccgcaactgaatgctgaaaataagatcgcggaggttacgctggtacttgaccctgtttcacctgttccccagccagaaatcacttttgtgttctcagcgccctgggagcttgaaaaattcatacaacaactcggtattagcgtcgctgcacagatgcctgccggttcatggcaaggttacgagctggaattaagtcagttcactgaacagcagtggcacgattgccaggcactgctaacccgctggcagcaagaaattgaaggaaaagaatttagcgatgtgctggatattgcgaagtatggcgatcgggtgattggcattggtgaatttgaaaaaatctcctctccctggctgacgaaagcgcatagtgagaactggattcctgatgacatcgatttctccgcattttcagtcgaaacactggctggctggcaacctgaaaatcttcaccatttcgatgaactgcaggagagaataactcaggcagaagccgctgatgaaacgcatatcaccgcaccatggaatgacagccaattaccgttggatgcagctaaaaccttcagtaagcactgggaaaaacagcaaagcactgcaaatgaatctcaaggtaacgttgcagataaaacggcccgagccgtactcaaaattgagcagaatattgaagaagcggcctacatcaaacagcgccgcaattcactcctcaatgcgcgtcatgccgagcctgaaattcctctgagccttaaagagcatatccgactcaaagaccatcagcgtgaaggcgtagcctggctccagcaactcttccttcgttcacctgaggaaaccgcaggttgcctgctggcggatgatatggggcttgggaaaacgctgcaaattctgagcttcctggtatggttcattgaaaaattcccgcaagaaccgccaagtctcattgttgctcccgtctctcttttagataactgggaacgtgagctggataatttcttctataccgcaggaataccggtattgaaattgtatggcgagaccattaaagcggtgaaatatcccaaacaggctatccctgctcatctgcaatctcaagggatcaaaaacctgcttaaacctggctggcaaggtgaggcgaaaatcatcctgacgacctacgaaacgcttcgcgaccaagagttttctctggcgcgccagccgtggtctattatggtgtgcgacgaggcacaaaaaataaaaaacccagcagcgttaatcacccatgcggccaacgcggtacaagccaggtttaaagtggcatgtacaggaacgccagtcgaaaacacacttgtcgacctgtggagcttatttgattttgcccagcctgggcttttaggggcgttaaatgaatttggtaaacattatgttcgtcctatcgagaacgaaactggccgtgatacgggacgactagagagattacgagcgctgattgaaccccagacattgcgccgaaccaaagaagaggttgcgcgtgatttaccacagaaaattgaagtggaaagctgcaagcaattgacgttgtctggcgtgcaaaaacagctctacctttcgtctgttgcaaattggcaacaacagcaagcactgagcgaagggatgcagcaggccggaaccggtatgttaggcttgttacaccgactgaaactcatctgcgcacaccctgcggtagttaatccagagccacgttttcgtgataactcacccaagcttaactggctgctgaaaatactcgcagaaataaagcataccacgaaagataaggtcattatttttacggagcttcgagatttacaacgcgaacttcaacatgcgatccaccaaaagtttggtttccgccctgtcattatcaatggtgataccagcactaaaagtcatagccaaaatagccgccaacgcctgattgatgattttcaggctcagcctgggtttggggtgattattctctctacggttgccgtcggattcggcgttaacgtccagaaagccaatcatgttattcatttcacccgctgctggaacccagccaaagaagatcaggcaacagaccgggcgtaccgaattgggcaaactaaagatgtgtatgtctattacccgacggtgagagacactgaaatcaccacatttgaagaaacactggatgaccttctgcagcgtcgacgtgcattggccagagatatgctctgcgctactcccgatttgagtggtgcggattttgaggccattttgaagggggcttaa

SEQ ID NO: 8553 - DNA, 2000 bp, Escherichia coli P0299917.3
ctgataatcaacttcagcatctgcagaatttgtttgtacagcctgagttaaagcacgcctggagtgaattcaaagaatcgttgcactcacaatatgagctggaggacggggaagagaaaatcgtccgtattagggctacagcaccaagcgccagcttcttctcagagcaacaactggtcgatattccgctgaacaccgaattatttaaacacctacccggtattctgactggcgtggggattatcggcaccttctacggcctgatgattggtctcaagcacttcgaccccagcacacctgagcaggtcaccagtagcgtcaataatctgctgcatgatgtgttatacgcgttcctcggttcagcatttgcaattacgttctctatccttatcacctggctggagaaattctatctggcgaaatgctacaaaaatctggaaaagttcaccgctgagcttgattccctctacgacagcggcgttggcgaggagtaccttgcatcactggtaaaatccagtaatgaaagcgcgacccaggcacgccatctgaaagagagcctggttaccgatttacgcgatatgttgctgcatctggccaacagccagaaagtggaaaacgagcggctggcgaccaccctcagcaccacctatcgcgaaacaggacaacagtttgccgagcaagtcagcggtgcgattgaaaacagcctgaaatcaccgctggataaaatagcgggcgcggttcagaccgccagtggcgatcaaagcggcatggtacaaaacatgctgcaggatgtgctgaccgcgtttatggcgaaactcgacaccacctttggtcagcagtttactagtctcaacgaaatgatggggcaaaccgttggcgctattcagaccatgcaaaccggtttctccgcgttattacaggacatgcgtcaagtaagcgatgattcccgccagggcagcgcgcagctcatcgagcaactgttatcagagatgaaatctggccagcaagctctgcaggctggcatgaatgacatgctcaccagccttcaggcctcagtggcgaaaattggcgcagaaggtgaaggtgccggtgaacgtatggctcgccaaatggaaaaaatgttcgccgatagcgaagcgcgagaaaaggcccaagcagaacatatggctgcctttgttgaagccattcagaattcagtgcagcagggacaaagcgctacaatggaaaaaatggcagcctctgtcggtgcgctaggtgaacaactggggagcctgtttggacagattgataaaggtcagcaacagatttcagcaaatcagcaagcgaatcagcagtccctgcacgaacagactcagcgggtaatgagtgaggtagacgatcagattaaacaattggtcgaaactgttgccagccagcatcagggaacaactgaaacacttcgtttactcgcagaacaaactaaccggcagattcaggatatgcaaactggcgcggacaaaatgcgtctggcagccgagcgctttgaacatgctggtgatcgagtgtcggaagcaaaccaccttaccgctgacgtgctgaataaagcgcaatcggcaggttcatcactttcccttgccaccagcgagctcacctccgttgtggctgattatcgtaacaatcgggaagcggttagcaaatccattgccatgctggagttgctcgccgcaaatacgcagtcagaacaaaccacgcgcaaccaattcattgccgatcttaagcagcacggtgaacgcctgcaaagctataaccgggaagcacaggcctttatggaaaatgtcagtgacgtgctcgggaaaggatttgaggacttctctgaaggtgtttcacgcagcctggataaaacgctgggcaaactggacgtcgaaatggcgaaagcctctagtctgctcgcgggttctgtcgaacagatcggagaaagcgtcagcgagcttgatgatgttctgtcacgcgtacgagcctaa

SEQ ID NO: 8554 - DNA, 741 bp, Escherichia coli P0299917.3; identical to SEQ ID NO: 8546

SEQ ID NO: 8555 - DNA, 1515 bp, Escherichia coli P0299917.3; identical to SEQ ID NO: 8547

SEQ ID NO: 8556 - DNA, 3243 bp, Escherichia coli P0299917.3
atgctgaaacgtctgttaagtagactgacgggtaaccgtcagcagatagaacgccatcttaggaatcagtatcaggttgaggaaaacggactcagctttcctctatcgctggttgatgattcgcagctttggacactggcatcctggcttgagcaactggctgaagaagactatctgatatcgctgacagaccggtggttgttgagttgggacgcattgtatcgcctgctggaagatgaggatcatgccagcagcctgcctcttatcagtgtacctgaagtactgcctttacgcgcaagcctgagttcacgtggtgcgttaagcgatagcgattttcgcgtatggatttccgaatgggctacggttccagcccgcaagccgatccgtttcagtcgtaccggtgccattttaacgcacgataatcagcaatacctgttatcgcgggaaaactgggcgctcttacaggcaacagaacaactcagtgcgcagcaaattcagactcccggcgaaaccactaaccagctgggatgggccgctatccgcaaatgtgcgaaactcgccgccgcaaaatttgatgattatttagaaaaaacgcacgtcgtcaaaccgacttcattgtcattacgtctgcgtaaagcaacagttgccgataccgcagttatcgaaattgaacctcatttcgaggaccagccagctaactggctgggcagttttgacaagaactcgcaggttcacgatagctaccgcatccccggagagaatggcgaactcagccacgtcatcatccctcccgaagtgaaagaagtcctgaattcaatacactcgatcccaggtcgtcgagtggcaggaagtgaagcgctttcctttgttcgaaatccctatacatttttgggtgaagatgctgccggtgttattgcccccgaagaacatgaacaggcgttgtttgatgccaaaattttctttcatcatttcaggttgatgccgcaactgaatgctgaaaataagatcgcggaggttacgctggtacttgaacctgtttcacctgttccccagccagaaatcacttttgtgttctcagcgccctgggagcttgaaaaattcatacaacaactcggtattagcgtcgctgcacagatgcctgccggttcatggcaaggttacgagctggaattaagtcagttcactgaacagcagtggcacgattgccaggcactgctaacccgctggcagcaagaaattgaaggaaaagaatttagcgatgtgctggatattgcgaagtatggcgatcgggtgattggcattggtgaatttgaaaaaatctcctctccctggctgacgaaagcgcatagtgagaactggattcctgatgacatcgatttctccgcattttcagtcgaaacactggctggctggcaacctgaaaatcttcaccatttcgatgaactgcaggagagaataactcaggcagaagccgctgatgaaacgcatatcaccgcaccatggaatgacagccaattaccgttggatgcagctaaaaccttcagtaagcactgggaaaaacagcaaagcactgcaaatgaatctcaaggtaacgttgcagataaaacggcccgagccgtactcaaaattgagcagaatattgaagaagcggcctacatcaaacagcgccgcaattcactcctcaatgcgcgtcatgccgagcctgaaattcctctgagccttaaagagcatatccgactcaaagaccatcagcgtgaaggcgtagcctggctccagcaactcttccttcgttcacctgaggaaaccgcaggttgcctgctggcggatgatatggggcttgggaaaacgctgcaaattctgagcttcctggtatggttcattgaaaaattcccgcaagaaccgccaagtctcattgttgctcccgtctctcttttagataactgggaacgtgagctggataatttcttctataccgcaggaataccggtattgaaattgtatggcgagaccattaaagcggtgaaatatcccaaacaggctatccctgctcatctgcaatctcaagggatcaaaaacctgcttaaacctggctggcaaggtgaggcgaaaatcatcctgacgacctacgaaacgcttcgcgaccaagagttttctctggcgcgccagccgtggtctattatggtgtgcgacgaggcacaaaaaataaaaaacccagcagcgttaatcacccatgcggccaacgcggtacaagccaggtttaaagtggcatgtacaggaacgccagtcgaaaacacacttgtcgacctgtggagcttatttgattttgcccagcctgggcttttaggggcgttaaatgaatttggtaaacattatgttcgtcctatcgagaacgaaactggccgtgatacgggacgactagagagattacgagcgctgattgaaccccagacattgcgccgaaccaaagaagaggttgcgcgtgatttaccacagaaaattgaagtggaaagctgcaagcaattgacgttgtctggcgtgcaaaaacagctctacctttcgtctgttgcaaattggcaacaacagcaagcactgagcgaagggatgcagcaggccggaaccggtatgttaggcttgttacaccgactgaaactcatctgcgcacaccctgcggtagttaatccagagccacgttttcgtgataactcacccaagcttaactggctgctgaaaatactcgcagaaataaagcataccacgaaagataaggtcattatttttacggagcttcgagatttacaacgcgaacttcaacatgcgatccaccaaaagtttggtttccgccctgtcattatcaatggtgataccagcactaaaagtcatagccaaaatagccgccaacgcctgattgatgattttcaggctcagcctgggtttggggtgattattctctctacggttgccgtcggattcggcgttaacgtccagaaagccaatcatgttattcatttcacccgctgctggaacccagccaaagaagatcaggcaacagaccgggcgtaccgaattgggcaaactaaagatgtgtatgtctattacccgacggtgagagacactgaaatcaccacatttgaagaaacactggatgaccttctgcagcgtcgacgtgcattggccagagatatgctctgcgctactcccgatttgagtggtgcggattttgaggccattttgaagggggcttaa

SEQ ID NO: 8557 - DNA, 2190 bp, Escherichia coli P0299917.4
atgctctggcttgattcttttttattggtgcttacctcagtacaaccttatatggtaccggcaaccgttatcggcattgtcagtgttgcatttatcatttttacgctgttttatctttttagagcggttaaaattgttaacggtctggaaaaatataaacagtcaattaatagcatcaaaaataatgagcctgataatcaacttcagcatctgcagaatttgtttgtacagcctgagttaaagcacgcctggagtgaattcaaagaatcgttgcactcacaatatgagctggaggacggggaagagaaaatcgtccgtattagggctacagcaccaagcgccagcttcttctcagagcaacaactggtcgatattccgctgaacaccgaattatttaaacacctacccggtattctgactggcgtggggattatcggcaccttctacggcctgatgattggtctcaagcacttcgaccccagcacacctgagcaggtcaccagtagcgtcaataatctgctgcatgatgtgttatacgcgttcctcggttcagcatttgcaattacgttctctatccttatcacctggctggagaaattctatctggcgaaatgctacaaaaatctggaaaagttcaccgctgagcttgattccctctacgacagcggcgttggcgaggagtaccttgcatcactggtaaaatccagtaatgaaagcgcgacccaggcacgccatctgaaagagagcctggttaccgatttacgcgatatgttgctgcatctggccaacagccagaaagtggaaaacgagcggctggcgaccaccctcagcaccacctatcgcgaaacaggacaacagtttgccgagcaagtcagcggtgcgattgaaaacagcctgaaatcaccgctggataaaatagcgggcgcggttcagaccgccagtggcgatcaaagcggcatggtacaaaacatgctgcaggatgtgctgaccgcgtttatggcgaaactcgacaccacctttggtcagcagtttactagtctcaacgaaatgatggggcaaaccgttggcgctattcagaccatgcaaaccggtttctccgcgttattacaggacatgcgtcaagtaagcgatgattcccgccagggcagcgcgcagctcatcgagcaactgttatcagagatgaaatctggccagcaagctctgcaggctggcatgaatgacatgctcaccagccttcaggcctcagtggcgaaaattggcgcagaaggtgaaggtgccggtgaacgtatggctcgccaaatggaaaaaatgttcgccgatagcgaagcgcgagaaaaggcccaagcagaacatatggctgcctttgttgaagccattcagaattcagtgcagcagggacaaagcgctacaatggaaaaaatggcagcctctgtcggtgcgctaggtgaacaactggggagcctgtttggacagattgataaaggtcagcaacagatttcagcaaatcagcaagcgaatcagcagtccctgcacgaacagactcagcgggtaatgagtgaggtagacgatcagattaaacaattggtcgaaactgttgccagccagcatcagggaacaactgaaacacttcgtttactcgcagaacaaactaaccggcagattcaggatatgcaaactggcgcggacaaaatgcgtctggcagccgagcgctttgaacatgctggggatcgagtgtcggaagcaaaccaccttaccgctgacgtgctgaataaagcgcaatcggcaggttcatcactttcccttgccaccagcgagctcacctccgttgtggctgattatcgtaacaatcgggaagcggttagcaaatccattgccatgctggagttgctcgccgcaaatacgcagtcagaacaaaccacgcgcaaccaattcattgccgatcttaagcagcacggtgaacgcctgcaaagctataaccgggaagcacaggcctttatggaaaatgtcagtgacgtgctcgggaaaggatttgaggacttctctgaaggtgtttcacgcagcctggataaaacgctgggcaaactggacgtcgaaatggcgaaagcctctagtctgctcgcgggttctgtcgaacagatcggagaaagcgtcagcgagcttgatgatgttctgtcacgcgtacgagcctaa

SEQ ID NO: 8558 - DNA, 741 bp, Escherichia coli P0299917.4; identical to SEQ ID NO: 8546

SEQ ID NO: 8559 - DNA, 1515 bp, Escherichia coli P0299917.4
atgcggctggcggcactgcgtcgctttcgccttgcacaagaactcacagaacgagagtggcggatggtgttttatggcctcgccgataatgatccgtcatatcctgaccagcccgtactgctggaggatgatacgtttttccccagagtaagcagtgcaatcaaaaaacgtcttgaaaccaaaacgttgaaacgccgggactgggcagcactttgttcaagctattttgcctaccagcacgaatcacccgagacaaacccgcactggtgcgtactgcgtgggcatatcgctcagggttacctggtggtgaaagccgccatacgacgagaaaaatcgtggatgaaaaccattgagttttatcacgacatttttaccccgcaagcgggaggcgtgatctccaggcagttacttgcaggtgagagcaattcactctcgtcattagagaaaatcgcgcaaatccctgatagcagttggttatggaggcgcattttcacggtgcttttagcgcaactggacacgctcgacgatccgcagtttctggaaaaaattagctggttgttaggtttagctgcgcagtgggtacgtttccgtgatgacatcatgactgcgaccctgactcgctattaccattctggctatcgcgatcaggcacattcagcgttgaagcaggccgcgctggaatactgggataacccccaactgaaaagccagcagaataaatggcatcagtatgtctccgagccggttgctgcaatggtccggggctggttagcaaaacaggacctgacacatttctttgaactgctgcgaggtaatggcgatgtcgatcaggctcgactgcactactggctgcgtttcgccaatcagatgggatttactcgtatcgtcatggggtctgatgcctggcaagatcctggtagcgattttgtgaaattccgcgaggagaataagggacgattgagttacttacgaggcggacgtaactttgataacgccatgattatgcagatcaacgattatctatttgtcgagttttccgggacagggaatgcaatgtacgcctatcgaataggtcacgcgccatttaaccctgaatcacgcacgcttgacatcaatattcatctaaaagataaggggcgctgtgcactcagattgccacatacaccgcgcgctgaggggtataacaaagtccgaatcaccggctggatgttgaaatacgacgacgagctgcgtcagttgggcattcggtggatggcggaagaacccgtcaagtttgtcgataagaaagcgtccccccccgtttctctgtctgccatcaaaatcatcaatccgttgcgtgatacggctatacagcacctggttgaaggtagttcatgtatcgtcagcgataatcgacaaaaaggtggcgtgctgtccgtacagctcaatacacctgacgacacaatagaaagagaattgttgcgactaggctttgcgcctgtggctaaagaaccgcatcgttactggatcaaataa

SEQ ID NO: 8560 - DNA, 3243 bp, Escherichia coli P0299917.4
atgctgaaacgtctgttaagtagactgacgggtaaccgtcagcagatagaacgccatcttaggaatcagtatcaggttgaggaaaacggactcagctttcctctatcgctggttgatgattcgcagctttggacactggcatcctggcttgagcaactggctgaagaagactatctgatatcgctgacagaccggtggttgttgagttgggacgcattgtatcgcctgctggaagatgaggatcatgccagcagcctgcctcttatcagtgtacctgaagtactgcctttacgcgcaagcctgagttcacgtggtgcgttaagcgatagcgattttcgcgtatggatttccgaatgggctacggttccagcccgcaagccgatccgtttcagtcgtaccggtgccattttaacgcacgataatcagcaatacctgttatcgcgggaaaactgggcgctcttacaggcaacagaacaactcagtgcgcagcaaattcagactcccggcgaaaccactaaccagctgggatgggccgctatccgcaaatgtgcgaaactcgccgccgcaaaatttgatgattatttagaaaaaacgcacgtcgtcaaaccgacttcattgtcattacgtctgcgtaaagcaacagttgccgataccgcagttatcgaaattgaacctcatttcgaggaccagccagctaactggctgggcagttttgacaagaactcgcaggttcacgatagctaccgcatccccggagagaatggcgaactcagccacgtcatcatccctcccgaagtgaaagaagtcctgaattcaatacactcgatcccaggtcgtcgagtggcaggaagggaagcgctttcctttgttcgaaatccctatacatttttgggtgaagatgctgccggtgttattgcccccgaagaacatgaacaggcgttgtttgatgccaaaattttctttcatcatttcaggttgatgccgcaactgaatgctgaaaataagatcgcggaggttacgctggtacttgaacctgtttcacctgttccccagccagaaatcacttttgtgttctcagcgccctgggagcttgaaaaattcatacaacaactcggtattagcgtcgctgcacagatgcctgccggttcatggcaaggttacgagctggaattaagtcagttcactgaacagcagtggcacgattgccaggcactgctaacccgctggcagcaagaaattgaaggaaaagaatttagcgatgtgctggatattgcgaagtatggcgatcgggtgattggcattggtgaatttgaaaaaatctcctctccctggctgacgaaagcgcatagtgagaactggattcctgatgacatcgatttctccgcattttcagtcgaaacactggctggctggcaacctgaaaatcttcaccatttcgatgaactgcaggagagaataactcaggcagaagccgctgatgaaacgcatatcaccgcaccatggaatgacagccaattaccgttggatgcagctaaaaccttcagtaagcactgggaaaaacagcaaagcactgcaaatgaatctcaaggtaacgttgcagataaaacggcccgagccgtactcaaaattgagcagaatattgaagaagcggcctacatcaaacagcgccgcaattcactcctcaatgcgcgtcatgccgagcctgaaattcctctgagccttaaagagcatatccgactcaaagaccatcagcgtgaaggcgtagcctggctccagcaactcttccttcgttcacctgaggaaaccgcaggttgcctgctggcggatgatatggggcttgggaaaacgctgcaaattctgagcttcctggtatggttcattgaaaaattcccgcaagaaccgccaagtctcattgttgctcccgtctctcttttagataactgggaacgtgagctggataatttcttctataccgcaggaataccggtattgaaattgtatggcgagaccattaaagcggtgaaatatcccaaacaggctatccctgctcatctgcaatctcaagggatcaaaaacctgcttaaacctggctggcaaggtgaggcgaaaatcatcctgacgacctacgaaacgcttcgcgaccaagagttttctctggcgcgccagccgtggtctattatggtgtgcgacgaggcacaaaaaataaaaaacccagcagcgttaatcacccatgcggccaacgcggtacaagccaggtttaaagtggcatgtacaggaacgccagtcgaaaacacacttgtcgacctgtggagcttatttgattttgcccagcctgggcttttaggggcgttaaatgaatttggtaaacattatgttcgtcctatcgagaacgaaactggccgtgatacgggacgactagagagattacgagcgctgattgaaccccagacattgcgccgaaccaaagaagaggttgcgcgtgatttaccacagaaaattgaagtggaaagctgcaagcaattgacgttgtctggcgtgcaaaaacagctctacctttcgtctgttgcaaattggcaacaacagcaagcactgagcgaagggatgcagcaggccggaaccggtatgttaggcttgttacaccgactgaaactcatctgcgcacaccctgcggtagttaatccagagccacgttttcgtgataactcacccaagcttaactggctgctgaaaatactcgcagaaataaagcataccacgaaagataaggtcattatttttacggagcttcgagatttacaacgcgaacttcaacatgcgatccaccaaaagtttggtttccgccctgtcattatcaatggtgataccagcactaaaagtcatagccaaaatagccgccaacgcctgattgatgattttcaggctcagcctgggtttggggtgattattctctctacggttgccgtcggattcggcgttaacgtccagaaagccaatcatgttattcatttcacccgctgctggaacccagccaaagaagatcaggcaacagaccgggcgtaccgaattgggcaaactaaagatgtgtatgtctattacccgacggtgagagacactgaaatcaccacatttgaagaaacactggatgaccttctgcagcgtcgacgtgcattggccagagatatgctctgcgctactcccgatttgagtggtgcggattttgaggccattttgaagggggcttaa

SEQ ID NO: 8561 - DNA, 2190 bp, Escherichia coli P0299917.5
atgctctggcttgattcttttttattggtgcttacctcagtacaaccttatatggtaccggcaaccgttatcggcattgtcagtgttgcatttatcatttttacgctgttttatctttttagagcggttaaaattgttaacggtctggaaaaatataaacagtcaattaatagcatcaaaaataatgagcctgataatcaacttcagcatctgcagaatttgtttgtacagcctgagttaaagcacgcctggagtgaattcaaagaatcgttgcactcacaatatgagctggaggacggggaagagaaaatcgtccgtattagggctacagcaccaagcgccagcttcttctcagagcaacaactggtcgatattccgctgaacaccgaattatttaaacacctacccggtattctgactggcgtggggattatcggcaccttctacggcctgatgattggtctcaagcacttcgaccccagcacacctgagcaggtcaccagtagcgtcaataatctgctgcatgatgtgttatacgcgttcctcggttcagcatttgcaattacgttctctatccttatcacctggctggagaaattctatctggcgaaatgctacaaaaatctggaaaagttcaccgctgagcttgattccctctacgacagcggcgttggcgaggagtaccttgcatcactggtaaaatccagtaatgaaagcgcgacccaggcacgccatctgaaagagagcctggttaccgatttacgcgatatgttgctgcatctggccaacagccagaaagtggaaaacgagcggctggcgaccaccctcagcaccacctatcgcgaaacaggacaacagtttgccgagcaagtcagcggtgcgattgaaaacagcctgaaatcaccgctggataaaatagcgggcgcggttcagaccgccagtggcgatcaaagcggcatggtacaaaacatgctgcaggatgtgctgaccgcgtttatggcgaaactcgacaccacctttggtcagcagtttactagtctcaacgaaatgatggggcaaaccgttggcgctattcagaccatgcaaaccggtttctccgcgttattacaggacatgcgtcaagtaagcgatgattcccgccagggcagcgcgcagctcatcgagcaactgttatcagagatgaaatctggccagcaagctctgcaggctggcatgaatgacatgctcaccagccttcaggcctcagtggcgaaaattggcgcagaaggggaaggtgccggtgaacgtatggctcgccaaatggaaaaaatgttcgccgatagcgaagcgcgagaaaaggcccaagcagaacatatggctgcctttgttgaagccattcagaattcagtgcagcagggacaaagcgctacaatggaaaaaatggcagcctctgtcggtgcgctaggtgaacaactggggagcctgtttggacagattgataaaggtcagcaacagatttcagcaaatcagcaagcgaatcagcagtccctgcacgaacagactcagcgggtaatgagtgaggtagacgatcagattaaacaattggtcgaaactgttgccagccagcatcagggaacaactgaaacacttcgtttactcgcagaacaaactaaccggcagattcaggatatgcaaactggcgcggacaaaatgcgtctggcagccgagcgctttgaacatgctggtgatcgagtgtcggaagcaaaccaccttaccgctgacgtgctgaataaagcgcaatcggcagggtcatcactttcccttgccaccagcgagctcacctccgttgtggctgattatcgtaacaatcgggaagcggttagcaaatccattgccatgctggagttgctcgccgcaaatacgcagtcagaacaaaccacgcgcaaccaattcattgccgatcttaagcagcacggtgaacgcctgcaaagctataaccgggaagcacaggcctttatggaaaatgtcagtgacgtgctcgggaaaggatttgaggacttctctgaaggtgtttcacgcagcctggataaaacgctgggcaaactggacgtcgaaatggcgaaagcctctagtctgctcgcgggttctgtcgaacagatcggagaaagcgtcagcgagcttgatgatgttctgtcacgcgtacgagcctaa

SEQ ID NO: 8562 - DNA, 741 bp, Escherichia coli P0299917.5; identical to SEQ ID NO: 8546

SEQ ID NO: 8563 - DNA, 1515 bp, Escherichia coli P0299917.5; identical to SEQ ID NO: 8547

SEQ ID NO: 8564 - DNA, 3243 bp, Escherichia coli P0299917.5
atgctgaaacgtctgttaagtagactgacgggtaaccgtcagcagatagaacgccatcttaggaatcagtatcaggttgaggaaaacggactcagctttcctctatcgctggttgatgattcgcagctttggacactggcatcctggcttgagcaactggctgaagaagactatctgatatcgctgacagaccggtggttgttgagttgggacgcattgtatcgcctgctggaagatgaggatcatgccagcagcctgcctcttatcagtgtacctgaagtactgcctttacgcgcaagcctgagttcacgtggtgcgttaagcgatagcgattttcgcgtatggatttccgaatgggctacggttccagcccgaaagccgatccgtttcagtcgtaccggtgccattttaacgcacgataatcagcaatacctgttatcgcgggaaaactgggcgctcttacaggcaacagaacaactcagtgcgcagcaaattcagactcccggcgaaaccactaaccagctgggatgggccgctatccgcaaatgtgcgaaactcgccgccgcaaaatttgatgattatttagaaaaaacgcacgtcgtcaaaccgacttcattgtcattacgtctgcgtaaagcaacagttgccgataccgcagttatcgaaattgaacctcatttcgaggaccagccagctaactggctgggcagttttgacaagaactcgcaggttcacgatagctaccgcatccccggagagaatggcgaactcagccacgtcatcatccctcccgaagtgaaagaagtcctgaattcaatacactcgatcccaggtcgtcgagtggcaggaagtgaagcgctttcctttgttcgaaatccctatacatttttgggtgaagatgctgccggtgttattgcccccgaagaacatgaacaggcgttgtttgatgccaaaattttctttcatcatttcaggttgatgccgcaactgaatgctgaaaataagatcgcggaggttacgctggtacttgaacctgtttcacctgttccccagccagaaatcacttttgtgttctcagcgccctgggagcttgaaaaattcatacaacaactcggtattagcgtcgctgcacagatgcctgccggttcatggcaaggttacgagctggaattaagtcagttcactgaacagcagtggcacgattgccaggcactgctaacccgctggcagcaagaaattgaaggaaaagaatttagcgatgtgctggatattgcgaagtatggcgatcgggtgattggcattggtgaatttgaaaaaatctcctctccctggctgacgaaagcgcatagtgagaactggattcctgatgacatcgatttctccgcattttcagtcgaaacactggctggctggcaacctgaaaatcttcaccatttcgatgaactgcaggagagaataactcaggcagaagccgctgatgaaacgcatatcaccgcaccatggaatgacagccaattaccgttggatgcagctaaaaccttcagtaagcactgggaaaaacagcaaagcactgcaaatgaatctcaaggtaacgttgcagataaaacggcccgagccgtactcaaaattgagcagaatattgaagaagcggcctacatcaaacagcgccgcaattcactcctcaatgcgcgtcatgccgagcctgaaattcctctgagccttaaagagcatatccgactcaaagaccatcagcgtgaaggcgtagcctggctccagcaactcttccttcgttcacctgaggaaaccgcaggttgcctgctggcggatgatatggggcttgggaaaacgctgcaaattctgagcttcctggtatggttcattgaaaaattcccgcaagaaccgccaagtctcattgttgctcccgtctctcttttagataactgggaacgtgagctggataatttcttctataccgcaggaataccggtattgaaattgtatggcgagaccattaaagcggtgaaatatcccaaacaggctatccctgctcatctgcaatctcaagggatcaaaaacctgcttaaacctggctggcaaggtgaggcgaaaatcatcctgacgacctacgaaacgcttcgcgaccaagagttttctctggcgcgccagccgtggtctattatggtgtgcgacgaggcacaaaaaataaaaaacccagcagcgttaatcacccatgcggccaacgcggtacaagccaggtttaaagtggcatgtacaggaacgccagtcgaaaacacacttgtcgacctgtggagcttatttgattttgcccagcctgggcttttaggggcgttaaatgaatttggtaaacattatgttcgtcctatcgagaacgaaactggccgtgatacgggacgactagagagattacgagcgctgattgaaccccagacattgcgccgaaccaaagaagaggttgcgcgtgatttaccacagaaaattgaagtggaaagctgcaagcaattgacgttgtctggcgtgcaaaaacagctctacctttcgtctgttgcaaattggcaacaacagcaagcactgagcgaagggatgcagcaggccggaaccggtatgttaggcttgttacaccgactgaaactcatctgcgcacaccctgcggtagttaatccagagccacgttttcgtgataactcacccaagcttaactggctgctgaaaatactcgcagaaataaagcataccacgaaagataaggtcattatttttacggagcttcgagatttacaacgcgaacttcaacatgcgatccaccaaaagtttggtttccgccctgtcattatcaatggtgataccagcactaaaagtcatagccaaaatagccgccaacgcctgattgatgattttcaggctcagcctgggtttggggtgattattctctctacggttgccgtcggattcggcgttaacgtccagaaagccaatcatgttattcatttcacccgctgctggaacccagccaaagaagatcaggcaacagaccgggcgtaccgaattgggcaaactaaagatgtgtatgtctattacccgacggtgagagacactgaaatcaccacatttgaagaaacactggatgaccttctgcagcgtcgacgtgcattggccagagatatgctctgcgctactcccgatttgagtggtgcggattttgaggccattttgaagggggcttaa

SEQ ID NO: 8565 - DNA, 2190 bp, Escherichia coli P0299917.6; identical to SEQ ID NO: 8545

SEQ ID NO: 8566 - DNA, 741 bp, Escherichia coli P0299917.6; identical to SEQ ID NO: 8546

SEQ ID NO: 8567 - DNA, 1515 bp, Escherichia coli P0299917.6; identical to SEQ ID NO: 8547

SEQ ID NO: 8568 - DNA, 3243 bp, Escherichia coli P0299917.6; identical to SEQ ID NO: 8556

SEQ ID NO: 8569 - DNA, 2190 bp, Escherichia coli P0299917.7; identical to SEQ ID NO: 8545

SEQ ID NO: 8570 - DNA, 741 bp, Escherichia coli P0299917.7; identical to SEQ ID NO: 8546

SEQ ID NO: 8571 - DNA, 1515 bp, Escherichia coli P0299917.7
atgcggctggcggcactgcgtcgctttcgccttgcacaagaactcacagaacgagagtggcggatggtgttttatggcctcgccgataatgatccgtcatatcctgaccagcccgtactgctggaggatgatacgtttttccccagagtaagcagtgcaatcaaaaaacgtcttgaaaccaaaacgttgaaacgccgggactgggcagcactttgttcaagctattttgcctaccagcacgaatcacccgagacaaacccgcactggtgcgtactgcgtgggcatatcgctcagggttacctggtggtgaaagccgccatacgacgagaaaaatcgtggatgaaaaccattgagttttatcacgacatttttaccccgcaagcgggaggcgtgatctccaggcagttacttgcaggtgagagcaattcactctcgtcattagagaaaatcgcgcaaatccctgatagcagttggttatggaggcgcattttcacggtgcttttagcgcaactggacacgctcgacgatccgcagtttctggaaaaaattagctggttgttaggtttagctgcgcagtgggtacgtttccgtgatgacatcatgactgcgaccctgactcgctattaccattctggctatcgcgatcaggcacattcagcgttgaagcaggccgcgctggaatactgggataacccccaactgaaaagccagcagaataaatggcatcagtatgtctccgagccggttgctgcaatggtccggggctggttagcaaaacaggacctgacacatttctttgaactgctgcgaggtaatggcgatgtcgatcaggctcgactgcactactggctgcggttcgccaatcagatgggatttactcgtatcgtcatggggtctgatgcctggcaagatcctggtagcgattttgtgaaattccgcgaggagaataagggacgattgagttacttacgaggcggacgtaactttgataacgccatgattatgcagatcaacgattatctatttgtcgagttttccgggacagggaatgcaatgtacgcctatcgaataggtcacgcgccatttaaccctgaatcacgcacgcttgacatcaatattcatctaaaagataaggggcgctgtgcactcagattgccacatacaccgcgcgctgaggggtataacaaagtccgaatcaccggctggatgttgaaatacgacgacgagctgcgtcagttgggcattcggtggatggcggaagaacccgtcaagtttgtcgataagaaagcgtcctcccccgtttctctgtctgccatcaaaatcatcaatccgttgcgtgatacggctatacagcacctggttgaagggagttcatgtatcgtcagcgataatcgacaaaaaggtggcgtgctgtccgtacagctcaatacacctgacgacacaatagaaagagaattgttgcgactaggctttgcgcctgtggctaaagaaccgcatcgttactggatcaaataa

SEQ ID NO: 8572 - DNA, 3243 bp, Escherichia coli P0299917.7; identical to SEQ ID NO: 8556

SEQ ID NO: 8573 - DNA, 2190 bp, Escherichia coli P0299917.9; identical to SEQ ID NO: 8545

SEQ ID NO: 8574 - DNA, 741 bp, Escherichia coli P0299917.9; identical to SEQ ID NO: 8546

SEQ ID NO: 8575 - DNA, 1515 bp, Escherichia coli P0299917.9; identical to SEQ ID NO: 8547

SEQ ID NO: 8576 - DNA, 3243 bp, Escherichia coli P0299917.9
atgctgaaacgtctgttaagtagactgacgggtaaccgtcagcagatagaacgccatcttaggaatcagtatcaggttgaggaaaacggactcagctttcctctatcgctggttgatgattcgcagctttggacactggcatcctggcttgagcaactggctgaagaagactatctgatatcgctgacagaccggtggttgttgagttgggacgcattgtatcgcctgctggaagatgaggatcatgccagcagcctgcctcttatcagtgtacctgaagtactgcctttacgcgcaagcctgagttcacgtggtgcgttaagcgatagcgattttcgcgtatggatttccgaatgggctacggttccagcccgcaagccgatccgtttcagtcgtaccggtgccattttaacgcacgataatcagcaatacctgttatcgcgggaaaactgggcgctcttacaggcaacagaacaactcagtgcgcagcaaattcagactcccggcgaaaccactaaccagctgggatgggccgctatccgcaaatgtgcgaaactcgccgccgcaaaatttgatgattatttagaaaaaacgcacgtcgtcaaaccgacttcattgtcattacgtctgcgtaaagcaacagttgccgataccgcagttatcgaaattgaacctcatttcgaggaccagccagctaactggctgggcagttttgacaagaactcgcaggttcacgatagctaccgcatccccggagagaatggcgaactcagccacgtcatcatccctcccgaagtgaaagaagtcctgaattcaatacactcgatcccaggtcgtcgagtggcaggaagtgaagcgctttcctttgttcgaaatccctatacatttttgggtgaagatgctgccggtgttattgcccccgaagaacatgaacaggcgttgtttgatgccaaaattttctttcatcatttcaggttgatgccgcaactgaatgctgaaaataagatcgcggaggttacgctggtacttgaacctgtttcacctgttccccagccagaaatcacttttgtgttctcagcgccctgggagcttgaaaaattcatacaacaactcggtattagcgtcgctgcacagatgcctgccggttcatggcaaggttacgagctggaattaagtcagttcactgaacagcagtggcacgattgccaggcactgctaacccgctggcagcaagaaattgaaggaaaagaatttagcgatgtgctggatattgcgaagtatggcgatcgggtgattggcattggtgaatttgaaaaaatctcctctccctggctgacgaaagcgcatagtgagaactggattcctgatgacatcgatttctccgcattttcagtcgaaacactggctggctggcaacctgaaaatcttcaccatttcgatgaactgcaggagagaataactcaggcagaagccgctgatgaaacgcatatcaccgcaccatggaatgacagccaattaccgttggatgcagctaaaaccttcagtaagcactgggaaaaacagcaaagcactgcaaatgaatctcaaggtaacgttgcagataaaacggcccgagccgtactcaaaattgagcagaatattgaagaagcggcctacatcaaacagcgccgcaattcactcctcaatgcgcgtcatgccgagcctgaaattcctctgagccttaaagagcatatccgactcaaagaccatcagcgtgaaggcgtagcctggctccagcaactcttccttcgttcacctgaggaaaccgcaggttgcctgctggcggatgatatggggcttgggaaaacgctgcaaattctgagcttcctggtatggttcattgaaaaattcccgcaagaaccgccaagtctcattgttgctcccgtctctcttttagataactgggaacgtgagctggataatttcttctataccgcaggaataccggtattgaaattgtatggcgagaccattaaagcggtgaaatatcccaaacaggctatccctgctcatctgcaatctcaagggatcaaaaacctgcttaaacctggctggcaaggtgaggcgaaaatcatcctgacgacctacgaaacgcttcgcgaccaagagttttctctggcgcgccagccgtggtctattatggtgtgcgacgaggcacaaaaaataaaaaacccagcagcgttaatcccccatgcggccaacgcggtacaagccaggtttaaagtggcatgtacaggaacgccagtcgaaaacacacttgtcgacctgtggagcttatttgattttgcccagcctgggcttttaggggcgttaaatgaatttggtaaacattatgttcgtcctatcgagaacgaaactggccgtgatacgggacgactagagagattacgagcgctgattgaaccccagacattgcgccgaaccaaagaagaggttgcgcgtgatttaccacagaaaattgaagtggaaagctgcaagcaattgacgttgtctggcgtgcaaaaacagctctacctttcgtctgttgcaaattggcaacaacagcaagcactgagcgaagggatgcagcaggccggaaccggtatgttaggcttgttacaccgactgaaactcatctgcgcacaccctgcggtagttaatccagagccacgttttcgtgataactcacccaagcttaactggctgctgaaaatactcgcagaaataaagcataccacgaaagataaggtcattatttttacggagcttcgagatttacaacgcgaacttcaacatgcgatccaccaaaagtttggtttccgccctgtcattatcaatggtgataccagcactaaaagtcatagccaaaatagccgccaacgcctgattgatgattttcaggctcagcctgggtttggggtgattattctctctacggttgccgtcggattcggcgttaacgtccagaaagccaatcatgttattcatttcacccgctgctggaacccagccaaagaagatcaggcaacagaccgggcgtaccgaattgggcaaactaaagatgtgtatgtctattacccgacggtgagagacactgaaatcaccacatttgaagaaacactggatgaccttctgcagcgtcgacgtgcattggccagagatatgctctgcgctactcccgatttgagtggtgcggattttgaggccattttgaagggggcttaa

SEQ ID NO: 8577 - DNA, 2190 bp, Escherichia coli P0304799.3
atgtcctggcttaattccattttagtaacacttacatctgtagaaccctataaggtacctgtcactgttatcgtcactgttacctttgcctttgtctgctttattttcttttatttactgagatccatcagaattatttatggattaaaaaaatacacgcgttcaattaacagcattgaaaaaagtgcgccagaggttcagcttgaacaccttaagagcctgtttcagcgctctgaactcaagcatgcgtggaatgagttcgaagaatcgttgcactcacaatatgaactggagaacggcgaagagaaaatcgtccgtattcgggctactgcgccgagcgccagcttcttctcagagcaacaactggtcgatattccgctgaacactgaatttttcaaacacctgcccggtattctgaccggtatgggaattatcggtaccttctacggtctgatgattggtctcaaccacttcgaccccagcacaccagagcaggtctccagcagcgtcaataatctactacgcgatgtactgtacgccttcctgggttctgcatttgctatttttgcttccattctggtcacctggcttgaaaaattatccatcgctaaaagctacaaatatctggaaaaattcaccgcagccctcgactccctgtatgacagcggcgttggcgaggagtaccttgcctcactggtgaagtccagtaatgaaagcgcgacccaggcacgccatctgaaagagagcctggttacagatttacgcgatatgttactacatctggccgaaagtcagaaaatcgaaagtgaacgcctcgcaaatacgttaagcgcaacttaccgcgaatcaggttcacaatttgccgaccaggtcagcggtgcgattgaaaacagtttgaagtcaccattggataaaattgccggtgcggttcagaccgccagcggcgatcaaagcggcatggtacaaaacatgctgcaggatgtactgaccgcgtttatggcgaaactcgacactacctttggtcagcagtttacaaacctcaacgaaatgatgagacaaaccgttggtgcaattcagaccatgcaaaccggtttctccgcgttattacaggacatgcgtcaggtgagcgacgattcccgccagggcagcgcgcagctcatcgagcaactgttatcagagatgaaatctggccaacaagctctacaggcaggcatgaatgatatgctcaccagccttcaggcctcagtggcgaaaattggcgcagaaggtgaaggggccggtgaacgtatagctcgccaactggaaaaaatgttcgctgatagcgaggcgcgagaaaaagctcaggcagaacatatggctgcctttgttgaagccattcagaattcagtgcaacagggacaaagcgccacaatggaaaaaatggcagcctctgtcggggcgcttggtgaacaactgggtagcctgtttggacagatcgataagggtcagcaacaaatttcagcgactcagcaagcgaatcagcagtccctgcacgaacagactcaacgggtaatgagtgaggtagacgatcagattaaacaattggtcgaaactgttgccagccagcatcagggaacaacagaaactcttcgtttgctcgcagaacaaactaaccggcagattcaggatatgcaagctggcgcggacaagatgcgtctggctgctgaacgctttgaacatgccggtgagcgggtgtcggaagcaaaccaccttaccgctgatgtgctgaataaagcgcaatcggcaggttcatcactttcccttgccaccagcgagctcacctccgttgtggctgattatcgtaacaatcgggaagcggttagcaaatccattgccatgctggagttgctcgccgcaaatacgcagtcagaacaaaccacgcgcaaccaattcatcgcagatcttaagcaacacggtgagcgtctacagagctataaccgggaagcacaggtctttatggaaaatgtaagtgacgtgctcgggaaaggatttgaagacttctctgaaggtgtttcacgcagcctggataaaacgctgggtaaactggacgtcgaaatggcgaaagcctctaatctgctcgcgggatctgtcgaacagctcggagaaagcgtcagcgaacttgatgatgttctgtcacgcgtacgaacctaa

SEQ ID NO: 8578 - DNA, 741 bp, Escherichia coli P0304799.3
atgtttggaaacgcatttgacgttaaaaaacgccgcagcgatgaagcagaaaaaccattctggatctcctatgccgatctgatgactgcaatgatggtgttatttctggtcgtcatggttgcgtcactgagttccgttacacagcgtattcaacgtgcggagcaaggcgaaaaagcaagggggcaggatatttccagattgtgtgaacgcctggaactgcatgcccgcaatgtgaacaaaaacatcgtagtggattgccacgataaccgtatcagctttggcgaagccgggcgtttcgctcataaccaatttttcctgaacgccgaggggcaaaaagcgttgcaggatgtagttcctcttgtactggaagcgtccaacagtgaagagggtaagaagtggtttaagcagatcgttattgaagggtttaccgacaccgacggttcgtacttatacaacctacatctctccctgcaacgctctgaatgggtaatgtgtagtctgctcgatagccgcagccctctgcaaaaaaatatctccgcagaacagcagctccaaatccgtaaacttttcctcgcaggtggcgtctccttcaataatgctaaggaaagcaaggaagccagccgccgggtcgagttgcgcatgcagttcttcgggcttaaagataaacgtgataaggccgatgaggtggattttccccccgtcgttaataaagaagtttgccagttggttatgccactatga

SEQ ID NO: 8579 - DNA, 1683 bp, Escherichia coli P0304799.3
atgatacccgccctgaattctctttctcaacgcattgcagcgaggctctcttccagccaaagggatgaccattatctgcataatgatttccacgcgttgaccgcggctactcttgacatggaaaagcggtttgatagggcagaaagaatcccctcaccgccacaagaaatgcggctggaggctctacgtcgctttcgcctggcacaagaactcacggaacgagagtggcggatggtgttttatggcctcgccgataatgatccattatatcctgaccagccgatcctgctggaggatgatacatttttccccagagtaaacagtgcaatcaaaaaacgtattgaaaccaaaacgttgaaacgccgggattgggcagcactttgttcaagctattttgcctaccaacaccaatcacccgagacaaaccctcactggtgcgtactgcgggggcatatcgctcagggttacctggtagtgaaagccgctatacgacgagaaaaatcgtggatgaaaaccattgagttttatcacgacatttttaccccacaagcgggaggagtgatctccaggcagttacttgcaggtgagaacaattcactctcatcattagagaaaatcgcgcaaatccctgatagcagttggttatggaagcgcattttcactgtgcttttagctcaactggacacgctcgacgatccccagtttctgagcaaaattagctggttgttaggcttagctgcgcagtgggtgcgtttccgtgatgacatcatgactgcaaccctgactcgctattaccattctggctatcgcgatcagtcacatccagcgttgaagcaggccgcgctggaatactgggataacccccagttgaaaagccagcagaataaatggcatcagtatgtctccgagtcggttgccgcaatggtccggggctggttggcaaaacaggacctgacacatttctttgaacttctgcgcggtaatggcgatgtcgatcaggctcgactgcactactggctgcgtttcgccaatcagatgggatttactcgtatcatcatggggtccgatgcttggcaagatcgtggtagcgattttgtgaaattccgcgaggagaataagggacgattgagttacttacgaggtgggcgtaactttgataacgccatgattatgcaaatcaacgattatctgtttgtcgagttttccgggacaggaaatgcgatgtatgcctatcaaataggtcacgcgccatttaaccctgaatcacgcacgcttgatatcaacattcatctaaaagatcaggggcgatgcgcactcagactcccccatgcacctcgtgctgaggggtataacaaagtccggataaccggctggatgttgaaatacgacgatgagctacgtaagttgggcattcggtggatggctgaagaacccgtcaggtttgtcgataagaaagtgccccctcccgtcgctatgtctgacatcaaaatcatcaacccgttgcgtgatacggctatacaacacctggttaaatgtagttcatgtatcgtcagcgataatcgacataaaggtggcatactgtccgtacaactcattacacctgacgacaccgtagaaagagagttgttacgactaggctttgcacctgtagctaaagaaccgcatcgttactggatcaaataa

SEQ ID NO: 8580 - DNA, 3243 bp, Escherichia coli P0304799.3
atgctgaaacgtcttttaagtaaactgacgggaaaccgtcagcagatagaacaccacctaaagaatcagtatcaggttgaggaaaacggtctcagctttccactatcgctggttgatgattcacagctttgggcactggcatcctggcttgaacaacttgctgaagaagactatctgatatcacttacagaccggtggttattgagttgggaggcactatatcgcctgctggaggatgaggaacatgccagcagcctgcctcttatcggtgtacctgacgtattgcccttacgcgcaaacctgagttcacgaggagcattaagcgatagctattttcgcgtctggattgctgaatgggctacatttccagcccgcaaaccgatccgtttcagtcgtaccggtgccattttaacccatgaaaatcagcaatacctgttatcgcgggaaaactgggcactcttacaggcaacagaacaactcagtgcacagcaaattcagactcccggcgaaaccactaaccagctgggatgggccgctatccgcaaatgtgcgaaactcgccgccgcaaaatttgatgattatttagaaaaaacgcacgtcatcaaaccgacttcattgtcattacgtctgcgtaaagcaacagttgccgataccgcagttatcgaaattgaacctcatttcgaggaccagcctgctaactggctgggcagttttgacaagaacttacaggttcacgatagctaccgcatcccaggagagaatggcgaactcagtcacgtcatcatccctcccgaagtgaaagaagtcctgaattcaatacactcaatcccagggcgtcgagtggccggaagtgaagcgctttcctttgttcgcaatccttataccttcctgggtgaagatgccgccagtgttattgcccctgaggaacatgaacaggcactgtttgatgccaggattttctttcatcatttcaggttgataccgcaactgaatgcggaaaataagatcgcagaagttacgctgatacttgagcctgtttcacctgttccccagccagaaatcacttttgtgttctcagcgccctgggagctggataaattcatacagcaactcggtattagcgtcgctgcacagatgcctgccggttcatggcaaggttacgagctggaattaagtcagttcaccgaacagcagtggcacgattgccaggcactgctaactcgctggcaacaagaaattgaaggaaaagaatttagcgatgtgctggatattgcgaagtatggcgatagagtgattggcattggtgaatttgaaaaaatatcctctccctggctgaccaaagcgcagagtgaaaactggcttcctgatgacatcgatttctccgcgttttcaatcgaaacactatctggctggcaacctgaaaatcctcaccattttgatgaactacaggagaaaattactcaggcagaagccgctggtgaaacgtatatcaccacaccatggaatgacagccaattaccgttggatgccgctaaaaccttcagtaagaactgggaaaaacagcaaatcactgctaatgaatatcaaggcaacgttgcagataaaacggcccgagccgtactcaaaattgagcagaatattgaagaaacggcctacatcaaacagcgccgcaattcactcctcaatgcgcgtcatgccgaaccagaaattcctctgagccttaaagagcatatccgacttaaagaccatcaacgtgaaggcgtagcctggctccagcaactcttccttcgttcacctgaggaaacagcaggctgcctgctggcggatgatatggggcttggaaaaacgctgcaaattctgagcttcctggtatggttcattgaaaaattcccgcaagaaccgccaaatctcattgttgctcctgtctctcttttagataactgggaacgtgagctgaacaatttcttctataccgcaggaataccagtattgaaattgtatggcgagaccattaaagcggtgaaatatcccaaacaggccatccctgctcatctgcagtctaaggggatcaaaaacctgcttaaacctggctggcaaggtgaggcaaaaatcatcctgacgacctacgaaacgcttcgcgaccaggagttttctctggcacgccagccatggtccattatggtgtgcgacgaggcacaaaaaataaaaaacccagctgcgttaatcacacatgcggccaacgcggtacaagccaggtttaaagtggcatgcacaggaacgccagtcgaaaacacacttgtcgatctgtggagcttatttgattttgcccagccaggattgttaggggcactaaatgaatttggtaaacactatgttcgccccatcgagaacgaagatggccgcgatacagaacggctggaaagcctgcgggcactgatagaacctcagactttacgccgaaccaaagaagaggttgcacgtgatttacctcagaaaattgaagtagaaagctgcaagcaactgacgttgtctggcgtgcaaaaacagctctacctttcgtctgttgcaaattggcaacaacagcaagcactgcgcgaagggatgcagcaggccggaaccggtatgttaggtttgttacaccgactgaaactcatctgtgcacaccctgcaatagttaatccagagccacgttttcgtgataactcacccaagctaaactggctgctgaaaatactcgcagaaataaaacatacctcgaaagataaggtcattatttttacggagcttcgagatttacagcgcgagcttcaacatgcaatccaccaaaattttggtttccgccctgtcattatcaatggtgatagcagcactaaaagtcaaagccaaaacagccgccaacgcctgattgatgattttcaggctcagcctgggtttggggtgattattctctctacggttgctgtcgggtttggcgttaacgtccagaaagccaatcatgtgattcattttactcgctgctggaatccagccaaagaagatcaggctacggatcgggcgtatcgcattgggcaaactaaagatgtgtatgtctattacccaactgtgagagatactgaaatcacaacatttgaagaaacactggatgacctcctacaacgccgacgagcattggccagagatatgctctgcgctactcccgatttgaactgtgcggattttgagaccattttgaagggagcctaa

SEQ ID NO: 8581 - DNA, 2190 bp, Escherichia coli P0299917.8; identical to SEQ ID NO: 8545

SEQ ID NO: 8582 - DNA, 741 bp, Escherichia coli P0299917.8; identical to SEQ ID NO: 8546

SEQ ID NO: 8583 - DNA, 1515 bp, Escherichia coli P0299917.8; identical to SEQ ID NO: 8547

SEQ ID NO: 8584 - DNA, 3243 bp, Escherichia coli P0299917.8; identical to SEQ ID NO: 8564

SEQ ID NO: 8585 - DNA, 2556 bp, Escherichia coli KTE33
atgttttcgctgacttcgttcctcgacacgttaacctctgttaatccagaaaatgtgccgatttatgtcgctattgtggttggggttttgttgttgggtttcattgtccgttacgcgattccttcatttagggtttcagcgcgctttaaacaaaaagcgaaagcaattcggggacttggcaatgaaaaaccggcacaacaactcgaaaaattagacgcgttattctctgataaattttttgcgcacccctggagcgaatttaaagagtctctacatcgccagtttgagtttgatgaaaatagcgggcaaaaaaaaattagcgccattcgctcaacggctccagcgtcagcatggtttacggaaccgttattagtcgaaattcctctctatacggaagcgtttaaacatcttccaggcatcctgaccggaattgggatcatcggcaccttttcggggttgatgattggtttgcaccattttgaccccagcacgccagagcaggtcagcgccagcgtcgcgaaccttttacgcgacgttctgtatgcgtttttaggttcggcgtttgctattacgttttccattctggtcaccatgtttgaaaaatggcgactggcgcaatgctataaaaaccttgaactccttaccgccagcattgaccagctttttgaaggcggcgtcggtgaagattacctttcgcaacttctttccagtactaaagaaaacaccacccatgcgcggcaacttaaggatggtctggtcactgacctgcgtgaaatgctgcaaaacctggtggatagccagatgcgggaaaatcaaaagctggcagagacattatcaacaacataccgcgagtcaggccaacagtttgctgaacaggttagtggcgctatcgaaaccagcctgaaaaatccgctggataaaattgctggcgtggtgcaaaccgcctccggcgatcagagtcatcgtgtgcagtcgatgctggagaacgtcctgaccgcttttatgagcaaaatggataacacctttggtcagcagttcaccaccatgcaggagatgatggggcgttcagtggaagccattcagtctatgcaaagcggcttctcaacgttgttgcaggatatgcgtcaggccggggatgactcacgtcagggcagcgcgcaactgatctctcaactgttaagcgaaatgaaaagcggtcagcaggagatgcaggcagggatgaatgagatgctgcgcagcttgcaggagtccgtagcccgtattggcgcagaaggcgaaggcgcgggcgaacggatggcgcaacaactggaaaaaatctttgccgacagcgaagcgcgtgaaaaagcgatggcggaacagatgcgcgcgtttattgaggctatccagtccagtgttcagcaagggcaaaatgaaaccatggagaaaatggcggcttccgtggatacgcttggcagccatatggcgacgctctttgcacagctggaaaatggtcagcagcaacttaatcagcagcaaaatcaggcgcaaaatctgctgatgggcaatatgagcaaaggtgtcgaaacgctgacgcaaaacctggcgggcgtattcagccaactggagtccgggcaaaaacagatgagccagactcaggaacaggggcaacgcgtgctgcatgaagagactcagcagcttctggcacgtagcgaagtacgtgagcaggcggcggctgagcaacaacaacagtttatgacgtcgttacagcaaaccatgcattcaagtcaggatgccctgcgagagaaaatgaccagcggtatcgatcacctgggtagtcaacttggcaacctgtttgggcaactggaagaaggccagaagtcgctcagccagcaacagcaatcagcgcagagtgcgttacaacaggaagcgcagcgaatcattggtcagcttgaaagtcaggttgagtcgctgatgcagatgctgcgtgaacagcaatcggcttcaggcgagctgctgcaacggatggcgaaaaataccacgcgccatctggaagagatacaaacaggagccgataaaatgcgcgtggctgccgaccgctttgaagctgcgggcgatcgtgtcgccgaggctaatcagttgaccgccgaggtgctcaatggcacgcaacaggcgggacgcacgctttccagtgccagcgcggagttgggggcattgattgctgattatcgtaatacccgcgaagtcgtggcgaatgccataacggcactcgaaacgctgattaaccgtagccatgatgaacaatcatcgcgcagccgttttgttgacgatctgaaggcgtactctgaacgcctgcaacaatataaccgtgaggctcaggagttcctgcataacattgccgaggtaatgggaaccagttttgaatcctttacgaccggagtggaaaacggcctgaatcgttcactgcaagagatggatacgcaactgacgaaagcggcgggagccttaagttcttcggttgagattatcggtgaaagcgtggatacgctggaaacagtactccgtcatcgtcgcgcgtaa

SEQ ID NO: 8586 - DNA, 735 bp, Escherichia coli KTE33
atgtttaaccgggtatttaatggcaggcaacggcgcagcgatgaagcggaaaaacccttctggatctcctatgcagacctgatgaccgccatgatggtgctgtttctggtggtgatggtggcgtcacttagctctgttacgcagcggatccagcaggcggaagcgggggagaaatcgcgcgggcatgatatcgctcgcctgtgtgaaaaacttgagcttcaggcgaaaaatctcaacaagacgattcaggttgattgtcatgacaaccgtatcagctttggtgaagccgggcgttttgagcacaatcgctttgcgcttaacgccgaaggattacaggcgctacaggatgtggtgccgttagtgctggaggcggcaaatagcgatgaaggcaaaaaatggtttaagcaaattgttatagaaggttttacggataccgacggttcttatctctataacttgcacctttcgttgcaacgctcggaatgggtgatgtgcagtttgctggatagcagaagcgcgctacagcaaaaaataaccccggaacagcaagtccagatccgcaaattatttctggcgggcggggtttcgttcaacaatgcgaaagagagtaaagaagctagccgtcgcgtagaactgcggatgcaattctttggcctgaaagacaaaaagcacgacgaaagcatggatgttgttcctggcattagtcaggaaacctgtcagttgggagccatgtaa

SEQ ID NO: 8587 - DNA, 1788 bp, Escherichia coli KTE33
atgacttccgctattgaaaaactgaaaacccgtttgctgccctaccgggagcagaacgtgcagccgacggtaagtcacgcttttcactatcttcagcgcgttatcgcgcaacttgagaggaaggtagatgctcgtgcagtgcagatggttccccctctggagaaacgccgtcaggccattgcccgactgcgtgcgggggagatgccagggcccttcgagtggaagatgattttttttggccttaatgacgtggcagaaggcgatctgtttgaaattgcattgattgatgatgcaacaaacttcgcgaggattatcgctgaaattgaacaaaaaattgcgcagcagcggttaacacgccgcgaatggctggcgttatgtaccagctactttggtcattccagcgatacgccggaaaagaatccacagtggcttcagctacgcacgcaaattgctcgcggctttcagcagctaaaagagagtgcgccgcgtcagatgtcctggatgtcggtcattgacacctatagcgatatttttaccgataatgcaggttttctgctcggacaacagcttgggcgtggagaaatcacggatatttcggtgctggagaaagtcgcgcaaattccgcaaaccagctggttatggcgcaaaattgttaaccacctggtcaatgagattttttgcctgactgacgatgattttcagcagaaaattaattctcttatcgccttaagccgccagcttacgcggtttaaagataatattctggcagccatgctgacccgttattatcagtcagcttttaaacatcaaacgcatttcgaactcaaacaattagccctggaatattggggaaatccacagttaaccagccgtaataaaagctggcaggttcacgttgaaaatcccgtattactgatggtgcaaggatggttcgccaaagacgacctgaaactgttctttgaattgctgaaaggcaatcgggatgttgaccatgcgcgcctgttctactggctacgttttgccaatcaaatgagctatacgcgcattgtgctgggcgaagatgcactgcgatccaaagatgccgattatgttgaattcagggcgaaaaacgcagggcgattaagccgcctgcaaggttctggttcacgcgataacaatgccatgattatgcgcattggcgattatctgtttgtcgaattttcgaaagtgggggcgatgtatgcctaccatatggggaatgcgccttttaatccggaaaccggcattcttgatattgattatgatctgaaagataagcggaataaccgccgtaaagtccggttgcgtttaccgcatttatcgccggtatttctctactcactcaaccgaattgaggggtggatgagccgatatgatgaagaacttcgtaagctgggtattgattacgttgcggaagatataaatcagtcctctgtcactttggatatctctcgcttcaatgcgtcaaagaccgtgagtcggcctgaacctgcatcgttacctgaacatgaagtcagtgatgcaaagtcagaccgggaagagcaaatcaaaatcatcgcctcctcgttaaaagccaaaaaagagctccctggccgggaacagcaaatccgggagattattcgttcggtcgattgcaaagtgatggataaacgagggctggggggcgcaatccacattcagttcaatgaacctgaccatgaagcggcacaaaaattactcagccttgggtttaaaccggtgctgggtaaatttacttactggagcaaatag

SEQ ID NO: 8588 - DNA, 3240 bp, Escherichia coli KTE33
gtgttcaaaaaattgttgggtaaatttattaaagagaatacttcgctacccacttcatttgtgccgctgtatgtgatgaaagaagagggctttgctttcccctttagtcttgccgatagcgaagataactggcctgtcgcctcatgcctggaacagcttcatgaggaagattatgtttctcactggtctgattgctggtttcttagctgggatgatttttatcgcatccggaaaaatgacgactatgccagcagtctggcgatttttgctttccctccacagcgcaatctgacggctcatcttgctgcaacaggaagcattagcgatgacacttttcgcgttttcattgataaatggacccagcctgacgactatcgccctgttgagataacttgcacaggcgccagtttttcctctgcggaaggcacctttgtgttaagtgaagagaactggcaacttctggacgcactacagcaactcaggttgcagcagcgacagacgccgggcgaaacggtcaaccaaaccagttgggccaaaatacggcggcaggccaaaaaagcaggggcaaaactggatgactatctcgcgaaaacgatcgtcatcaggccggaatcgttgcagttaaaactgcggaaatcgctggtggtggatactccggtgctggaaattgaacctgtttttgatgagcagcctgccaactggttacagagttttgaccgcacgcaacaggtgcaggatcgttactgtgttttaggggacgatggtgtcttaaaccatgtcattctttctcctgaagtcaaagacgtcctgacctccgtgcacgctattacgggacgtcgcgtggcgggggatgatgcgctctcatttgttcgcaacccctacacctggattggtgaagaggcgagccaggtgctcgatcctgacgtttatgagcagaatttacaggacgccgggatctacttttatgatttccgcctggagccgcagattgatgaaaacaggcaaattgcgtcggtaacgcttcttctcagtcccagaactgagcaatctgtggcggatgaaacctatatctttaaacgaccaggtgaactggcggcgttgctctctgaactggaacaaaagttagcggcacaactgcccgccggagtctggcagggttacgatctggagctttccagattcagccaggaagaactgcaaggttatcaggcattgcttgaaaactggcagcaccaggcggcgggaatgaattttacccacgtcctcgatctgaacaaatacagcgaccgggttatcgggatcggtgaatttgaaaaaataagttcgccttatctggtcaaaagtgaaagtgaaaaatggcttccggagaaccttgcgcaagagatgtgcgaggccatgttctctggctgggatctcgataatcatcaacattttcaggaactggaagagcggctggaagaggcaaaagccacggatgcgccggaagtcgccatgccctggaacgacaaccttttgccccgtgaagaagcagaaattttccacgataaatggaaaaagaaaatcgatggcgaaacaaatgatggtgtcagtagtgagccggtcagtcgcgccgttctgctgatagaacaaaatatcgagcaggcgctgtatgttaaacaacggcgggactctttgctcggtgcacatcaggcagaagtcgaactaccgatgatcctcaaaacgtccattcagctacgtgaacaccagcgtaaaggggtagcgtggctccagcagttgtatctaaagtcgccaaccgagacggcgggatgtttactggcagacgatatggggctgggtaaaaccttacagattctaacttttctcatctggcaccgtgaacgtttcccggatgcgcctccttcgctgattgttgctccggtgtcgttactcgataactgggagcgtgaggttgggaatttcttcctgcgcgagcaggtgtcgattttaaaactctacggtaatgaacttaaggcgaagaaatgcgcgaaagagagcattcctcaggcgcttaaaagtaagggtattaagaacttactgcaaagtgactgggtgggggacgcgcatattgttcttaccacctatgagacgttgcgcgatcaggaattttcgctggctcgccaaccctggtccataatggtgtgcgacgaagcgcagaaaattaaaaatccggcggcattaattacccaatcggcaaaagccattcaggcacaatttaaagtcgcatgtaccgggacaccagtcgaaaatacccttgtcgatctgtggtgtttatttgacttcgttcagcctggtttgttgggggctttaaataattttggtaaagattatctgcgccccattgagcaacagaatgataatgctgtcctcgaatcgctacgtaaattaatagaaccgcagacgctgcgccgcaccaaagaagaagtggcgaaagacctgccggataagattgaagatcaacgctgtaagcagttgaatatgctgccattgcaacgggatctctatacccactcggttgcaagctggcaaaaccaacaggagatcagcgaagggctggatcaacgaggctcaggtatgctggggttactgcatcgcctgaaacttatttgcgcatggccttattccgtcagtgcagatctgcgcttacggaacgatgccccgaaagtaaaatggctgctggagacattaaatacgattcgccagtcatccgatgacaaagtgattatttttacggaactgcgcgatattcaacgagaactgcaacatctgattgcgcagcattttggctttaagccttttattattaatggtgataccagtaccaaatctggcagcgatcaaaatcgtcagagcctgatcgatgcatttcagtcaacgcccggttttaacgtcattattttatccaccattgcggttgggtttggcgtcaatgtccaaaaagcaaatcatgtcatccactttacccgttgctggaatccggcgaaggaagatcaggcgaccgatcgggcctaccgtatcgggcagcagaaagatgtttacgtctattatccgacggtgcgtgatagccagttaatgacttttgaagaaacgctggatgaattactgaaccgacgccgggcattggcgagagatatgctcaaaggggcaaccgatctgaccgccgcagattttgaagcggtgctggcgggtacaccgcaggcgtag

SEQ ID NO: 8589 - DNA, 2190 bp, Escherichia coli KOEGE 3 (4a); identical to SEQ ID NO: 8537

SEQ ID NO: 8590 - DNA, 741 bp, Escherichia coli KOEGE 3 (4a); identical to SEQ ID NO: 8538

SEQ ID NO: 8591 - DNA, 1683 bp, Escherichia coli KOEGE 3 (4a)
atgacgcctgcactgaattctctttctcaacgcattgcagcgaggctctcttccagccaacgggatgaccattatctgcataatgatttccacgcgctggcctcagctgctctcgacatggaaaagcggtttgataaggcagaaaaaatccctttaccgccacaaaaaatgcgactggcagctctgcgtcgccttcgccttgcacaagaactcacggagcgagagtggcggatggtgttttatggtctcgccgataatgatccgtcatatcctgaccagccagtactgctggaggatgatacgtttttccctgaagtaaacaatgcaatcaaaaagcggcttgaaactaaaaccctgaaacgccgagactgggccgcactctgttcaagctattttgcttaccagaacccatcacctgagacaaacccgcactggtgcgtactgcgtggtcatatcgctcagggttacatggtggtgaaagcggctatacgacgagaaaaatcgtggatgaaaaccattgagttttatcacgatatttttaccccgcaggcgggaggcgtgatctccagacagttacttgcgggtgagagcaattcactctcgtcattagaaaaaatcgcgcaaatccctgatagcagttggttgtggaaacgtattttcacggtgcttttagcgcaactggacacactcgacgatccccagtttctggacaaaattagctggttgttaggtctggctgcccagtgggtacgtttccgtgatgacatcatgactgcgaccttgactcgctattaccattctatttatcgcgatcaggctcattcagctttgaagcaggccgcgctggaatactgggataacccgcaactgaaaagccagcagaataaatggcatcagtatgtctctgagccggtggctgcgatggtccggggctggctggcaaaacaagatctgatgcatttctttgaattgctgcgcggtaatggcgatgttgaccaggcacgattgcactattggctacgtttcgccaatcagatgggatttacccgtatcgtcatggggactgatgcctggcaagaccgtggtagtgactttgtgaaattccgcgaggagaataagggacgattaagttacttacgaggtggacgtaactttgataacgccatgattatgcagatcaacgattatctgttcgttgagttttccgggacagggaatgcaatgtatgcctatcgaataggtcacgcgccatttaaccctgaatcacgcacgcttgatatcaacattcatctaaaagataaggggcgctgcgtgctccgactgccccatacaccgcgcgcagaagggtataacaaagtccggataaccggctggatgttgaaatacgacgacgagctgcgtcagttgggcattcggtggatggcagaagaagccatcaagtttgtcgataagaaagcgtcctctcccgcctctatgtccgacattaaaatcatcaacccgttgcgtgatacggctatacagcatctggttgaaggtagttcatgtatcgtcagcgataatcgacaaaaaggtggcgtactgtccgtacaactcaatactcctgacgacaccatagaaagagagttgttacggctaggctttgcgcccgtggctaaagaaccgcatcgttactggatcaaataa

SEQ ID NO: 8592 - DNA, 3243 bp, Escherichia coli KOEGE 3 (4a)
atgctgaaacgtctgttaagtaaactgacgggaaaccgtcagcagatagaacatcacctaaaaaatcagtaccaggttgaggaaaacggacttagctttccgctatcgctggttgatgattcgcagctttgggcactggcatcctggctagaacaactggctgaagaagactatctgatatcacttacagaccggtggttgttgagttgggacgcactgtatcgcctgctggaggatgaggaacatgccagcagcctgcctcttatcggtgtacctgacgtactgcctttacgcgcaagcctgagttcacgaggagcattaagcgatagcgattttcgcgtctggattgctgaatgggctacgcttccagcccgcaagccgttccgtttcagtcgtaccggtgccattttaacccatgaaaatcagcaatacctgttatcgcgtgaaaactgggcactcttacaggcaacagaacaactcagtgcacagaaaaatcagactcctggtgaaaccactaaccagttgggatgggccgctatccgcaaatgtgcgaagcaagcagccgcaaaatttgatgattatttagaaaaaacgcatgtcgtcaaaccaacttcattgtcattacgtctgcgtaaagcaacggttgccgatactgctgttatcgaaattgagccccatttcgaggaccagcctgctaactggctaggcagttttgacaaaaactcgcaggttcacgatagctaccgcatccctggagagaatggcgaactcagccatgtcattatccctcccgaagtgaaagaagtcctgaattcaatacactcgattccaggccgtcgagtggccggaagcgaagcgctttcctttgttcgcaatccttataccttcctgggtgaagatgccgccagtgttattgcccctgaagaacatgaacaggcactgtttgatgccaggattttctttcatcatttcaggttgataccgcaactgaatgcggaaaataagatcgcagaagttacgctggtacttgagcctgtttcacctgttccccagccagaaatcacttttgggttctcagccccccgggagctggataaattcatacagcaactcggtattagcgtcgctgcacagatgcctgccggttcatggcaaggttacgagctggaattaagtcagttcactgaacagcagtggcacgattgccaggcacttctaactcgctggcagcaagaaatagaaggaaaagaatttagcgatgtgctggatattgcgaagtatggcgatcgcgtgattggcattggtgaatttgaaaaaatctcctctccctggctgaccaaagcgcagagtgaaaactggcttccagatgacatcgatttctccgcgttttcagtcgaaacactgtctggctggcaacctgaaaaccttcaccatttcgatgaactgcaggagagaattactcaggcagaagctgtaggtgaaacgcatatcaccgcaccatggaatgacagccaattaccgttggatgctgctaaaaccttcagtaagaactgggaaaaacagcaaagcactgcaaatgaatctcaaggcaacgttgcagataaaacggcccgagccgtactcaaaattgagcagaatattgaagaaacggcctacatcaaacagcgccgcaattcactcctcaatgcgcgtcatgccgagcctgaaattcctctgagccttaaagagcatatccgactcaaagaccatcaacgtgaaggcgtagcctggctccagcaactcttccttcgttcacctgaggaaaccgcaggttgcctgctggcggatgatatggggcttgggaaaacgctgcaaattctgagcttcctggtatggttcattgaaaaattcccgcaagaaccgccaagtctcattgttgctcctgtctctcttttagataactgggaacgtgaactggacaatttcttctataccgcaggaataccggtattgaaattgtatggcgagaccattaaagcggtgaaatatcccaaacaggctatccctgctcatctgcaatctcaggggatcaaaaacctgcttaaacctggctggcagggtgaggcgaaaatcatcctgacaacctacgaaacgcttcgcgaccaggagttttctctggcacgccagccgtggtccattatggtgtgcgacgaggcacaaaaaataaaaaacccagctgcgttaatcacacatgcggccaacgcggtacaagccaggtttaaagtggcatgtacaggaacacctgtcgaaaacacacttgtcgacctgtggagcttatttgattttgcccagccaggattgttaggggcactaaatgaatttggtaaacactatgttcgccccatcgagaacgaagatggccgcgatacggaacggttggaaagcctgcgagcgctgatagaacctcagactttacgccgaaccaaagaagaggttgcgcgtgatttacctcagaaaattgaagtggaaagctgcaagcaattgacgttgtctggcgtgcaaaaacagctctacctttcgtccgttgcaaattggcaacaacagcaagcactgagcgaagggatgcagcaggccggaaccggtatgttaggtttgttacaccgactgaaactcatctgtgcacaccctgcagtagttaatccagaaccacgttttcgtgataactcacccaagcttaactggctgctgaaaatactcgcagaactaaaacacaccacgaaagataaggtcattatttttacggagcttcgagatttacagcgcgaacttcaacatgcgatccaccaaaagtttggtttccgccctgtcattatcaatggtgataccagcactaaaagtcaaagtcaaaacagccgccagcgcctgattgatgattttcaggctcagcctgggtttggggtgattattctctctacggttgccgtcggattcggcgttaacgtccagaaagccaatcatgttattcatttcactcgctgctggaacccagccaaagaagatcaggcaacagaccgggcgtaccgaattgggcaaactaaagatgtgtatgtctattacccgacggtgaaggacactgaaatcaccacatttgaagaaacactggatgaccttctgcagcgtcgacgtgcattggccagagatatgctctgcgctactcccgatttgagtggtgcggattttgaggccattttgaagggggcttaa

SEQ ID NO: 8593 - DNA, 2556 bp, Escherichia coli KOEGE 71 (186a)
atgttttcgctgacttcgttcctcgacacgttaacctctgttaatccagaaaatgtgccgatttatgtcgctattgtggttggggttttgttgttgggtttcattgtccgttacgcgattccttcatttagggtttcagcgcgctttaaacaaaaagcgaaagcaattcggggacttggcaatgaaaaaccggcacaacaactcgaaaaattagacgcgttattctctgataaattttttgcgcacccctggagcgaatttaaagagtctctacatcgccagtttgagtttgatgaaaatagcgggcaaaaaaaaattagcgccattcgctcaacggctccagcgtcagcatggtttacggaaccgttattagtcgaaattcctctctatacggaagcgtttaaacatcttccaggcatcctgaccggaattgggatcatcggcaccttttcggggttgatgattggtttgcaccattttgaccccagcacgccagagcaggtcagcgccagcgtcgcgaaccttttacgcgacgttctgtatgcgtttttaggttcggcgtttgctattacgttttccattctggtcaccatgtttgaaaaatggcgactggcgcaatgctataaaaaccttgaactccttaccgccagcattgaccagctttttgaaggcggcgtcggtgaagattacctttcgcaacttctttccagtactaaagaaaacaccacccatgcgcggcaacttaaggatggtctggtcactgacctgcgtgaaatgctgcaaaacctggtggatagccagatgcgggaaaatcaaaagctggcagagacattatcaacaacataccgcgagtcaggccaacagtttgctgaacaggttagtggcgctatcgaaaccagcctgaaaaatccgctggataaaattgctggcgtggtgcaaaccgcctccggcgatcagagtcatcgtgtgcagtcgatgctggagaacgtcctgaccgcttttatgagcaaaatggataacacctttggtcagcagttcaccaccatgcaggagatgatggggcgttcagtggaagccattcagtctatgcaaagcggcttctcaacgttgttgcaggatatgcgtcaggccggggatgactcacgtcagggcagcgcgcaactgatctctcaactgttaagcgaaatgaaaagcggtcagcaggagatgcaggcagggatgaatgagatgctgcgcagcttgcaggagtccgtagcccgtattggcgcagaaggcgaaggcgcgggcgaacggatggcgcaacaactggaaaaaatctttgccgacagcgaagcgcgtgaaaaagcgatggcggaacagatgcgcgcgtttattgaggctatccagtccagtgttcagcaagggcaaaatgaaaccatggagaaaatggcagcttccgtggatacgcttggcagccatatggcgacgctctttgcacagctggaaaatggtcagcagcaacttaatcagcagcaaaatcaggcgcaaaatctgctgatgggcaatatgagcaaaggtgtcgaaacgctgacgcaaaacctggcgggcgtattcagccaactggagtccgggcaaaaacagatgagccagactcaggaacaggggcaatgcgtgctgcatgaagagactcagcagcttctggcacgtagcgaagcacgtgagcaggcggcggctgagcaacaacaacagtttatgacgtcgttacagcaaaccatgcattcaagtcaggatgccctgcgagagaaaatgaccagcggtatcgatcacctgggtagccaacttggcaacctgtttggacaactggaagaaggccagaagtcgctcagccagcaacagcaatcagcgcagagtgcgttacaacaggaagcgcagcgaatcattggtcagcttgaaagtcaggttgagtcgctgatgcagatgctgcgtgaacagcaatcggcttcaggcgagctgctgcaacggatggcgaaaaataccacgcgccatctggaagagatacaaacaggagccgataaaatgcgcgtggctgccgaccgctttgaagctgcgggcgatcgtgtcgccgaggctaatcagttgaccgccgaggtgctcaatggcacgcaacaggcgggacgcacgctttccagtgccagcgcggagttgggggcattgattgctgattatcgtaatacccgcgaagtcgtggcgaatgccataacggcactcgaaacgctgattaaccgtagccatgatgaacaatcatcgcgcagccgttttgttgacgatctgaaggcgtactctgaacgcctgcaacaatataaccgtgaggctcaggagttcctgcataacattgccgaggtaatgggaaccagttttgaatcctttacgaccggagtggaaaacggcctgaatcgttcactgcaagagatggatacgcaactgacgaaagcggcgggagccttaagttcttcggttgagattatcggtgaaagcgtggatacgctggaaacagtactccgtcatcgtcgcgcgtaa

SEQ ID NO: 8594 - DNA, 735 bp, Escherichia coli KOEGE 71 (186a)
atgtttaaccgggtatttaatggcaggcaacggcgcagcgatgaagcggaaaaacccttctggatctcctatgcagacttgatgaccgccatgatggtgctgtttctggtggtgatggtggcgtcacttagctctgttacgcagcggatccagcaggcggaagcgggggagaaatcgcgcgggcatgatatcgctcgcctgtgtgaaaaacttgagcttcaggcgaaaaatctcaacaagacgattcaggttgattgccatgacaaccgtatcagctttggtgaagccgggcgttttgagcacaatcgctttgcgcttaacgccgaaggattacaggcgctacaggatgtggtgccgttagtgctggaggcggcaaatagcgatgaaggcaaaaaatggtttaagcaaattgttatagaaggttttacggataccgacggttcttatctctataacttgcacctttcgctgcaacgctcggaatgggtgatgtgcagtttgctggatagcagaagcgcgctacagcaaaaaataaccccggaacagcaagtccagatccgcaaattatttctggcgggcggggtttcgttcaacaatgcgaaagagagtaaagaagccagccgtcgcgtagaactgcggatgcaattctttggcctgaaagacaaaaagcacgacgaaagcatggatgttgttcctggcattagtcaggaaacctgtcagttgggagccatgtaa

SEQ ID NO: 8595 - DNA, 1788 bp, Escherichia coli KOEGE 71 (186a)
atgacttccgctattgaaaaactgaaaacccgtttgctgccctaccgggagcagaacgtgcagccgacggtaagtcacgcttttcactatcttcagcgcgttatcgcgcaacttgagaggaaggtagatgctcgtgcagtgcagatggttccccctctggagaaacgccgtcaggccattgcccgactgcgtgcgggggagatgccagggcccttcgagtggaagatgattttttttggccttaatgacgtggcagaaggcgatctgtttgaaattgcattgattgatgatgcaacaaacttcgcgaggattatcgctgaaattgaacaaaaaattgcgcagcagcggttaacacgccgcgaatggctggcgttatgtaccagctactttggtcattccagcgatacgccggaaaagaatccacagtggcttcagctacgcacgcaaattgctcgcggctttcagcagctaaaagagagtgcgccgcgtcagatgtcctggatgtcggtcattgacacctatagcgatatttttaccgataatgcaggttttcttctcggacaacagcttgggcgtggagaaatcacggatatttcggtgctggagaaagtcgcgcaaattccgcaaaccagctggttatggcgcaaaattgttaaccacctggtcaatgagattttttgcctgactgacgatgattttcagcagaaaattaattctcttatcgccttaagccgccagcttacgcggtttaaagataatattctggcagccatgctgacccgttattatcagtcagcttttaaacatcaaacgcatttcgaactcaaacaattagccctggaatattggggaaatccacagttaaccagccgtaataaaagctggcaggttcacgttgaaaatcccgtattactgatggtgcaaggatggttcgccaaagacgacctgaaactgttctttgaattgctgaaaggcaatcgggatgttgaccatgcgcgcctgttctactggctacgttttgccaatcaaatgagctatacgcgcattgtgctgggcgaagatgcactgcgatccaaagatgccgattatgttgaattcagggcgaaaaacgcagggcgattaagccgcctgcaaggttctggttcacgcgataacaatgccatgattatgcgcattggcgattatctgtttgtcgaattttcgaaagtgggggcgatgtatgcctaccatatggggaatgcgccttttaatccggaaaccggcattcttgatattgattatgatctgaaagataagcggaataaccgccgtaaagtccggttgcgtttaccgcatttatcgccggtatttctctactcactcaaccgaattgaggggtggatgagccgatatgatgaagaacttcgtaagctgggtattgattacgttgcggaagatataaatcagtcctctgtcactttggatatctctcgcttcaatgcgtcaaagaccgtgagtcggcctgaatctgcatcgttacctgaacatgaagtcagtgatgcaaagtcagaccgggaagagcaaatcaaaatcatcgcctcctcgttaaaagccaaaaaagagctccctggccgggaacagcaaatccgggagattattcgttcggtcgattgcaaagtgatggataaacgagggctggggggcgcaatccacattcagttcaatgaacctgaccatgaagcggcacaaaaattactcagccttgggtttaaaccggtgctgggtaaatttacttactggagcaaatag

SEQ ID NO: 8596 - DNA, 3240 bp, Escherichia coli KOEGE 71 (186a)
gtgttcaaaaaattgttgggtaaatttattaaagagaatacctcactacccgcttcatttgtgccgttgtatgtgatgaaagaagagggttttgctttcccctttagtcttgccgatagcgaagataactggcctgtcgcctcatgcctggaacagcttcatgaggaagattatgtttctcactggtctgattgctggtttcttagctgggatgatttttatcgcatccggaaaaatgacgactatgccagcagcctggcgattttcgcttttcccccacagcgcaatctgacggctcatcttgctgcaacaggaagcattagcgatgacacttttcgcgttttcattgataaatggactctgcctgacgactatcgccctgttgagataaccagcacaggcgccagcttttcctctgcggaaggcacctttgtgttaagtgaagagaactggcaacttctggacgcactacagcaactcaggttgcagcagcgacagacgccgggcgaaacggtcaaccaaaccagttgggccaaaatacggcggcaggccaaaaaagcaggggcaaaactggatgactatctcgcgaaaacgatcgtcatcaggccagaatcgttgcagttaaaactgcggaaatcgctggtggtggatactccggtgctggaaattgaacctgtttttgatgagcagcctgccaactggttacagagttttgaccgcacgcaacaggtgcaggatcgttaccgtgttttaggggacgatggtgtcttaaaccatgtcattctttctcctgaagtcaaagacgtcctgacctccgtacacgctattacagggcgtcgcgtggcgggggatgatgcgctctcatttgttcgcaacccctacacctggattggtgaagaggcgagccaggtgctcgatcctgacgtttatgagcagaatttacaggacgccgggatctacttttatgatttccgcctggaaccgcagattgatgaaaacaggcaaattgcgtcggtaacgcttcttctcagtcccagaactgagcaatctgtggcggatgaaacctatatctttaaacgaccaggtgaactggcggcgttgctctctgaactggaacaaaagttagcggcacaactgcccgccggagtctggcagggttacgatctggagctttccagattcagccaggaagaactgcaaggttatcaggcattgcttgaaaactggcagcaccaggcggcgggaatgaattttacccacgtcctcgatctgaacaaatacagcgaccgggttatcgggatcggtgaatttgaaaaaataagttcgccttatctggtcaaaagtgaaagtgaaaaatggcttccggagaaccttgcgcaagagatgtgcgaggccatgttctctggctgggatctcgataatcatcaacattttcaggaactggaagagcggctggaagaggcaaaagccacggatgcgccggaagtcgccatgccctggaacgacaaccttttgccccgtgaagaagcagaaattttccacgataaatggaaaaagaaaatcgatggcgaaacaaatgatggtgtcagtagtgagccggtcagtcgcgccgttctgctgatagaacaaaatatcgagcaggcgctgtatgttaaacaacggcgggattctttgctcggtgcacatcaggcagaagtcgaactaccgatgatcctcaaaacgtccattcagctacgtgaacaccagcgtaaaggggtagcgtggctccagcagttgtatctaaagtcgccaaccgagacggcgggatgtttactggcagacgatatggggctgggtaaaaccttacagattctaacttttctcatctggcaccgtgaacgtttcccggatgcgcctccttcgctgatcgttgctccggtgtcgttactcgataactgggagcgtgaggttgggaatttcttcctgcgcgagcaggtgtcgattttaaaactctacggtaatgaacttaaggcgaagaaatgcgcgaaagagagcattcctcaggcgcttaaaagtaaggggattaagaacttactgcaaagtgactgggtgggggacgcgcatattgttcttaccacctatgagacgttgcgcgatcaggaattctctctggctcgtcagccctggtccataatggtgtgcgacgaagcgcagaaaattaaaaatccagcggcattaattacccaatcggcaaaagccattcaggcacaatttaaagtcgcatgtaccgggacaccggtcgaaaatacccttgtcgatctgtggtgtttatttgacttcgtgcagccaggtttgttgggggctttgaataattttggtaaagattatctgcgccccattgagcaacagaatgataatgctgtcctcgaatcgctacgtaaattaatagaaccgcagacgctgcgccgcaccaaagaagaagtggcgaaagacctgccggataagattgaagatcaacgctgtaaacagttgaatatgctgccattgcaacgggatctctatacccactcggttgcaagctggcaaaaccaacaggagatcagcgaagggctggatcaacgaggctcaggtatgctggggttactgcatcgcctgaaacttatttgcgcatggccttattccgtcagtgcagatttgcgcttacggaacgatgccccgaaagtaaaatggctgctggagacattaaatacgattcgccagtcatccgatgacaaagtgattatttttacagaactgcgcgatattcaacgagaactgcaacatctgattgcgcagcactttggctttaagccttttattattaatggtgataccagcaccaaatctggcagcgatcaaaatcgtcagagcctgatcgatgcatttcagtcaacgcccggttttaacgtcattattttatccaccattgcggttgggtttggcgtcaatgtccaaaaagcaaatcatgtcatccactttacccgttgctggaatccggcgaaggaagatcaggcaaccgatcgggcctaccgtatcgggcagcagaaagatgtttacgtctattatccgacggtacgtgatagccagttaatgacttttgaagaaacgctggatgaattactgaaccgacgccgggcattggcgagagatatgctcaaaggggcaaccgatctgaccgccgcagattttgaagcggtgctggcgggtacaccgcaggcgtag

SEQ ID NO: 8597 - DNA, 2190 bp, Escherichia coli KOEGE 118 (317a); identical to SEQ ID NO: 8541

SEQ ID NO: 8598 - DNA, 741 bp, Escherichia coli KOEGE 118 (317a); identical to SEQ ID NO: 8542

SEQ ID NO: 8599 - DNA, 1683 bp, Escherichia coli KOEGE 118 (317a); identical to SEQ ID NO: 8543

SEQ ID NO: 8600 - DNA, 3255 bp, Escherichia coli KOEGE 118 (317a); identical to SEQ ID NO: 8544

SEQ ID NO: 8601 - DNA, 2190 bp, Escherichia coli UMEA 3151-1
atgtcctggcttaattctgtcttattggcgcttacctcggtgcaaccttatatggtaccggcaaccgttatcggcctcgtcagttttgcattcctctgttttattttcttttatttttttagagcagttaaaattattaacggcctgaaaaaatatactcagtcaattaatgacatcgaaaataatgagcctggtaatcagcttcagcatctgcaaagtttgtttgtacagcctgagttaaagcacgcctggaatgaattcgaagaatcgttgcactcacaatatgaactggaggacggggaagagaaaatcgtccgtattagggctactgcaccgagcgccagtttcttctcggagcaacaactggtcgatattccgctgaacaccgaatttttcaaacacctgcccggtattctgaccggtgtggggattatcggtaccttctacggtctgatgattggtctcaaccacttcgaccccagcacaccagagcaggtctccagcagcgtcaataatctgcttcgcgatgtgctgtacgccttcctcggttcagcatttgcgattacgttctctatccttatcacctggctggagaaattctgtctggcgaaatgctacaaatatctggaaaaattcaccgcagctctcgacgccctctatgacagcggtgttggcgaggagtaccttgcctcactggtaaaatccagtaatgaaagcgcgacccaggcacgccatctgaaagagagcctggttaccgatttacgcgatatgctgctgcatctggccaacagccagaaagtggaaaacgagcggctagcgaccaccctcagcaccacctatcgcgaaacaggacaacagtttgccgagcaagtcagcggtgcgattgaaaacagcctgaaatcaccgctggataaaatagcgggcgcggttcagaccgccagtggcgatcaaagcggcatggtacaaaacatgctgcaggatgtgctgaccgcgtttatggcgaaactcgacaccacctttggtcagcagtttactaatctcaacgaaatgatgggacaaaccgttggcgctattcagacaatgcaaaccggtttcggcgcgttattacaggacatgcgtcaggtgagcgatgattcccgccagggcagcgcgcagctcatcgagcaactgttatcagagatgaaatctggccagcaagctatgcaggctggcatgaatgacatgctcaccagccttcagacctcggtggctaaaattggcgcagaaggtgaaggtgccggcgagcgaatggctcgccaactagagaaaatgttcgctgatagcgaggcgcgagaaaaagcccaggcagaacatatgaccgcctttattgaagccattcagaattcagtgcagcagggacaaagcgccacaatggaaaaaatggcagcctctgtcgagtcgcttggtgaacaactgggtagcctgtttgggcagattgataagggtcagcaacagatttcagcaaatcagcaagcgaatcagcagtccctgcacgaacagactcagcgggtaatgagtgaggtagacgatcagattaaacaattggtcgaaactgttgccagccagcatcagggaacaactgaaacacttcgtttactcgcagaacaaactaaccgccagattcaggatatgcataccggcgcggacaaaatgcgtctggcggccgagcgctttgaacatgccggtgatcgggtgtcggaagcaaaccaccttaccgctgacgtgctgaataaagcgcaatcggcaggttcatcactctcccttgccaccagcgaactcacctctgtggtggctgattatcgtaacaatcgggaagcggttagcaaatccattgccatgctggagttgctcgccgcaaatacgcagtctgaacaaaccacgcgcacccaattcatcgccgaccttaagcagcacggtgagcgtctgcagagctataaccgggaagcacaggcctttatggaaaatgtcagtgacgtgctagggaaagggtttgaagacttctctgaaggtgtttcacgcagcctggataaaacgctgggcaaactggacgttgaaatggcgaaggcttctactctgctcgcgggttctgtcgaacagatcggagaaagcgtcagcgagcttgatgatgtcctgtcacgcgttcgtgcctaa

SEQ ID NO: 8602 - DNA, 741 bp, Escherichia coli UMEA 3151-1; identical to SEQ ID NO: 8538

SEQ ID NO: 8603 - DNA, 1683 bp, Escherichia coli UMEA 3151-1; identical to SEQ ID NO: 8539

SEQ ID NO: 8604 - DNA, 3243 bp, Escherichia coli UMEA 3151-1
atgctgaaacgtctgttaagtaaactgacgggaaaccgtcagcagatagaacatcacctaaaaaatcagtaccaggttgaggaaaacggacttagctttccgctatcgctggttgatgattcgcagctttgggcactggcatcctggctagaacaactggctgaagaagactatctgatatcacttacagaccggtggttgttgagttgggacgcactgtatcgcctgctggaggatgaggaacatgccagcagcctgcctcttatcggtgtacctgacgtactgcctttacgcgcaagcctgagttcacgaggagcattaagcgatagcgattttcgcgtctggattgctgaatgggctacgcttccagcccgcaagccgatccgtttcagtcgtaccggtgccattttaacccatgaaaatcagcaatacctgttatcgcgtgaaaactgggcactcttacaggcaacagaacaactcagtgcacagaaaaatcagactcctggtgaaaccactaaccagttgggatgggccgctatccgcaaatgtgcgaagcaagcagccgcaaaatttgatgattatttagaaaaaacgcatgtcgtcaaaccaacttcattgtcattacgtctgcgtaaagcaacggttgccgatactgctgttatcgaaattgagccccatttcgaggaccagcctgctaactggctaggcagttttgacaaaaactcgcaggttcacgatagctaccgcatccctggagagaatggcgaactcagccatgtcattatccctcccgaagtgaaagaagtcctgaattcaatacactcgattccaggccgtcgagtggccggaagcgaagcgctttcctttgttcgcaatccttataccttcctgggtgaagatgccgccagtgttattgcccctgaagaacatgaacaggcactgtttgatgccaggattttctttcatcatttcaggttgataccgcaactgaatgcggaaaataagatcgcagaagttacgctggtacttgagcctgtttcacctgttccccagccagaaatcacttttgggttctcagccccccgggagctggataaattcatacagcaactcggtattagcgtcgctgcacagatgcctgccggttcatggcaaggttacgagctggaattaagtcagttcactgaacagcagtggcacgattgccaggcacttctaactcgctggcagcaagaaatagaaggaaaagaatttagcgatgtgctggatattgcgaagtatggcgatcgcgtgattggcattggtgaatttgaaaaaatctcctctccctggctgaccaaagcgcagagtgaaaactggcttccagatgacatcgatttctccgcgttttcagtcgaaacactgtctggctggcaacctgaaaaccttcaccatttcgatgaactgcaggagagaattactcaggcagaagctgtaggtgaaacgcatatcaccgcaccatggaatgacagccaattaccgttggatgctgctaaaaccttcagtaagaactgggaaaaacagcaaagcactgcaaatgaatctcaaggcaacgttgcagataaaacggcccgagccgtactcaaaattgagcagaatattgaagaaacggcctacatcaaacagcgccgcaattcactcctcaatgcgcgtcatgccgagcctgaaattcctctgagccttaaagagcatatccgactcaaagaccatcaacgtgaaggcgtagcctggctccagcaactcttccttcgttcacctgaggaaaccgcaggttgcctgctggcggatgatatggggcttgggaaaacgctgcaaattctgagcttcctggtatggttcattgaaaaattcccgcaagaaccgccaagtctcattgttgctcctgtctctcttttagataactgggaacgtgaactggacaatttcttctataccgcaggaataccggtattgaaattgtatggcgagaccattaaagcggtgaaatatcccaaacaggctatccctgctcatctgcaatctcaggggatcaaaaacctgcttaaacctggctggcagggtgaggcgaaaatcatcctgacaacctacgaaacgcttcgcgaccaggagttttctctggcacgccagccgtggtccattatggtgtgcgacgaggcacaaaaaataaaaaacccagctgcgttaatcacacatgcggccaacgcggtacaagccaggtttaaagtggcatgtacaggaacacctgtcgaaaacacacttgtcgacctgtggagcttatttgattttgcccagccaggattgttaggggcactaaatgaatttggtaaacactatgttcgccccatcgagaacgaagatggccgcgatacggaacggttggaaagcctgcgagcgctgatagaacctcagactttacgccgaaccaaagaagaggttgcgcgtgatttacctcagaaaattgaagtggaaagctgcaagcaattgacgttgtctggcgtgcaaaaacagctctacctttcgtccgttgcaaattggcaacaacagcaagcactgagcgaagggatgcagcaggccggaaccggtatgttaggtttgttacaccgactgaaactcatctgtgcacaccctgcagtagttaatccagaaccacgttttcgtgataactcacccaagcttaactggctgctgaaaatactcgcagaactaaaacacaccacgaaagataaggtcattatttttacggagcttcgagatttacagcgcgaacttcaacatgcgatccaccaaaagtttggtttccgccctgtcattatcaatggtgataccagcactaaaagtcaaagtcaaaacagccgccagcgcctgattgatgattttcaggctcagcctgggtttggggtgattattctctctacggttgccgtcggattcggcgttaacgtccagaaagccaatcatgttattcatttcactcgctgctggaacccagccaaagaagatcaggcaacagaccgggcgtaccgaattgggcaaactaaagatgtgtatgtctattacccgacggtgaaggacactgaaatcaccacatttgaagaaacactggatgaccttctgcagcgtcgacgtgcattggccagagatatgctctgcgctactcccgatttgagtggcgcggattttgaggccattttgaagggggcttaa

SEQ ID NO: 8605 - DNA, 2190 bp, Escherichia coli UMEA 3899-1
atgtcctggcttaattctgtcttattggcgcttacctcggtgcaaccttatatggtaccggcaaccgttatcggcctcgtcagttttgcattcctctgttttattttcttttatttttttagagcagttaaaattattaacggcctgaaaaaatatacccagtcaattaatggcatcgaaaataatgagcctggtaatcagcttcagcatctgcaaagtttgtttgtacagcctgagttaaagcacgcctggaatgaattcgaagaatcgttgcactcacaatatgaactggaggacggggaagagaaaatcgtccgtattagggctactgcaccgagcgccagtttcttctcggagcaacaactggtcgatattccgctgaacaccgaatttttcaaacacctgcccggtattctgaccggtgtggggattatcggtaccttctacggtctgatgattggtctcaaccacttcgaccccagcacaccagagcaggtctccagcagcgtcaataatctgcttcgcgatgtgctgtacgccttcctcggttcagcatttgcgattacgttctctatccttatcacctggctggagaaattctgtctggcgaaatgctacaaatatctggaaaaattcaccgcagctctcgacgccctctatgacagcggtgttggcgaggagtaccttgcctcactggtaaaatccagtaatgaaagcgcgacccaggcacgccatctgaaagagagcctggttaccgatttacgcgatatgctgctgcatctggccaacagccagaaagtggaaaacgagcggctagcgaccaccctcagcaccacctatcgcgaaacaggacaacagtttgccgagcaagtcagcggtgcgattgaaaacagcctgaaatcaccgctggataaaatagcgggcgcggttcagaccgccagtggcgatcaaagcggcatggtacaaaacatgctgcaggatgtgctgaccgcgtttatggcgaaactcgacaccacctttggtcagcagtttactaatctcaacgaaatgatgggacaaaccgttggcgctattcagacaatgcaaaccggtttcggcgcgttattacaggacatgcgtcaggtgagcgatgattcccgccagggcagcgcgcagctcatcgagcaactgttatcagagatgaaatctggccagcaagctatgcaggctggcatgaatgacatgctcaccagccttcaggcctcggtggctaaaattggcgcagaaggtgaaggtgccggcgagcgaatggctcgccaactagagaaaatgttcgctgatagcgaggcgcgagaaaaagcccaggcagaacatatgaccgcctttattgaagccattcagaattcagtgcagcagggacaaagcgccacaatggaaaaaatggcagcctctgtcgagtcgcttggtgaacaactgggtagcctgtttgggcagattgataagggtcagcaacagatttcagcaaatcagcaagcgaatcagcagtccctgcacgaacagactcagcgggtaatgagtgaggtagacgatcagattaaacaattggtcgaaactgttgccagccagcatcagggaacaactgaaacacttcgtttactcgcagaacaaactaaccgccagattcaggatatgcataccggcgcggacaaaatgcgtctggcggccgagcgctttgaacatgccggtgatagggtgtcggaagcaaaccaccttaccgctgacgtgctgaataaagcgcaatcggcaggttcatcactctcccttgccaccagcgaactcacctctgtggtggctgattatcgtaacaatcgggaagcggttagcaaatccattgccatgctggagttgctcgccgcaaatacgcagtctgaacaaaccacgcgcacccaattcatcgccgaccttaagcagcacggtgagcgtctgcagagctataaccgggaagcacaggcctttatggaaaatgtcagtgacgtgctagggaaagggtttgaagacttctctgaaggtgtttcacgcagcctagataaaacgctgggcaaactggacgttgaaatggcgaaggcttctactctgctcgcgggttctgtcgaacagatcggagaaagcgtcagcgagcttgatgatgtcctgtcacgcgttcgtgcctaa

SEQ ID NO: 8606 - DNA, 741 bp, Escherichia coli UMEA 3899-1
atgtttggaaatgcatttggcgttaaaaaacgccgcagcgatgaagcagagaaacccttctggatctcctatgccgatttgatgactgccatgatggtgttatttctggtcgttatggttgcgtcgctgagttccgttacgcagcgtattcaacgtgcggagcaaggtgaaaaaacacgggggcaggatattttcagattgtgtgagcgcctggaattgcatgcccgcaacgtgaacaaaaccattgtggtggattgccatgataaccgtatcagttttggtgaagccgggcgtttcgatcacaaccaatttttcctgaacgctgaggggcaaaaagcgttgcaggatgtggttcctcttgtgctggaagcgtccaacagtgaagaaggtaaaaaatggtttaagcagatcgttattgaagggtttaccgacaccgacggttcgtacttatacaacctacatctctccctgcaacgttctgagtgggtaatgtgtagtctgctcgatagccgcagccctctgcaaaaaaatatctccgcagaacagcagctccaaatccgtaaacttttcctcgcgggtggtgtctccttcaataatgccaaggaaagcaaggaagccagccgccgcgtcgagttgcgcatgcagttcttcgggcttaaagataaacgtgataaggccgatgaggtggatttcccccccgtcgtcaataaagaagtttgccagttggtaatgcccctatga

SEQ ID NO: 8607 - DNA, 1683 bp, Escherichia coli UMEA 3899-1
atgacgcctgcactgaattctctttctcaacgcattgcagcgaggctctcttccagccaacgggatgaccattatctgcataatgatttccacgcgctggcctcagctgctctcgacatggaaaagcggtttgataaggcagaaaaaatccctttaccgccacaaaaaatgcgactggcagctctgcgtcgccttcgccttgcacaagaactcacggagcgagagtggcggatggtgttttatggtctcgccgataatgatccgtcatatcctgaccagccagtactgctggaggatgatacgtttttccctgaagtaaacaatgcaatcaaaaagcggcttgaaactaaaaccctgaaacgccgagactgggccgcactctgttcaagctattttgcttaccagaacccatcacctgagacaaacccgcactggtgcgtactgcgtggtcatatcgctcagggttacatggtggtgaaagcggctatacgacgagaaaaatcgtggatgaaaaccattgagttttatcacgatatttttaccccgcaggcgggaggcgtgatctccagacagttacttgcgggtgagagcaattcactctcgtcattagaaaaaatcgcgcaaatccctgatagcagttggttgtggaaacgtattttcacggtgcttttagcgcaactggacacactcgacgatccccagtttctggacaaaattagctggttgttaggtctggctgcccagtgggtacgtttccgtgatgacatcatgactgcgaccttgactcgctattaccattctatttatcgcgatcaggctcattcagctttgaagcaggccgcgctggaatactgggataacccgcaactgaaaagccagcagaataaatggcatcagtatgtctctgagccggtggctgcgatggtccggggctggctggcaaaacaagatctgatgcatttctttgaattgctgcgcggtaatggcgatgttgaccaggcacgattgcactattggctacgtttcgccaatcagatgggatttacccgtatcgtcatggggactgatgcctggcaagaccgtggtagtgactttgtgaaattccgcgaggagaataagggacgattgagttacttacgaggtggacgtaactttgataacgccatgattatgcagatcaacgattatctgttcgttgagttttccgggacagggaatgcaatgtatgcctatcgaataggtcacgcgccatttaaccctgaatcacgcacgcttgatatcaacattcatctaaaagataaagggcgctgcgtgctccgactgccccatacaccgcgcgcagaagggtataacaaagtccggataaccggctggatgttgaaatacgacgacgagctgcgtcagttgggcattcggtggatgacagaagaagccatcaagtttgtcgataagaaagcgtcctctcccgcctctatgtccgacattaaaatcatcaacccgttgcgtgatacggctatacagcatctggttgaaggtagttcatgtatcgtcagcgataatcgacaaaaaggtggcgtactgtccgtacaactcaatactcctgacgacaccatagaaagagagttgttacggctaggctttgcgcccgtggctaaagaaccgcatcgttactggatcaaataa

SEQ ID NO: 8608 - DNA, 3243 bp, Escherichia coli UMEA 3899-1
atgctgaaacgtctgttaagtaaactgacgggaaaccgtcagcagatagaacatcacctaaaaaatcagtaccaggttgaggaaaacggacttagctttccgctatcgctggttgatgattcgcagctttgggcactggcatcctggctagaacaactggctgaagaagactatctgatatcacttacagaccggtggttgttgagttgggacgcactgtatcgcctgctggaggatgaggaacatgccagcagcctgcctcttatcggtgtacctgacgtactgcctttacgcgcaagcctgagttcacgaggagcattaagcgatagcgattttcgcgtctggattgctgaatgggctacgcttccagcccgcaagccgatccgtttcagtcgtaccggtgccattttaacccatgaaaatcagcaatacctgttatcacgtgaaaactgggcactcttacaggcaacagaacaactcagtgcacagaaaaatcagactcctggtgaaaccactaaccagttgggatgggccgctatccgcaaatgtgcgaagcaagcagccgcaaaatttgatgattatttagaaaaaacgcatgtcgtcaaaccaacttcattgtcattacgtctgcgtaaagcaacggttgccgatactgctgttatcgaaattgagccccatttcgaggaccagcctgctaactggctaggcagttttgacaaaaactcgcaggttcacgatagctaccgcatccctggagagaatggcgaactcagccatgtcattatccctcccgaagtgaaagaagtcctgaattcaatacactcgattccaggccgtcgagtggccggaagcgaagcgctttcctttgttcgcaatccttataccttcctgggtgaagatgccgccagtgttattgcccctgaagaacatgaacaggcactgtttgatgccaggattttctttcatcatttcaggttgataccgcaactgaatgcggaaaataagatcgcagaagttacgctggtacttgagcctgtttcacctgttccccagccagaaatcacttttgggttctcagccccccgggagctggataaattcatacagcaactcggtattagcgtcgctgcacagatgcctgccggttcatggcaaggttacgagctggaattaagtcagttcactgaacagcagtggcacgattgccaggcacttctaactcgctggcagcaagaaatagaaggaaaagaatttagcgatgtgctggatattgcgaagtatggcgatcgcgtgattggcattggtgaatttgaaaaaatctcctctccctggctgaccaaatcgcagagtgaaaactggcttccagatgacatcgatttctccgcgttttcagtcgaaacactgtctggctggcaacctgaaaaccttcaccatttcgatgaactgcaggagagaattactcaggcagaagctgtaggtgaaacgcatatcaccgcaccatggaatgacagccaattaccgttggatgctgctaaaaccttcagtaagaactgggaaaaacagcaaagcactgcaaatgaacctcaaggcaacgttgcagataaaacggcccgagccgtactcaaaattgagcagaatattgaagaaacggcctacatcaaacagcgccgcaattcactcctcaatgcgcgtcatgccgagcctgaaattcctctgagccttaaagagcatatccgactcaaagaccatcaacgtgaaggcgtagcctggctccagcaactcttccttcgttcacctgaggaaaccgcaggttgcctgctggcggatgatatggggcttgggaaaacgctgcaaattctgagcttcctggtatggttcattgaaaaattcccgcaagaaccgccaagtctcattgttgctcctgtctctcttttagataactgggaacgtgaactggacaatttcttctataccgcaggaataccggtattgaaattgtatggcgagaccattaaagcggtgaaatatcccaaacaggctatccctgctcatctgcaatctcaggggatcaaaaacctgcttaaacctggctggcagggtgaggcgaaaatcatcctgacaacctacgaaacacttcgcgaccaggagttttctctggcacgccagccgtggtccattatggtgtgcgacgaggcacaaaaaataaaaaacccagctgcgttaatcacacatgcggccaacgcggtacaagccaggtttaaagtggcatgtacaggaacacctgtcgaaaacacacttgtcgacctgtggagcttatttgattttgcccagccaggattgttaggggcactaaatgaatttggtaaacactatgttcgccccatcgagaacgaagatggccgcgatacggaacggttggaaagcctgcgagcgctgatagaacctcagactttacgccgaaccaaagaagaggttgcgcgtgatttacctcagaaaattgaagtggaaagctgcaagcaattgacgttgtctggcgtgcaaaaacagctctacctttcgtccgttgcaaattggcaacaacagcaagcactgagcgaagggatgcagcaggccggaaccggtatgttaggtttgttacaccgactgaaactcatctgtgcacaccctgcagtagttaatccagaaccacgttttcgtgataactcacccaagcttaactggctgctgaaaatactcgcagaactaaaacacaccacgaaagataaggtcattatttttacggagcttcgagatttacagcgcgaacttcaacatgcgatccaccaaaagtttggtttccgccctgtcattatcaatggtgataccagcactaaaagtcaaagtcaaaacagccgccagcgcctgattgatgattttcaggctcagcctgggtttggggtgattattctctctacggttgccgtcggattcggcgttaacgtccagaaagccaatcatgttattcatttcactcgctgctggaacccagccaaagaagatcaggcaacagaccgggcgtaccgaattgggcaaactaaagatgtgtatgtctattacccgacggtgaaggacactgaaatcaccacatttgaagaaacactggatgaccttctgcagcgtcgacgtgcattggccagagatatgctctgcgctactcccgatttgagtggtgcggattttgaggccattttgaagggggcttaa

SEQ ID NO: 8609 - DNA, 2190 bp, Escherichia coli B26-2; identical to SEQ ID NO: 8505

SEQ ID NO: 8610 - DNA, 741 bp, Escherichia coli B26-2; identical to SEQ ID NO: 8506

SEQ ID NO: 8611 - DNA, 1452 bp, Escherichia coli B26-2; identical to SEQ ID NO: 8507

SEQ ID NO: 8612 - DNA, 3243 bp, Escherichia coli B26-2; identical to SEQ ID NO: 8512

SEQ ID NO: 8613 - DNA, 2190 bp, Escherichia coli B102; identical to SEQ ID NO: 8505

SEQ ID NO: 8614 - DNA, 741 bp, Escherichia coli B102; identical to SEQ ID NO: 8506

SEQ ID NO: 8615 - DNA, 1452 bp, Escherichia coli B102; identical to SEQ ID NO: 8507

SEQ ID NO: 8616 - DNA, 3243 bp, Escherichia coli B102; identical to SEQ ID NO: 8512

SEQ ID NO: 8617 - DNA, 2190 bp, Escherichia coli B107; identical to SEQ ID NO: 8505

SEQ ID NO: 8618 - DNA, 741 bp, Escherichia coli B107; identical to SEQ ID NO: 8506

SEQ ID NO: 8619 - DNA, 1452 bp, Escherichia coli B107; identical to SEQ ID NO: 8507

SEQ ID NO: 8620 - DNA, 3243 bp, Escherichia coli B107; identical to SEQ ID NO: 8512

SEQ ID NO: 8621 - DNA, 2190 bp, Escherichia coli B26-1; identical to SEQ ID NO: 8505

SEQ ID NO: 8622 - DNA, 741 bp, Escherichia coli B26-1; identical to SEQ ID NO: 8506

SEQ ID NO: 8623 - DNA, 1452 bp, Escherichia coli B26-1; identical to SEQ ID NO: 8507

SEQ ID NO: 8624 - DNA, 3243 bp, Escherichia coli B26-1; identical to SEQ ID NO: 8512

SEQ ID NO: 8625 - DNA, 2190 bp, Escherichia coli B103; identical to SEQ ID NO: 8505

SEQ ID NO: 8626 - DNA, 741 bp, Escherichia coli B103; identical to SEQ ID NO: 8506

SEQ ID NO: 8627 - DNA, 1515 bp, Escherichia coli B103; identical to SEQ ID NO: 8511

SEQ ID NO: 8628 - DNA, 3243 bp, Escherichia coli B103; identical to SEQ ID NO: 8512

SEQ ID NO: 8629 - DNA, 528 bp, Escherichia coli B104
atgactgcaatgatggtgttatttctggtcgtcatggttgcgtcactgagttccgttacacagcgtattcaacgtgcggagcaaggcgaaaaagcaagggggcaggatatttccagattgtgtgaacgcctggaactgcatgcccgcaatgtgaacaaaaacatcgacgaaccgtatcagctttttcctgaacgccgaggggaaaaagcgttgcaggatgtagttcctcttgtactggaagcgtccaacagtgaagagggaagaagtggtttaagcagatcgttattgaagggccctctaataaagaagtttgccagttggttatgccactatgatcccgccctgaattctctttctcaacgcattgcagcgaggctctcttccagccaaagggatgaccattatctgcataatgatttccacgcgttgaccgcggctactcttgacatggaaaagcggttgataaaaaacccccgccacaagaaatgcggctggaggctctccgtcccagtttctgagcaaaattag

SEQ ID NO: 8630 - DNA, 924 bp, Escherichia coli B104
ttgttaggcttagctgcgcagtgggtgcgtttccgtgatgacatcatgactgcaaccctgactcgctattaccattctggctatcgcgatcagtcacatccagcgttgaagaaaagccagcaaaataaatggcatcagtatgtctccgagtcggttgccgcaatggtccggggctggttggcaaaacaggacctgacacatttctttgaactgctgcgcggtaatggcgatgtcgatcaggctcgactgcactactggctgcgtttcgctaatcagatgggatttactcgtatcatcatggggtccgatgcctggcaagatcgtggtagcgattttgtgaaattccgcgaggagaataagggacgattgagttacttacgaggtgggcgtaactttgataacgccatggttatgcaaatcaacgattatctgtttgtcgagttttccgggacaggaaatgcgatgtatgcctatcaaataggtcacgcgccatttaaccctgaatcacgcacgcttgatatcaacattcatctaaaagatcaggggcgatgcgcactcagactcccccatgcacctcgtgctgaggggtataacaaagtccggataaccggctggatgttgaaatacgacgatgagctacgtaagttgggcattcggtggatggctgaagaacccgtcaggtttgtcgataagaaagtgccccctcccgtcgctatgtctgacatcaaaatcatcaacccgttgcgtgatacggctatacaacgcctggttaaatgtagttcatgtatcgtcagcgataatcgacataaaggtggcatactgtccgtacaactcattacacctgacgacaccgtagaaagagagttgttacgactaggctttgcacctgtagctaaagaaccgcatcgttactggatcaaataa

SEQ ID NO: 8631 - DNA, 336 bp, Escherichia coli B104
atgctgaaacgtctgttaagtaaactgacgggaaaccgtcagcagatagaacaccacctaaagaatcagtatcaggttgaggaaaacggtctcagctttccgctatcgctggttgatgattcacagctttgggcactggcatcctggcttgaacaacttgctgaagaagactatctgatatcacttacagatcggtggttattgagttgggaggcactatatcgcctgctggaggatgaggaacatgccagcagcctgcctcttatcggtgtacctgacatattgcccttacgcgcaagcctgagttcacgaggagcattaagcgatattatataa

SEQ ID NO: 8632 - DNA, 2190 bp, Escherichia coli B105; identical to SEQ ID NO: 8505

SEQ ID NO: 8633 - DNA, 741 bp, Escherichia coli B105; identical to SEQ ID NO: 8506

SEQ ID NO: 8634 - DNA, 1452 bp, Escherichia coli B105; identical to SEQ ID NO: 8507

SEQ ID NO: 8635 - DNA, 3243 bp, Escherichia coli B105; identical to SEQ ID NO: 8512

SEQ ID NO: 8636 - DNA, 2190 bp, Escherichia coli B106; identical to SEQ ID NO: 8505

SEQ ID NO: 8637 - DNA, 741 bp, Escherichia coli B106; identical to SEQ ID NO: 8506

SEQ ID NO: 8638 - DNA, 1452 bp, Escherichia coli B106; identical to SEQ ID NO: 8507

SEQ ID NO: 8639 - DNA, 3243 bp, Escherichia coli B106; identical to SEQ ID NO: 8512

SEQ ID NO: 8640 - DNA, 2190 bp, Escherichia coli B40-1; identical to SEQ ID NO: 8505

SEQ ID NO: 8641 - DNA, 741 bp, Escherichia coli B40-1; identical to SEQ ID NO: 8506

SEQ ID NO: 8642 - DNA, 1452 bp, Escherichia coli B40-1; identical to SEQ ID NO: 8507

SEQ ID NO: 8643 - DNA, 3243 bp, Escherichia coli B40-1; identical to SEQ ID NO: 8512

SEQ ID NO: 8644 - DNA, 2190 bp, Escherichia coli B40-2; identical to SEQ ID NO: 8505

SEQ ID NO: 8645 - DNA, 741 bp, Escherichia coli B40-2; identical to SEQ ID NO: 8506

SEQ ID NO: 8646 - DNA, 1515 bp, Escherichia coli B40-2; identical to SEQ ID NO: 8511

SEQ ID NO: 8647 - DNA, 3243 bp, Escherichia coli B40-2; identical to SEQ ID NO: 8512

SEQ ID NO: 8648 - DNA, 2190 bp, Escherichia coli B49-2; identical to SEQ ID NO: 8505

SEQ ID NO: 8649 - DNA, 741 bp, Escherichia coli B49-2; identical to SEQ ID NO: 8506

SEQ ID NO: 8650 - DNA, 1452 bp, Escherichia coli B49-2; identical to SEQ ID NO: 8507

SEQ ID NO: 8651 - DNA, 3243 bp, Escherichia coli B49-2; identical to SEQ ID NO: 8512

SEQ ID NO: 8652 - DNA, 2190 bp, Escherichia coli B83; identical to SEQ ID NO: 8505

SEQ ID NO: 8653 - DNA, 741 bp, Escherichia coli B83; identical to SEQ ID NO: 8506

SEQ ID NO: 8654 - DNA, 1452 bp, Escherichia coli B83; identical to SEQ ID NO: 8507

SEQ ID NO: 8655 - DNA, 3243 bp, Escherichia coli B83; identical to SEQ ID NO: 8512

SEQ ID NO: 8656 - DNA, 2190 bp, Escherichia coli B84; identical to SEQ ID NO: 8505

SEQ ID NO: 8657 - DNA, 741 bp, Escherichia coli B84; identical to SEQ ID NO: 8506

SEQ ID NO: 8658 - DNA, 1452 bp, Escherichia coli B84; identical to SEQ ID NO: 8507

SEQ ID NO: 8659 - DNA, 3243 bp, Escherichia coli B84; identical to SEQ ID NO: 8512

SEQ ID NO: 8660 - DNA, 2190 bp, Escherichia coli B85; identical to SEQ ID NO: 8505

SEQ ID NO: 8661 - DNA, 741 bp, Escherichia coli B85; identical to SEQ ID NO: 8506

SEQ ID NO: 8662 - DNA, 1452 bp, Escherichia coli B85; identical to SEQ ID NO: 8507

SEQ ID NO: 8663 - DNA, 3243 bp, Escherichia coli B85; identical to SEQ ID NO: 8512

SEQ ID NO: 8664 - DNA, 2190 bp, Escherichia coli B86; identical to SEQ ID NO: 8505

SEQ ID NO: 8665 - DNA, 741 bp, Escherichia coli B86; identical to SEQ ID NO: 8506

SEQ ID NO: 8666 - DNA, 1515 bp, Escherichia coli B86; identical to SEQ ID NO: 8511

SEQ ID NO: 8667 - DNA, 3243 bp, Escherichia coli B86; identical to SEQ ID NO: 8512

SEQ ID NO: 8668 - DNA, 2190 bp, Escherichia coli; identical to SEQ ID NO: 8541

SEQ ID NO: 8669 - DNA, 741 bp, Escherichia coli; identical to SEQ ID NO: 8542

SEQ ID NO: 8670 - DNA, 1683 bp, Escherichia coli; identical to SEQ ID NO: 8543

SEQ ID NO: 8671 - DNA, 3255 bp, Escherichia coli
atgctaaaacgtctgttaagtaaactgacgggaaaccgtcagcagatagaacatcacctaaaaaatcagtaccaggttgagaaaaacggacttagctttccgctatcgctggttgatgattcgcagctttgggcactggtatcctggcttgaacaactggctgaagaagactatctgatatcacttacagaccggtggttgttgagttgggacgcactgtatcgcctgctggaggatgaggaacatgccagcagcctgcctcttatcggtgtacctgacgtactgcctttacgcgcaagcctgagttcacgaggagcattaagcgatagcgattttcgcgtctggattgctgaatgggctacgcttccagcccgcaagccggtccgtttcagtcgtaccggtgccattttaacccatgaaaatcagcaatacctgttatcgcgtgaaaactgggctctcttacaggcaacagaacaactcagtgcacagcaaaatcagactcctggcgaaaccactaaccagttgggatgggccgctatccgcaaatgtgcgaaacaagctgctgcaaaatttgatgattatttggaaaaaacgcatgtcgtcaaaccaacttcattgtcattacgtctgcgtaaagcaacggttgccgatactgctgttatcgaaattgagccccatttcgaggaccagcctgctaactggctgggcagttttgacaaaaactcgcaagttcacgatagctatcgtatccccggcgagaatggcgaactcagccatgtcattatccctcccgaagtgaaagatgtcttaaactcaatacactcaatcccaggccgtcgagtggccggaagtgaagcgctttcctttgttcgcaatccctatacatttttgggcgaagatgccgccagtgttattgcccctgaggaacatgaacaggcactgtttgatgccaagattttctttcatcatttcaggttgataccgcaactgaatgcggaaagtaagatcgcagaagttacgctgatacttgagcctgtttcacctgttccccagcctgaaatcatttttgtgttctcagccccttgggagctggataaattcatacagcaactcggtattagcgtcgctgcacagatgcctgccggttcatggcaaggttacgagctggaattaagtcagttcaccgaacagcagtggcacgattgccaggcactgctaactcgctggcaacaagaaattgaaggaaaagaatttagcgatgtgctggatattgcgaagtatggcgatagagtgattggcattggtgaatttgaaaaaatatcttctccttggctgaccaaagcgcagagtgaaaactggcttcctgatgacatcgatttctccgcgttttcagtcgaaacactgtctggctggcaacctgaaaatcttctccattttgatgaactgcaggagagaattactcgggcagaagccgctggtgaaacgcatatcaccgcaccatggaatgacagccaattaccgttggatgctgctaaaaccttcagtaagaactgggaaaaacagcaaagcactgcaaatgaatctcaaggcaacgttgcagataaaacggcccgagccgtactcaaaattgagcagaatattgaagaaacggcctacatcaaacagcgccgcaattcactcctcaatgcgcgtcatgccgaacctgaaattcctctgagccttaaagagcatatccgactcaaagaccatcaacgtgaaggcgtagcctggctccagcaactcttccttcgttcacctgaggaaaccgcaggttgcctgctggcggatgatatggggcttgggaaaacgctgcaaattctgagcttcctggtatggttcattgaaaaattcccgcaagaaccgccaagtctcattgttgcacctgtctctcttttagataactgggaacgtgaactggacaatttcttctataccgcaggaataccggtattgaaattgtatggcgagaccattaaagcggtgaaatatcccaaacaggctatccctgctcatctgcaatctcagggaatcaaaaacctgcttaaacctggctggcagggtgaggcgaaaatcatcctgacaacctacgaaacgcttcgcgaccaggagttttctctggcacgccagccgtggtccattatggtgtgcgacgaggcacaaaaaataaaaaacccagctgcgttaatcacacatgcggccaacgcggtacaagccaggtttaaagtggcatgcacaggaacgccagtcgaaaacacacttgtcgacctgtggagcttatttgattttgcccagccaggattgttaggggcactaaatgaatttggtaaacactatgttcgccccatcgagaacgaagatggccgcgatacggaacgactggaaagcctgcgggcgcttatagaacctcagactttacgccgaaccaaagaagaggttgcgcgtgatttacctcagaaaattgaagtggagagctgcaagcaattgacgttgtctggcgtgcaaaaacagctctacctttcgtctgttgcaaattggcaacaacagcaagcactgagcgaagggatgcagcaggccggaaccggtatgttaggtttgttacaccgactgaaactcatttgcgcacaccctgcagtagttaatccagagccacgttttcgtgataactcacccaaacttaactggctgctgaaaatactcgcagaaataaaacataccacgaaagataaggtcattatttttacggagcttcgagatttacagcgcgagcttcaacatgcaatccaccaaaagtttggtttccgccctgtcattatcaatggtgatactagcactaaaggtcaaagccaaaacagccgccagcgcctgattgatgattttcaggctcagcctgggtttggggtgattattctctctacggttgctgtcgggttcggcgttaacgtccagaaagccaatcatgttattcatttcactcgctgctggaatccagccaaagaagatcaggctacggaccgggcgtaccgaatagggcaaaccaaagatgtatatgtttattacccgacggtaagggacactgaaatcaccacatttgaagaaacgctggatgaccttctgcagcgtcgacgtgcattggccagggatatgctatgtgcaactcctgatttgagtagtgttgattttgaggtcatattgaaaggtgatcttacccagcaatag

SEQ ID NO: 8672 - DNA, 2190 bp, Escherichia coli; identical to SEQ ID NO: 8541

SEQ ID NO: 8673 - DNA, 741 bp, Escherichia coli; identical to SEQ ID NO: 8542

SEQ ID NO: 8674 - DNA, 1683 bp, Escherichia coli; identical to SEQ ID NO: 8543

SEQ ID NO: 8675 - DNA, 3255 bp, Escherichia coli; identical to SEQ ID NO: 8671

SEQ ID NO: 8676 - DNA, 2190 bp, Escherichia coli; identical to SEQ ID NO: 8541

SEQ ID NO: 8677 - DNA, 741 bp, Escherichia coli; identical to SEQ ID NO: 8542

SEQ ID NO: 8678 - DNA, 1683 bp, Escherichia coli; identical to SEQ ID NO: 8543

SEQ ID NO: 8679 - DNA, 3255 bp, Escherichia coli; identical to SEQ ID NO: 8671

SEQ ID NO: 8680 - DNA, 2097 bp, Escherichia coli 1-176-05_S3_C2
atgattggtttgcaccattttgaccccagcacgccagagcaggtcagcgccagcgtcgctaaccttttacgcgacgttctgtatgcgtttttaggttcggcgtttgctattacgttttccattctggtcaccatgtttgaaaaatggcgactggcgcaatgttataaaaaccttgaacttcttaccgccagcattgaccagctttttgagggcggcgtcggtgaagattacctttcgcaacttctttccagtactaaagaaaacaccacccatgcgcggcaacttaaggatggtctggtcactgacctgcgcgaaatgctgcaaaacctggtggatagccaggtgcgggaaaatcaaaagctggcagagacattatcaacaacataccgcgagtcaggccaacagtttgctgaacaggtcagtggtgctatcgaaaccagtctgaaaaatccgctggataaaattgctggtgtggtgcaaaccgcctccggcgatcagagccatcgtgtgcagtcgatgctggagaacgtcctgaccgcctttatgagcaaaatggataatacctttggtcagcaattcaccaccatgcaggagatgatggggcgttctgtggaagccattcagtctatgcaaagcggcttctcaacgttgttgcaggatatgcgtcaggccggggatgactcacgtcagggcagcgcgcaactgatctctcaactgttaagcgaaatgaaaagcggtcagcaggagatgcaggcagggatgaatgagatgctgcgcagcttgcaggaatccgttgcccgtattggcgcagaaggtgagggcgcgggcgaacggatggcgcaacaactggaaaaaatctttgccgacagcgaagcgcgtgaaaaagcgatggcggaacagatgcgcgcgtttattgaggctatccagtccagtgttcagcaagggcaaaatgaaaccatggagaaaatggcagcttccgtggatacgcttggcagccatatggcgacgctctttgcacaactggaaaatggtcagcagcaacttaatcagcagcaaaaccaggcgcaaaatctgctgatgggcaatatgagcaaaggtatcgaaacgctgacgcaaaacctggcgggcgtattcagccaactggagtcagggcaaaaacagatgagccagactcaggaacaggggcaacgcgtgctgcatgaagaaactcagcagcttctggcacgtagcgaagcgcgtgagcaggcggcggctgagcaacagcaacagtttatgacgtcgttacagcaaaccatgcattccggtcaggatgccctgcgagagaaaatgaccagcggtatcgatcatctgggtagccaacttggcaacctgtttgggcaactggaagaaggtcagaagtcgctcagtcagcaacagcaatctgcgcagagtgcgttacaacaggaagcgcagcgaatcattggtcagcttgaaagtcaggttgagtcgctgatgcagatgctgcgtgaacagcaatctgcttcaggcgatctgctgcaacggatggcgcaaaacaccacgcgccatctggaagagatacaaacaggagccgataaaatgcgcgtggctgccgatcgctttgaagctgcgggcgatcgtgttgctgaggctaatcagttgaccgctgaggtgctcaatggcacgcaacaggcaggacgcacgctttccagtgccagcgcggagttgggtgcattgattgccgattatcgtaatacccgtgaagtcgtggcgaatgccataacggcactcgaaacgctgattaaccgtagccatgatgaacaaacatcgcgcagccgttttgttgacgatctgaaagcgtactctgaacgcctgcaacaatataaccgtgaggctcaggagttcctgcataacattgccgaggtaatgggaaccagttttgaatcctttacgaccggagtggaaaacggcctgaatcgttcactgcaagagatggatacgcaactgacgaaagcggcgggagccttaagttcttcggttgagattatcggtgaaagcgtggatacgctggaaacagtactccgtcatcgtcgcgcgtaa

SEQ ID NO: 8681 - DNA, 738 bp, Escherichia coli 1-176-05_S3_C2
atgtttaaccgggtatttaatggcaggcaacggcgcagcgatgaagcggaaaaacccttctggatctcctatgcagacctgatgaccgccatgatggtgctgtttttggtggtgatggtggcgtcacttagctctgttacgcagcggatccagcaggcggaggcgggggagaaatcgcgcgggcatgatatcgctcgcctgtgtgaaaaacttgagcttcaggcgaaaaatctcaacaagacgattcaggttgactgccatgacaaccgtatcagctttggtgaagcagggcgttttgagcacaatcgctttgcgcttaacgccgaaggattacaggcgctacaggatgtggtgccgttagtgctggaggcggcaaatagcgatgaaggcaaaaaatggtttaagcaaattgttatagaaggttttacggatactgacggttcttatctctataacctgcacctttcgttgcaacgctcggaatgggtgatgtgcagtttgctggatagcagaagcgcgctacagcaaaaaataaccccggaacaacaggtccagatccgtaaattatttctggcgggcggggtttcgttcaacaatgcgaaagagagcaaagaagccagccgtcgcgtagaactgcggatgcaattctttggcctgaaagacaaaaagcgcgacgaaagcatggatgttgttcctggcattagtcaggaaacctgtcagttgggagccatgcaatga

SEQ ID NO: 8682 - DNA, 1788 bp, Escherichia coli 1-176-05_S3_C2
atgacttccgctattgaaaaactgaaaacccgtttgctgccctatcgggagcagaacgtgcagccgacggtaagtcatgcttttcactatcttcagcgcgttatcgcgcaacttgagaggaaggtagatgctcgcgcggtgcagatggttccccctctggagaaacgccgacaggccattgcccggctgcgtgcgggggatacgccaaagcccttcgagtggaagatgattttttttggccttaatgacgtggcagaaggcgatctgtttgaaattgcattgattgatgatgcaacaaacttcgcgaggattatcgctgaaattgaacaaaaaattgcgcagcagcggttaacacgccgcgaatggctggcgctatgtaccagctactttggtcattccagcgatacaccggaaaagaatccgcagtggcttcagctacgcacgcagattgctcgtgggtttcaacagctaaaagagagtgcgctgcgtcagatgtcctggatgtcggtcattgacacctatagcgatatttttaccgataatgcaggttttcttctcggacaacagcttgggcgtggagaaatcacggatatttcggtgctggagaaagtcgcgcaaattccgcaaaccagctggttatggcgcaaaattgttaaccacctggtcaatgagattttttgcctgactgacgatgattttcagcagaaaattcattctcttatcgccttgagccgccagcttacgcggtttaaagataatattctggcagccactctgacccgttattatcagtcggcttttaaacatcaaacgcatttcgaactcaagcaattggccctggaatattggggaaatccgcagttaaccagccgtaataaaagctggcaggttcacgttgaaaatccggtattactgatggtgcaaggatggttcgccaaagacgacctgaaactgttctttgaattgctgaaaggcaatcgggatgttgaccatgcgcgcctgttctactggctacgttttgccaaccaaatgagctatacgcgcattgtgctgggcgaagatgcgctgcgatccaaagatgccgattatgttgaattcagggcgaaaaacgcagggcgattaagccgtctgcaaggttctggttcacgcgataacaatgccatgattatgcgcattggtgattatctgtttgtcgaattttcgaaagtgggggcgatgtatgcctaccatatggggaatgcgccctttaatccggaaaccggcattcttgatattgattatgatctgaaagataagcggaataaccgccataaagtccggttgcgtttaccgcatttgtcgccggtatttctctactcactcaaccgaattgaggggtggatgagccgatatgacgaagaacttcgtaagctgggtattgattacgttgcggaagatttaaatcagtcctctgtcactttggatatctctcgcttcaatgcctcaaagaccgtgagtcggcctgaatctgcatcgttatctgaacatgaagtcagtgatgcaaagtcagaccgggaagagcaaatcaaaatcatcgcctcctcgttaaaagccaaaaaagatctccccgaccgggaacaacaaatccgggagattattcgttcggtcgattgcaaagtgatggataaacgagggctggggggcgcaatccatattcagttcaatgaaccagaccatgaagcggcgcaaaaattactcagccttgggtttaaacctgtgctgggtaaatttacttactggagcaaatag

SEQ ID NO: 8683 - DNA, 3240 bp, Escherichia coli 1-176-05_S3_C2
gtgttcaaaaaattgttgggtaaatttattaaagagaatacttcactacctgcttcatttgcgccgctgtatgtaatgaaagaagagggttttgctttcccctttagtcttgccgatagcgaagataactggcctgtcgcctcatgcctggaacagcttcatgaggaagattatgtttcacactggtctgattgctggtttcttagctgggatgatttttaccgcatccggaaaaatgacgactatgccagcagtctggcgatttttgctttcccttcacagcgcaatctgacggctcatcttgctgcaacaggaagcattagcgatgacacttttcgcgttttcattgataaatggaccctacctgatgactatcgccctgttgagataacttgcacaggcgccagcttttcctctgcggaaggcacctttgtgttaagtgaagagaactggcaacttctggacgcactacagcaactcaggttgcagcagcgacagacgccgggcgaaacggtcaaccaaacccgttgggccaaaatacggcggcaggccaaaaaagcaggggcaaaactggatgactatctcgcgaaaacgatcgtcatcaggccggaatcgttgcagttaaaactgcgaaaatcgctggtggtggatactccggtgctggaaattgaacctgtttttgatgagcagcctgccaactggttacagagttttgaccgcacgcaacaggtgcaggatcgctaccgcgttttaggggacgatggtgtcttaaaccatgtcattctttcccctgaagtcaaagacgtcctgacctccgtgcacgctattacggggcgtcgcgtggcgggggatgatgcgctctcatttgttcgcaacccctacacctggattggtgaagaggcgagcctggtgcttgatcctgacgtttatgagcagaatttgcaggacgccgggatctacttttatgatttccgtctggagccgcagattgatgaaaacaggcaaattgcggcggtaacgcttcttctcagccccagaactgagcaatctgtggcggatgaaacctatatctttaaacgtccaggtgaactggcggcgttgctctctgaactggagcaaaagttagcggtacaactgcccgccggagtctggcagggttacgatctggagctttccagattcagccaggaagaactgcaaggttatcaggcgttgcttgaaaactggcagcaccaggcggcgggaatgaattttacccacgtcctcgatctgaacaaatacagcgaccgggttatcgggatcggtgaatttgaaaaaataagttcgccttatctggtcaaaagtgaaagtgaaaaatggcttccggagaaccttgcgcaagagatgtgcgaggccatgttctctggctgggatctcgataatcatcaacattttcaggaactggaagagcggctggaagaggcaaaagccacggatgcgccggaagtcgccatgccctggaacgacaaccttttgccccgtgaagaagcagaaattttccacgataaatggaaaaagaaaattgacggtgaaacaaatgatggcgtcagtagtgagccggtcagtcgtgccgttctgctgatagaacaaaatatcgagcaggcgctgtatgttaaacaacggcgggactctttgctcggtgcacatcaggcagaagtcgaactgccgatgatcctcaaaacgtccattcagctacgtgaacaccagcgtaaaggggtagcgtggctccagcagttgtatctaaagtcgccaatagagacggcgggatgtttactcgcagacgatatggggctgggtaaaaccttacagattctaacttttctcatctggcatcgtgaacgtttcccggatgcgcctccttcgctgattgttgctccggtgtcgttactcgataactgggagcgtgaggttgggaatttcttcctgcgcgagcaggtgtcgattttaaaactctacggtaatgaacttaaggctaagaaatgcgcgaaagagagtattccacaggcgcttaaaagtaaggggattaagaacttactgcaaagtgactgggtgggtgacgcgcatattgttcttaccacctatgagacgttgcgcgatcaggaattttcgctggctcgtcagccctggtccataatggtgtgcgacgaagcgcagaaaattaaaaatccggcggcattaattacccaatcggcaaaagccattcaggcacaatttaaagtcgcatgtaccggaacaccggtcgaaaatacccttgtcgatctatggtgtttatttgacttcgtgcagccaggtttgttgggggctttaaataattttggtaaagattatctgcgccccattgagcaacagaatgataatgctgtcctcgaatcgctacgtaaattaatagaaccgcagacgctgcgccgcaccaaagaagaagtggcgaaagacctgccggataagattgaagatcaacgctgtaaacagttgaatatgctgccattgcaacgggatctctatacccactcggttgcaagctggcaaaatcaacaggagatcagcgaagggctggatcaacgaggctcaggtatgctggggttactgcatcgcctgaaacttatttgcgcatggccttattccgtcagtgcagatttgcgcttacggaacgatgccccgaaagtaaaatggctgctggagacattaaatacgattcgccagtcatctgatgacaaagtgattatttttacggaactgcgcgatattcaacgagaactgcaacatctgattgcgcagcattttggctttaagccttttattattaatggtgataccagcaccaaatctggcagcgatcaaaatcgtcagagtctgatcgatacatttcagtcaacgcccggttttaacgtcattattttatccaccattgcggttgggtttggcgtcaatgtccaaaaagcaaatcacgtcatccactttacccgttgctggaatccggcgaaggaagatcaggcgaccgatcgggcctaccgtatcgggcagcagaaagatgtttacgtctattatccgacggtgcgtgatagccagttaatgacttttgaagaaacgttggatgaattactgaaccgacgccgggcattggcgagagatatgctcaaaggggcaaccgatctgagcgccgcagattttgaagcggtgctggcgggcactcccctggcgtag

SEQ ID NO: 8684 - DNA, 2190 bp, Escherichia coli O157:H7 str. 2011EL-2114; identical to SEQ ID NO: 8505

SEQ ID NO: 8685 - DNA, 741 bp, Escherichia coli O157:H7 str. 2011EL-2114; identical to SEQ ID NO: 8506

SEQ ID NO: 8686 - DNA, 1683 bp, Escherichia coli O157:H7 str. 2011EL-2114
atgatacccgccctgaattctctttctcaacgcattgcagcgaggctctcttccagccaaagggatgaccattatctgcataatgatttccacgcgttgaccgcggctactcttgacatggaaaagcggtttgatagggcagaaagaatcccctcaccgccacaagaaatgcggctggaggctctacgtcgctttcgcctggcacaagaactcacggaacgagagtggcggatggtgttttatggcctcgccgataatgatccattatatcctgaccagccgatcctgctggaggatgatacatttttccccagagtaaacagtgcaatcaaaaaacgtattgaaaccaaaacgttgaaacgccgggattgggcagcactttgttcaagctattttgcctaccaacaccaatcacccgagacaaaccctcactggtgcgtactgcgggggcatatcgctcagggttacctggtagtgaaagccgctatacgacgagaaaaatcgtggatgaaaaccattgagttttatcacgacatttttaccccacaagcgggaggagtgatctccaggcagttacttgcaggtgagaacaattcactctcatcattagagaaaatcgcgcaaatccctgatagcagttggttatggaagcgcattttcactgtgcttttagctcaactggacacgctcgacgatccccagtttctgagcaaaattagctggttgttaggcttagctgcgcagtgggtgcgtttccgtgatgacatcatgactgcaaccctgactcgctattaccattctggctatcgcgatcagtcacatccagcgttgaagcaggccgcgctggaatactgggataacccccagttgaaaagccagcaaaataaatggcatcagtatgtctccgagtcggttgccgcaatggtccggggctggttggcaaaacaggacctgacacatttctttgaactgctgcgcggtaatggcgatgtcgatcaggctcgactgcactactggctgcgtttcgctaatcagatgggatttactcgtatcatcatggggtccgatgcctggcaagatcgtggtagcgattttgtgaaattccgcgaggagaataagggacgattgagttacttacgaggtgggcgtaactttgataacgccatggttatgcaaatcaacgattatctgtttgtcgagttttccgggacaggaaatgcgatgtatgcctatcaaataggtcacgcgccatttaaccctgaatcacgcacgcttgatatcaacattcatctaaaagatcaggggcgatgcgcactcagactcccccatgcacctcgtgctgaggggtataacaaagtccggataaccggctggatgttgaaatacgacgatgagctacgtaagttgggcattcggtggatggctgaagaacccgtcaggtttgtcgataagaaagtgccccctcccgtcgctatgtctgacatcaaaatcatcaacccgttgcgtgatacggctatacaacgcctggttaaatgtagttcatgtatcgtcagcgataatcgacataaaggtggcatactgtccgtacaactcattacacctgacgacaccgtagaaagagagttgttacgactaggctttgcacctgtagctaaagaaccgcatcgttactggatcaaataa

SEQ ID NO: 8687 - DNA, 3243 bp, Escherichia coli O157:H7 str. 2011EL-2114; identical to SEQ ID NO: 8512

SEQ ID NO: 8688 - DNA, 2190 bp, Escherichia coli O157:H7 str. 2011EL-2113; identical to SEQ ID NO: 8505

SEQ ID NO: 8689 - DNA, 741 bp, Escherichia coli O157:H7 str. 2011EL-2113; identical to SEQ ID NO: 8506

SEQ ID NO: 8690 - DNA, 1683 bp, Escherichia coli O157:H7 str. 2011EL-2113; identical to SEQ ID NO: 8686

SEQ ID NO: 8691 - DNA, 3243 bp, Escherichia coli O157:H7 str. 2011EL-2113; identical to SEQ ID NO: 8512

SEQ ID NO: 8692 - DNA, 2190 bp, Escherichia coli O157:H7 str. F7350; identical to SEQ ID NO: 8505

SEQ ID NO: 8693 - DNA, 741 bp, Escherichia coli O157:H7 str. F7350; identical to SEQ ID NO: 8506

SEQ ID NO: 8694 - DNA, 1683 bp, Escherichia coli O157:H7 str. F7350; identical to SEQ ID NO: 8686

SEQ ID NO: 8695 - DNA, 3243 bp, Escherichia coli O157:H7 str. F7350; identical to SEQ ID NO: 8512

SEQ ID NO: 8696 - DNA, 2190 bp, Escherichia coli O157:H7 str. 2011EL-2103; identical to SEQ ID NO: 8505

SEQ ID NO: 8697 - DNA, 741 bp, Escherichia coli O157:H7 str. 2011EL-2103; identical to SEQ ID NO: 8506

SEQ ID NO: 8698 - DNA, 1683 bp, Escherichia coli O157:H7 str. 2011EL-2103; identical to SEQ ID NO: 8686

SEQ ID NO: 8699 - DNA, 3243 bp, Escherichia coli O157:H7 str. 2011EL-2103; identical to SEQ ID NO: 8512

SEQ ID NO: 8700 - DNA, 2190 bp, Escherichia coli O157:H7 str. 2011EL-2104; identical to SEQ ID NO: 8505

SEQ ID NO: 8701 - DNA, 741 bp, Escherichia coli O157:H7 str. 2011EL-2104; identical to SEQ ID NO: 8506

SEQ ID NO: 8702 - DNA, 1683 bp, Escherichia coli O157:H7 str. 2011EL-2104; identical to SEQ ID NO: 8686

SEQ ID NO: 8703 - DNA, 3243 bp, Escherichia coli O157:H7 str. 2011EL-2104; identical to SEQ ID NO: 8512

SEQ ID NO: 8704 - DNA, 2190 bp, Escherichia coli O157:H7 str. 2011EL-2105; identical to SEQ ID NO: 8505

SEQ ID NO: 8705 - DNA, 741 bp, Escherichia coli O157:H7 str. 2011EL-2105; identical to SEQ ID NO: 8506

SEQ ID NO: 8706 - DNA, 1683 bp, Escherichia coli O157:H7 str. 2011EL-2105; identical to SEQ ID NO: 8686

SEQ ID NO: 8707 - DNA, 3243 bp, Escherichia coli O157:H7 str. 2011EL-2105; identical to SEQ ID NO: 8512

SEQ ID NO: 8708 - DNA, 2190 bp, Escherichia coli O157:H7 str. 2011EL-2106; identical to SEQ ID NO: 8505

SEQ ID NO: 8709 - DNA, 741 bp, Escherichia coli O157:H7 str. 2011EL-2106; identical to SEQ ID NO: 8506

SEQ ID NO: 8710 - DNA, 1683 bp, Escherichia coli O157:H7 str. 2011EL-2106; identical to SEQ ID NO: 8686

SEQ ID NO: 8711 - DNA, 3243 bp, Escherichia coli O157:H7 str. 2011EL-2106; identical to SEQ ID NO: 8512

SEQ ID NO: 8712 - DNA, 2190 bp, Escherichia coli O157:H7 str. 2011EL-2107; identical to SEQ ID NO: 8505

SEQ ID NO: 8713 - DNA, 741 bp, Escherichia coli O157:H7 str. 2011EL-2107; identical to SEQ ID NO: 8506

SEQ ID NO: 8714 - DNA, 1683 bp, Escherichia coli O157:H7 str. 2011EL-2107; identical to SEQ ID NO: 8686

SEQ ID NO: 8715 - DNA, 3243 bp, Escherichia coli O157:H7 str. 2011EL-2107; identical to SEQ ID NO: 8512

SEQ ID NO: 8716 - DNA, 2190 bp, Escherichia coli O157:H7 str. 2011EL-2108; identical to SEQ ID NO: 8505

SEQ ID NO: 8717 - DNA, 741 bp, Escherichia coli O157:H7 str. 2011EL-2108; identical to SEQ ID NO: 8506

SEQ ID NO: 8718 - DNA, 1683 bp, Escherichia coli O157:H7 str. 2011EL-2108; identical to SEQ ID NO: 8686

SEQ ID NO: 8719 - DNA, 3243 bp, Escherichia coli O157:H7 str. 2011EL-2108; identical to SEQ ID NO: 8512

SEQ ID NO: 8720 - DNA, 2190 bp, Escherichia coli O157:H7 str. 2011EL-2109; identical to SEQ ID NO: 8505

SEQ ID NO: 8721 - DNA, 741 bp, Escherichia coli O157:H7 str. 2011EL-2109; identical to SEQ ID NO: 8506

SEQ ID NO: 8722 - DNA, 1683 bp, Escherichia coli O157:H7 str. 2011EL-2109; identical to SEQ ID NO: 8686

SEQ ID NO: 8723 - DNA, 3243 bp, Escherichia coli O157:H7 str. 2011EL-2109; identical to SEQ ID NO: 8512

SEQ ID NO: 8724 - DNA, 2190 bp, Escherichia coli O157:H7 str. 2011EL-2111; identical to SEQ ID NO: 8505

SEQ ID NO: 8725 - DNA, 741 bp, Escherichia coli O157:H7 str. 2011EL-2111; identical to SEQ ID NO: 8506

SEQ ID NO: 8726 - DNA, 1683 bp, Escherichia coli O157:H7 str. 2011EL-2111; identical to SEQ ID NO: 8686

SEQ ID NO: 8727 - DNA, 3243 bp, Escherichia coli O157:H7 str. 2011EL-2111; identical to SEQ ID NO: 8512

SEQ ID NO: 8728 - DNA, 2190 bp, Escherichia coli O157:H7 str. 2011EL-2112; identical to SEQ ID NO: 8505

SEQ ID NO: 8729 - DNA, 741 bp, Escherichia coli O157:H7 str. 2011EL-2112; identical to SEQ ID NO: 8506

SEQ ID NO: 8730 - DNA, 1683 bp, Escherichia coli O157:H7 str. 2011EL-2112; identical to SEQ ID NO: 8686

SEQ ID NO: 8731 - DNA, 3243 bp, Escherichia coli O157:H7 str. 2011EL-2112; identical to SEQ ID NO: 8512

SEQ ID NO: 8732 - DNA, 2190 bp, Escherichia coli O111:NM str. 2010C-4735; identical to SEQ ID NO: 8505

SEQ ID NO: 8733 - DNA, 741 bp, Escherichia coli O111:NM str. 2010C-4735; identical to SEQ ID NO: 8506

SEQ ID NO: 8734 - DNA, 1683 bp, Escherichia coli O111:NM str. 2010C-4735; identical to SEQ ID NO: 8686

SEQ ID NO: 8735 - DNA, 3243 bp, Escherichia coli O111:NM str. 2010C-4735; identical to SEQ ID NO: 8512

SEQ ID NO: 8736 - DNA, 2190 bp, Escherichia coli O157:H7 str. F7377; identical to SEQ ID NO: 8505

SEQ ID NO: 8737 - DNA, 741 bp, Escherichia coli O157:H7 str. F7377; identical to SEQ ID NO: 8506

SEQ ID NO: 8738 - DNA, 1683 bp, Escherichia coli O157:H7 str. F7377; identical to SEQ ID NO: 8686

SEQ ID NO: 8739 - DNA, 3243 bp, Escherichia coli O157:H7 str. F7377; identical to SEQ ID NO: 8512

SEQ ID NO: 8740 - DNA, 2190 bp, Escherichia coli O123:H11 str. 2009C-3307; identical to SEQ ID NO: 8505

SEQ ID NO: 8741 - DNA, 741 bp, Escherichia coli O123:H11 str. 2009C-3307; identical to SEQ ID NO: 8506

SEQ ID NO: 8742 - DNA, 1683 bp, Escherichia coli O123:H11 str. 2009C-3307; identical to SEQ ID NO: 8686

SEQ ID NO: 8743 - DNA, 3243 bp, Escherichia coli O123:H11 str. 2009C-3307; identical to SEQ ID NO: 8512

SEQ ID NO: 8744 - DNA, 2190 bp, Escherichia coli 3-105-05_S1_C2
atgtcctggcttaattctgtcttattggcgcttacctcggtgcaaccttatatggtaccggcaaccgttatcggcctcgtcagttttgcattcctctgttttattttcttttatttttttagagcagttaaaattattaacggcctgaaaaaatatactcagtcaattaatgtcatcgaaaataatgagcctggtaatcagcttcagcatctgcaaagtttgtttgtacagcctgagttaaagcacgcctggaatgaattcgaagaatcgttgcactcacaatatgaactggaggacggggaagagaaaatcgtccgtattagggctactgcaccgagcgccagtttcttctcggagcaacaactggtcgatattccgctgaacaccgaatttttcaaacacctgcccggtattctgaccggtgtggggattatcggtaccttctacggtctgatgattggtctcaaccacttcgaccccagcacaccagagcaggtctccagcagcgtcaataatctgcttcgcgatgtgctgtacgccttcctcggttcagcatttgcgattacgttctctatccttatcacctggctggagaaattctgtctggcgaaatgctacaaatatctggaaaaattcaccgcagctctcgacgccctctatgacagcggtgttggcgaggagtaccttgcctcactggtaaaatccagtaatgaaagcgcgacccaggcacgccatctgaaagagagcctggttaccgatttacgcgatatgctgctgcatctggccaacagccagaaagtggaaaacgagcggctagcgaccaccctcagcaccacctatcgcgaaacaggacaacagtttgccgagcaagtcagcggtgcgattgaaaacagcctgaaatcaccgctggataaaatagcgggcgcggttcagaccgccagtggcgatcaaagcggcatggtacaaaacatgctgcaggatgtgctgaccgcgtttatggcgaaactcgacaccacctttggtcagcagtttactaatctcaacgaaatgatgggacaaaccgttggcgctattcagacaatgcaaaccggtttcggcgcgttattacaggacatgcgtcaggtgagcgatgattcccgccagggcagcgcgcagctcatcgagcaactgttatcagagatgaaatctggccagcaagctatgcaggctggcatgaatgacatgctcaccagccttcagacctcggtggctaaaattggcgcagaaggtgaaggtgccggcgagcgaatggctcgccaactagagaaaatgttcgctgatagcgaggcgcgagaaaaagcccaggcagaacatatgaccgcctttattgaagccattcagaattcagtgcagcagggacaaagcgccacaatggaaaaaatggcagcctctgtcgagtcgcttggtgaacaactgggtagcctgtttgggcagattgataagggtcagcaacagatttcagcaaatcagcaagcgaatcagcagtccctgcacgaacagactcagcgggtaatgagtgaggtagacgatcagattaaacaattggtcgaaactgttgccagccagcatcagggaacaactgaaacacttcgtttactcgcagaacaaactaaccgccagattcaggatatgcataccggcgcggacaaaatgcgtctggcggccgagcgctttgaacatgccggtgatcgggtgtcggaagcaaaccaccttaccgctgacgtgctgaataaagcgcaatcggcaggttcatcactctcccttgccaccagcgaactcacctctgtggtggctgattatcgtaacaatcgggaagcggttagcaaatccattgccatgctggagttgctcgccgcaaatacgcagtctgaacaaaccacgcgcacccaattcatcgccgaccttaagcagcacggtgagcgtctgcagagctataaccgggaagcacaggcctttatggaaaatgtcagtgacgtgctagggaaagggtttgaagacttctctgaaggtgtttcacgcagcctggataaaacgctgggcaaactggacgttgaaatggcgaaggcttctactctgctcgcgggttctgtcgaacagatcggagaaagcgtcagcgagcttgatgatgtcctgtcacgcgttcgtgcctaa

SEQ ID NO: 8745 - DNA, 741 bp, Escherichia coli 3-105-05_S1_C2; identical to SEQ ID NO: 8538

SEQ ID NO: 8746 - DNA, 1683 bp, Escherichia coli 3-105-05_S1_C2; identical to SEQ ID NO: 8539

SEQ ID NO: 8747 - DNA, 3243 bp, Escherichia coli 3-105-05_S1_C2; identical to SEQ ID NO: 8540

SEQ ID NO: 8748 - DNA, 2190 bp, Escherichia coli; identical to SEQ ID NO: 8505

SEQ ID NO: 8749 - DNA, 741 bp, Escherichia coli; identical to SEQ ID NO: 8506

SEQ ID NO: 8750 - DNA, 1683 bp, Escherichia coli; identical to SEQ ID NO: 8686

SEQ ID NO: 8751 - DNA, 3243 bp, Escherichia coli
atgctgaaacgtctgttaagtaaactgacgggaaaccgtcagcagatagaacaccacctaaagaatcagtatcaggttgaggaaaacggtctcagctttccgctatcgctggttgatgattcacagctttgggcactggcatcctggcttgaacaacttgctgaagaagactatctgatatcacttacagatcggtggttattgagttgggaggcactatatcgcctgctggaggatgaggaacatgccagcagcctgcctcttatcggtgtacctgacatattgcccttacgcgcaagcctgagttcacgaggagcattaagcgatagcgattttcgcgtctggattgctgaatgggctacatttccagcccgcaagccgattcgtttcagtcgtaccggtgccattttaacgcatgataatcagcaatacctgttatcgcgggaaaactgggcgctcttacaggaaacagaacaactcagtgcacagcaaattcagactcccggcgaaaccactaaccagctgggatgggccgctatccgcaaatgtgcgaaactcgccgccgccaaatttgatgattatttagaaaaaacgcatgtcatcaaaccaacttcattgtcattacgtctgcgtaaagcaacggttgccgatactgctgttatcgaaattgagccccatttcgaggaccagcctgctaactggctggggagttttgacaagaacttacaggttcacgatagctaccgcatcccaggagagaatggcgaactcagtcacgtcatcatccctcccgaagtgaaagaagtcctgaattcaatacactcaatcccagggcgtcgagtggccggaagtgaagcactttcctttgttcgcaatccttataccttcctgggtgaggatgccgccagtgttattgcccctgaagaacatgaacaggcactgtttgatgccaggattttctttcatcatttcaggttgataccgcaactgaatgcagaaaataagatcgcagaagttacgctgatacttgagcctgtttcacctgttccccagccagaaatcacttttgtgttctcagcgccctgggagctggataaattcatacagcaactcggtattagcgtcgctgcacagatgcctgccggttcatggcaaggttacgagctggaattaagtcagttcaccgaacagcagtggcacgattgccaggcactgctaactcgctggcaacaagaaattgaaggaaaagaatttagcgatgtgctggatattgcgaagtatggcgatagagtgattggcattggtgaatttgaaaaaatatcctctccctggctgaccaaagcgcagagtgaaaactggcttcctgatgacatcgatttctccgcgttttcaatcgaaacactatctggctggcaacctgaaaatcctcaccattttgatgaactacaggagaaaattactcaggcagaagccgctggtgaaacgtatatcaccacaccatggaatgacagccaattaccgttggatgccgctaaaaccttcagtaagaactgggaaaaacagcaaatcactgctaatgaatatcaaggcaacgttgcagataaaacggcccgagccgtactcaaaattgagcagaatattgaagaaacggcctacatcaaacagcgccgcaattcactcctcaatgcacgtcatgccgaaccagaaattcctctgagccttaaagagcatatccgacttaaagaccatcaacgtgaaggcgtagcctggctccagcaactcttccttcgttcacctgaggaaacagcaggctgcctgctggcggatgatatggggcttggaaaaacgctgcaaattctgagcttcctggtatggttcattgaaaaattcccgcaagaaccgccaaatctcattgttgctcctgtctctcttttagataactgggaacgtgagctgaacaatttcttctataccgcaggaataccagtattgaaattgtatggcgagaccattaaagcggtgaaatatcccaaacaggccatccctgctcatctgcagtctaaggggatcaaaaacctgcttaaacctggctggcaaggtgaggcaaaaatcatcctgacgacctacgaaacgcttcgcgaccaagagttttctctggcacgccagccatggtccattatggtgtgcgacgaggcacaaaaaataaaaaacccagctgcgttaatcacacatgcggccaacgcggtacaagccaggtttaaagtggcatgcacaggaacgccagtcgaaaacacacttgtcgatctgtggagcttatttgattttgcccagccaggattgttaggggcactaaatgaatttggtaaacagtatgttcgccccatcgagaacgaagatggccgcgatacagaacggctggaaagcctgcgggcgctgatagaacctcagactttacgccgaaccaaagaagaggttgcacgtgatttacctcagaaaattgaagtagaaagctgcaagcaactgacgttgtctggcgtgcaaaaacagctctacctttcgtctgttgcaaattggcaacaacagcaagcactgcgcgaagggatgcagcaggccggaaccggtatgttaggtttgttacaccgactgaaactcatctgtgcacaccctgcaatagttaatccagagccacgttttcgtgataactcacccaagcttaactggctgctgaaaatactcacagaaataaaacatacctctaaagataaggtcattatttttacggagcttcgagatttacagcgcgagcttcaacatgcaatccaccaaaattttggtttccgccctgtcattatcaatggtgatagcagcactaaaagtcaaagccaaaacagccgccaacgcctgattgatgattttcaggctcagcctgggtttggggtgattattctctctacggttgctgtcgggtttggcgttaacgtccagaaagccaatcatgttattcattttactcgctgctggaatccagccaaagaagatcaggctacggatcgggcgtatcgcattgggcaaactaaaaatgtgtatgtctattacccaactgtgagagatactgaaatcacaacatttgaagaaacactggatgatctcttacaacgccgacgagcattggccagagatatgctctgcgctactcccgatttgaactgtgcggattttgagaccattttgaagggagcctaa

SEQ ID NO: 8752 - DNA, 2190 bp, Escherichia coli; identical to SEQ ID NO: 8505

SEQ ID NO: 8753 - DNA, 741 bp, Escherichia coli; identical to SEQ ID NO: 8506

SEQ ID NO: 8754 - DNA, 1683 bp, Escherichia coli; identical to SEQ ID NO: 8686

SEQ ID NO: 8755 - DNA, 3243 bp, Escherichia coli
atgctgaaacgtctgttaagtaaactgacgggaaaccgtcagcagatagaacaccacctaaagaatcagtatcaggttgaggaaaacggtctcagctttccgctatcgctggttgatgattcacagctttgggcactggcatcctggcttgaacaacttgctgaagaagactatctgatatcacttacagatcggtggttattgagttgggaggcactatatcgcctgctggaggatgaggaacatgccagcagcctgcctcttatcggtgtacctgacatattgcccttacgcgcaagcctgagttcacgaggagcattaagcgatagcgattttcgcgtctggattgctgaatgggctacatttccagcccgcaagccgattcgtttcagtcgtaccggtgccattttaacgcatgataatcagcaatacctgttatcgcgggaaaactgggcgctcttacaggcaacagaacaactcagtgcacagcaaattcagactcccggcgaaaccactaaccagctgggatgggccgctatccgcaaatgtgcgaaactcgccgccgccaaatttgatgattatttagaaaaaacgcatgtcatcaaaccaacttcattgtcattacgtctgcgtaaagcaacggttgccgatactgctgttatcgaaattgagccccatttcgaggaccagcctgctaactggctgggcagttttgacaagaacttacaggttcacgatagctaccgcatcccaggagagaatggcgaactcagtcacgtcatcatccctcccgaagtgaaagaagtcctgaattcaatacactcaatcccagggcgtcgagtggccggaagtgaagcactttcctttgttcgcaatccttataccttcctgggtgaggatgccgccagtgttattgcccctgaagaacatgaacaggcactgtttgatgccaggattttctttcatcatttcaggttgataccgcaactgaatgcagaaaataagatcgcagaagttacgctgatacttgagcctgtttcacctgttccccagccagaaatcacttttgtgttctcagcgccctgggagctggataaattcatacagcaactcggtattagcgtcgctgcacagatgcctgccggttcatggcaaggttacgagctggaattaagtcagttcaccgaacagcagtggcacgattgccaggcactgctaactcgctggcaacaagaaattgaaggaaaagaatttagcgatgtgctggatattgcgaagtatggcgatagagtgattggcattggtgaatttgaaaaaatatcctctccctggctgaccaaagcgcagagtgaaaactggcttcctgatgacatcgatttctccgcgttttcaatcgaaacactatctggctggcaacctgaaaatcctcaccattttgatgaactacaggagaaaattactcaggcagaagccgctggtgaaacgtatatcaccacaccatggaatgacagccaattaccgttggatgccgctaaaaccttcagtaagaactgggaaaaacagcaaatcactgctaatgaatatcaaggcaacgttgcagataaaacggcccgagccgtactcaaaattgagcagaatattgaagaaacggcctacatcaaacagcgccgcaattcactcctcaatgcacgtcatgccgaaccagaaattcctctgagccttaaagagcatatccgacttaaagaccatcaacgtgaaggcgtagcctggctccagcaactcttccttcgttcacctgaggaaacagcaggctgcctgctggcggatgatatggggcttggaaaaacgctgcaaattctgagcttcctggtatggttcattgaaaaattcccgcaagaaccgccaaatctcattgttgctcctgtctctcttttagataactgggaacgtgagctgaacaatttcttctataccgcaggaataccagtattgaaattgtatggcgagaccattaaagcggtgaaatatcccaaacaggccatccctgctcatctgcagtctaaggggatcaaaaacctgcttaaacctggctggcaaggtgaggcaaaaatcatcctgacgacctacgaaacgcttcgcgaccaagagttttctctggcacgccagccatggtccattatggtgtgcgacgaggcacaaaaaataaaaaacccagctgcgttaatcacacatgcggccaacgcggtacaagccaggtttaaagtggcatgcacaggaacgccagtcgaaaacacacttgtcgatctgtggagcttatttgattttgcccagccaggattgttaggggcactaaatgaatttggtaaacagtatgttcgccccatcgagaacgaagatggccgcgatacagaacggctggaaagcctgcgggcgctgatagaacctcagactttacgccgaaccaaagaagaggttgcacgtgatttacctcagaaaattgaagtagaaagctgcaagcaactgacgttgtctggcgtgcaaaaacagctctacctttcgtctgttgcaaattggcaacaacagcaagcactgcgcgaagggatgcagcaggccggaaccggtatgttaggtttgttacaccgactgaaactcatctgtgcacaccctgcaatagttaatccagagccacgttttcgtgataactcacccaagcttaactggctgctgaaaatactcacagaaataaaacatacctctaaagataaggtcattatttttacggagcttcgagatttacagcgcgagcttcaacatgcaatccaccaaaattttggtttccgccctgtcattatcaatggtgatagcagcactaaaagtcaaagccaaaacagccgccaacgcctgattgatgattttcaggctcagcctgggtttggggtgattattctctctacggttgctgtcgggtttggcgttaacgtccagaaagccaatcatgttattcattttactcgctgctggaatccagccaaagaagatcaggctacggatcgggcgtatcgcattgggcaaactaaaaatgtgtatgtctattacccaactgtgagagatactgaaatcacaacatttgaagaaacactggatgatctcttacaacgccgacgagcattggccagagatatgctctgcgctactcccgatttgaactgtgcggattttgagaccattttgaagggagcctaa

SEQ ID NO: 8756 - DNA, 2190 bp, Escherichia coli; identical to SEQ ID NO: 8505

SEQ ID NO: 8757 - DNA, 741 bp, Escherichia coli; identical to SEQ ID NO: 8506

SEQ ID NO: 8758 - DNA, 1683 bp, Escherichia coli
atgatacccgccctgaattctctttctcaacgcattgcagcgaggctctcttccagccaaagggatgaccattatctgcataatgatttccacgcgttgaccgcggctactcttgacatggaaaagcggtttgatagggcagaaagaatcccctcaccgccacaagaaatgcggctggaggctctacgtcgctttcgcctggcacaagaactcacggaacgagagtggcggatggtgttttatggcctcgccgataatgatccattatatcctgaccagccgatcctgctggaggatgatacatttttccccagagtaaacagtgcaatcaaaaaacgtattgaaaccaaaacgttgaaacgccgggattgggcagcactttgttcaagctattttgcctaccaacaccaatcacccgagacaaaccctcactggtgcgtactgcgggggcatatcgctcagggttacctggtagtgaaagccgctatacgacgagaaaaatcgtggatgaaaaccattgagttttatcacgacatttttaccccacaagcgggaggagtgatctccaggcagttacttgcaggtgagaacaattcactctcatcattagagaaaatcgcgcaaatccctgatagcagttggttatggaagcgcattttcactgtgcttttagctcaactggacacgctcgacgatccccagtttctgagcaaaattagctggttgttaggcttagctgcgcagtgggtgcgtttccgtgatgacatcatgactgcaaccctgactcgctattaccattctggctatcgcgatcagtcacatccagcgttgaagcaggccgcgctggaatactgggataacccccagttgaaaagccagcaaaataaatggcatcagtatgtctccgagtcggttgccgcaatggtccggggctggttggcaaaacaggacctgacacatttctttgaactgctgcgcggtaatggcgatgtcgatcaggctcgactgcactactggctgcgtttcgctaatcagatgggatttactcgtatcatcatggggtccgatgcctggcaagatcgtggtagcgattttgtgaaattccgcgaggagaataagggacgattgagttacttacgaggtgggcgtaactttgataacgccatggttatgcaaatcaacgattatctgtttgtcgagttttccgggacaggaaatgcgatgtatgcctatcaaataggtcacgcgccatttaaccctgaatcacgcacgcttgatatcaacattcatctaaaagatcaggggcgatgcgcactcagactcccccatgcacctcgtgctgaggggtataacaaagtccggataaccggctggatgttgaaatacgacgatgagctacgtaagttgggcattcggtggatggctgaagaacccgtcaggtttgtcgataagaaagtgccccctcccgtcgctatgtctgacatcaaaatcatcaacccgttgcgtgatacggctatacaacacctggttaaatgtagttcatgtatcgtcagcgataatcgacataaaggtggcatactgtccgtacaactcattacacctgacgacaccgtagaaaaagagttgttacgactaggctttgcacctgtagctaaagaaccgcatcgttactggatcaaataa

SEQ ID NO: 8759 - DNA, 3243 bp, Escherichia coli; identical to SEQ ID NO: 8536

SEQ ID NO: 8760 - DNA, 2190 bp, Escherichia coli; identical to SEQ ID NO: 8505

SEQ ID NO: 8761 - DNA, 741 bp, Escherichia coli
atgtttggaaacgcatttggcgttaaaaaacgccgcagcgatgaagcagaaaaaccattctggatctcctatgccgatctgatgactgcaatgatggtgttatttctggtcgtcatggttgcgtcactgagttccgttacacagcgtattcaacgtgcggagcaaggcgaaaaagcaagggggcaggatatttccagattgtgtgaacgcctggaactgcatgcccgcaatgtgaacaaaaacatcgtagtggattgccacgataaccgtatcagctttggcgaagccgggcgtttcgctcataaccaatttttcctgaacgcagaggggcaaaaagcgttgcaggatgtagttcctcttgtactggaagcgtccaacagtgaagagggtaagaagtggtttaagcagatcgttattgaagggtttaccgacaccgacggttcgtacttatacaacctacatctctccctgcaacgctctgaatgggtaatgtgtagtctgctcgatagccgcagccctctgcaaaaaaatatctccgcagaacagcagctccaaatccgtaagcttttcctcgcgggtggcgtctccttcaataatgctaaggaaagcaaggaagccagccgccgggtcgagttgcgcatgcagttcttcgggcttaaagataaacgtgataaggccgatgaggtggattttccccccgtcgttaataaagaagtttgccagttggttatgccactatga

SEQ ID NO: 8762 - DNA, 1683 bp, Escherichia coli; identical to SEQ ID NO: 8758

SEQ ID NO: 8763 - DNA, 3243 bp, Escherichia coli
atgctgaaacgtctgttaagtaaactgacgggaaaccgtcagcagatagaacaccacctaaagaatcagtatcaggttgaggaaaacggtctcagctttccgctatcgctggttgatgattcacagctttgggcactggcatcctggcttgaacaacttgctgaagaagactatctgatatcacttacagatcggtggttattgagttgggaggcactatatcgcctgctggaggatgaggaacatgccagcagcctgcctcttatcggtgtacctgacatattgcccttacgcgcaagcctgagttcacgaggagcattaagcgatagcgattttcgcgtctggattgctgaatgggctacatttccagcccgcaagccgattcgtttcagtcgtaccggtgccattttaacgcatgataatcagcaatacctgttatcgcgggaaaactgggcgctcttacaggcaacagaacaactcagtgcacagcaaattcagactcccggcgaaaccactaaccagctgggatgggccgctatccgcaaatgtgcgaaactcgccgccgccaaatttgatgattatttagaaaaaacgcacgtcatcaaaccgacttcattgtcattacgtctgcgtaaagcaacagttgccgataccgcagttatcgaaattgaacctcatttcgaggaccagcctgctaactggctgggcagttttgacaagaacttacaggttcacgatagctaccgcatcccaggagagaatggcgaactcagtcacgtcatcatccctcccgaagtgaaagaagtcctgaattcaatacactcaatcccagggcgtcgagtggccggaagtgaagcgctttcctttgttcgcaatccttataccttcctgggtgaggatgccgccagtgttattgcccctgaagaacatgaacaggcactgtttgatgccaggattttctttcatcatttcaggttgataccgcaactgaatacggaaaataagatcacagaagttacgctgatacttgagcctgtttcacctgttccccagccagaaatcacttttgtgttctcagcgccctgggagctggataaattcatacagcaactcggtattagcgtcgctgcacagatgcctgccggttcatggcaaggttacgagctggaattaagtcagttcaccgaacagcagtggcacgattgccaggcactgctaactcgctggcaacaagaaattgaaggaaaagaatttagcgatgtgctggatattgcgaagtatggagatagagtgattggcattggtgaatttgaaaaaatatcctctccctggctgaccaaagcgcagagtgaaaactggcttcctgatggcatcgatttctccgcgttttcaatcgaaacactatctggctggcaacctgaaaatcctctccattttgatgaactacaggagataattactcaggcagaagccgctggtgaaacgtatatcaccacaccatggaatgacagccaattaccgttggatgccgctaaaaccttcagtaagaactgggaaaaacagcaaatcactgctaatgaatatcaaggcaacgttgcagataaaacggcccgagccgtactcaaaattgagcagaatattgaagaaacggcctacatcaaacagcgccgcaattcactcctcaatgagcgtcatgccgaaccagaaattcctctgagccttaaagagcatatccgacttaaagaccatcaacgtgaaggcgtagcctggctccagcaactcttccttcgttcacctgaggaaacagcaggctgcctgctggcggatgatatggggcttggaaaaacgctgcaaattctgagcttcctggtatggttcattgaaaaattcccgcaagaaccgccaaatctcattgttgctcctgtctctcttttagataactgggaacgtgagctgaacaatttcttctataccgcaggaataccagtattgaaattgtatggcgagaccattaaagcggtgaaatatcccaaacaggccatccctgctcatctgcagtctaaggggatcaaaaacctgcttaaacctggctggcaaggtgaggcaaaaatcatcctgacgacctacgaaacgcttcgcgaccaggagttttctctggcacgccagccatggtccattatggtgtgcgacgaggcacaaaaaataaaaaacccagctgcgttaatcacacatgcggccaacgcggtacaagccaggtttaaagtggcatgcacaggaacgcctgtcgaaaacacacttgtcgatctgtggagcttatttgattttgcccagcctggattgttaggggcactaaatgaatttggtaaacagtatgttcgccccatcgagaacgaagatggccgcgatacagaacggctggaaagcctgcgggcgctgatagaacctcagactttacgccgaaccaaagaagaggttgcacgtgatttacctcagaaaattgaagtagaaagctgcaagcaactgacgttgtctggcgtgcaaaaacagctctacctttcgtctgttgcaaattggcaacaacagcaagcactgcgcgaagggatgcagcaggccggaaccggtatgttaggtttgttacaccgactgaaactcatctgtgcacaccctgcaatagttaatccagagccacgttttcgtgataactcacccaagcttaactggctgctgaaaatactcgcagaaataaaacatacctcgaaagataaggtcattatttttacggagcttcgagatttacagcgcgagcttcaacatgcaatccaccaaaattttggtttccgccctgtcattatcaatggtgatagcagcactaaaagtcaaagccaaaacagccgccaacgcctgattgatgattttcaggctcagcctgggtttggggtgattattctctctacggttgctgtcgggtttggcgttaacgtccagaaagccaatcatgttattcattttactcgctgctggaatccagccaaagaagatcaggctacggatcgggcgtatcgcattgggcaaactaaaaatgtgtatgtctattacccaactgtgagagatactgaaatcacaacatttgaagaaacactggatgatctcttacaacgccgacgagcattggccagagatatgctctgcgctactcccgatttgaactgtgcggattttgagaccattttgaagggagcctaa

SEQ ID NO: 8764 - DNA, 2190 bp, Escherichia coli; identical to SEQ ID NO: 8505

SEQ ID NO: 8765 - DNA, 741 bp, Escherichia coli; identical to SEQ ID NO: 8761

SEQ ID NO: 8766 - DNA, 1683 bp, Escherichia coli; identical to SEQ ID NO: 8758

SEQ ID NO: 8767 - DNA, 3243 bp, Escherichia coli; identical to SEQ ID NO: 8763

SEQ ID NO: 8768 - DNA, 2190 bp, Escherichia coli; identical to SEQ ID NO: 8744

SEQ ID NO: 8769 - DNA, 741 bp, Escherichia coli; identical to SEQ ID NO: 8538

SEQ ID NO: 8770 - DNA, 1683 bp, Escherichia coli; identical to SEQ ID NO: 8539

SEQ ID NO: 8771 - DNA, 3243 bp, Escherichia coli; identical to SEQ ID NO: 8540

SEQ ID NO: 8772 - DNA, 2190 bp, Escherichia coli; identical to SEQ ID NO: 8744

SEQ ID NO: 8773 - DNA, 741 bp, Escherichia coli; identical to SEQ ID NO: 8538

SEQ ID NO: 8774 - DNA, 1683 bp, Escherichia coli; identical to SEQ ID NO: 8539

SEQ ID NO: 8775 - DNA, 3243 bp, Escherichia coli; identical to SEQ ID NO: 8540

SEQ ID NO: 8776 - DNA, 2190 bp, Escherichia coli; identical to SEQ ID NO: 8505

SEQ ID NO: 8777 - DNA, 741 bp, Escherichia coli; identical to SEQ ID NO: 8506

SEQ ID NO: 8778 - DNA, 1683 bp, Escherichia coli; identical to SEQ ID NO: 8758

SEQ ID NO: 8779 - DNA, 3243 bp, Escherichia coli; identical to SEQ ID NO: 8536

SEQ ID NO: 8780 - DNA, 2190 bp, Escherichia coli; identical to SEQ ID NO: 8505

SEQ ID NO: 8781 - DNA, 741 bp, Escherichia coli; identical to SEQ ID NO: 8506

SEQ ID NO: 8782 - DNA, 1683 bp, Escherichia coli; identical to SEQ ID NO: 8758

SEQ ID NO: 8783 - DNA, 3243 bp, Escherichia coli; identical to SEQ ID NO: 8763

SEQ ID NO: 8784 - DNA, 2190 bp, Escherichia coli; identical to SEQ ID NO: 8505

SEQ ID NO: 8785 - DNA, 741 bp, Escherichia coli; identical to SEQ ID NO: 8506

SEQ ID NO: 8786 - DNA, 1683 bp, Escherichia coli; identical to SEQ ID NO: 8758

SEQ ID NO: 8787 - DNA, 3243 bp, Escherichia coli; identical to SEQ ID NO: 8536

SEQ ID NO: 8788 - DNA, 2190 bp, Escherichia coli; identical to SEQ ID NO: 8505

SEQ ID NO: 8789 - DNA, 741 bp, Escherichia coli; identical to SEQ ID NO: 8506

SEQ ID NO: 8790 - DNA, 1683 bp, Escherichia coli; identical to SEQ ID NO: 8686

SEQ ID NO: 8791 - DNA, 3243 bp, Escherichia coli; identical to SEQ ID NO: 8512

SEQ ID NO: 8792 - DNA, 2190 bp, Escherichia coli
atgtcctggcttaattctgtcttattggcgcttacctcggtgcaaccttatatggtaccggcaaccgttatcggcctcgtcagttttgcattcctctgttttattttcttttatttttttagagcagttaaaattattaacggcctgaaaaaatatactcagtcaattaatggcatcgaaaataatgagcctggtaatcagcttcagcatctgcaaagtttgtttgtacagcctgagttaaagcacgcctggaatgaattcgaagaatcgttgcactcacaatatgaactggaggacggggaagagaaaatcgtccgtattagggctactgcaccgagcgccagtttcttctcggagcaacaactggtcgatattccgctgaacaccgaatttttcaaacacctgcccggtattctgaccggtgtggggattatcggtaccttctacggtctgatgattggtctcaaccacttcgaccccagcacaccagagcaggtctccagcagcgtcaataatctgcttcgcgatgtgctgtacgccttcctcggttcagcatttgcgattacgttctctatccttatcacctggctggagaaattctgtctggcgaaatgctacaaatatctggaaaaattcaccgcagctctcgacgccctctatgacagcggtgttggcgaggagtaccttgcctcactggtaaaatccagtaatgaaagcgcgacccaggcacgccatctgaaagagagcctggttaccgatttacgcgatatgctgctgcatctggccaacagccagaaagtggaaaacgagcggctagcgaccaccctcagcaccacctatcgcgaaacaggacaacagtttgccgagcaagtcagcggtgcgattgaaaacagcctgaaatcaccgctggataaaatagcgggcgcggttcagaccgccagtggcgatcaaagcggcatggtacaaaacatgctgcaggatgtgctgaccgcgtttatggcgaaactcgacaccacctttggtcagcagtttactaatctcaacgaaatgatgggacaaaccgttggcgctattcagacaatgcaaaccggtttcggcgcgttattacaggacatgcgtcaggtgagcgatgattcccgccagggcagcgcgcagctcatcgagcaactgttatcagagatgaaatctggccagcaagctatgcaggctggcatgaatgacatgctcaccagccttcaggcctcggtggctaaaattggcgcagaaggtgaaggtgccggcgagcgaatggctcgccaactagagaaaatgttcgctgatagcgaggcgcgagaaaaagcccaggcagaacatatgaccgcctttattgaagccattcagaattcagtgcagcagggacaaagcgccacaatggaaaaaatggcagcctctgtcgagtcgcttggtgaacaactgggtagcctgtttgggcagattgataagggtcagcaacagatttcagcaaatcagcaagcgaatcagcagtccctgcacgaacagactcagcgggtaatgagtgaggtagacgatcagattaaacaattggtcgaaactgttgccagccagcatcagggaacaactgaaacacttcgtttactcgcagaacaaactaaccgccagattcaggatatgcataccggcgcggacaaaatgcgtctggcggccgagcgctttgaacatgccggtgatcgggtgtcggaagcaaaccaccttaccgctgacgtgctgaataaagcgcaatcggcaggttcatcactctcccttgccaccagcgaactcacctctgtggtggctgattatcgtaacaatcgggaagcggttagcaaatccattgccatgctggagttgctcgccgcaaatacgcagtctgaacaaaccacgcgcacccaattcatcgccgaccttaagcagcacggtgagcgtctgcagagctataaccgggaagcacaggcctttatggaaaatgtcagtgacgtgctagggaaagggtttgaagacttctctgaaggtgtttcacgcagcctagataaaacgctgggcaaactggacgttgaaatggcgaaggcttctactctgctcgcgggttctgtcgaacagatcggagaaagcgtcagcgagcttgatgatgtcctgtcacgcgttcgtgcctaa

SEQ ID NO: 8793 - DNA, 741 bp, Escherichia coli; identical to SEQ ID NO: 8606

SEQ ID NO: 8794 - DNA, 1683 bp, Escherichia coli
atgacgcctgcactgaattctctttctcaacgcattgcagcgaggctctcttccagccaacgggatgaccattatctgcataatgatttccacgcgctggcctcagctgctctcgacatggaaaagcggtttgataaggcagaaaaaatccctttaccgccacaaaaaatgcgactggcagctctgcgtcgccttcgccttgcacaagaactcacggagcgagagtggcggatggtgttttatggtctcgccgataatgatccgtcatatcctgaccagccagtactgctggaggatgatacgtttttccctgaagtaaacaatgcaatcaaaaagcggcttgaaactaaaaccctgaaacgccgagactgggccgcactctgttcaagctattttgcttaccagaacccatcacctgagacaaacccgcactggtgcgtactgcgtggtcatatcgctcagggttacatggtggtgaaagcggctatacgacgagaaaaatcgtggatgaaaaccattgagttttatcacgatatttttaccccgcaggcgggaggcgtgatctccagacagttacttgcgggtgagagcaattcactctcgtcattagaaaaaatcgcgcaaatccctgatagcagttggttgtggaaacgtattttcacggtgcttttagcgcaactggacacactcgacgatccccagtttctggacaaaattagctggttgttaggtctggctgcccagtgggtacgtttccgtgatgacatcatgactgcgaccttgactcgctattaccattctatttatcgcgatcaggctcattcagctttgaagcaggccgcgctggaatactgggataacccgcaactgaaaagccagcagaataaatggcatcagtatgtctctgagccggtggctgcgatggtccggggctggctggcaaaacaagatctgatgcatttctttgaattgctgcgcggtaatggcgatgttgaccaggcacgattgcactattggctacgtttcgccaatcagatgggatttacccgtatcgtcatggggactgatgcctggcaagaccgtggtagtgactttgtgaaattccgcgaggagaataagggacgattgagttacttacgaggtggacgtaactttgataacgccatgattatgcagatcaacgattatctgttcgttgagttttccgggacagggaatgcaatgtatgcctatcgaataggtcacgcgccatttaaccctgaatcacgcacgcttgatatcaacattcatctaaaagataaagggcgctgcgtgctccgactgccccatacaccgcgcgcagaagggtataacaaagtccggataaccggctggatgttgaaatacgacgacgagctgcgtcagttgggcattcggtggatggcagaagaagccatcaagtttgtcgataagaaagcgtcctctcccgcctctatgtccgacattaaaatcatcaacccgttgcgtgatacggctatacagcatctggttgaaggtagttcatgtatcgtcagcgataatcgacaaaaaggtggcgtactgtccgtacaactcaatactcctgacgacaccatagaaagagagttgttacggctaggctttgcgcccgtggctaaagaaccgcatcgttactggatcaaataa

SEQ ID NO: 8795 - DNA, 3243 bp, Escherichia coli
atgctgaaacgtctgttaagtaaactgacgggaaaccgtcagcagatagaacatcacctaaaaaatcagtaccaggttgaggaaaacggacttagctttccgctatcgctggttgatgattcgcagctttgggcactggcatcctggctagaacaactggctgaagaagactatctgatatcacttacagaccggtggttgttgagttgggacgcactgtatcgcctgctggaggatgaggaacatgccagcagcctgcctcttatcggtgtacctgacgtactgcctttacgcgcaagcctgagttcacgaggagcattaagcgatagcgattttcgcgtctggattgctgaatgggctacgcttccagcccgcaagccgatccgtttcagtcgtaccggtgccattttaacccatgaaaatcagcaatacctgttatcacgtgaaaactgggcactcttacaggcaacagaacaactcagtgcacagaaaaatcagactcctggtgaaaccactaaccagttgggatgggccgctatccgcaaatgtgcgaagcaagcagccgcaaaatttgatgattatttagaaaaaacgcatgtcgtcaaaccaacttcattgtcattacgtctgcgtaaagcaacggttgccgatactgctgttatcgaaattgagccccatttcgaggaccagcctgctaactggctaggcagttttgacaaaaactcgcaggttcacgatagctaccgcatccctggagagaatggcgaactcagccatgtcattatccctcccgaagtgaaagaagtcctgaattcaatacactcgattccaggccgtcgagtggccggaagcgaagcgctttcctttgttcgcaatccttataccttcctgggtgaagatgccgccagtgttattgcccctgaagaacatgaacaggcactgtttgatgccaggattttctttcatcatttcaggttgataccgcaactgaatgcggaaaataagatcgcagaagttacgctggtacttgagcctgtttcacctgttccccagccagaaatcacttttgggttctcagccccccgggagctggataaattcatacagcaactcggtattagcgtcgctgcacagatgcctgccggttcatggcaaggttacgagctggaattaagtcagttcactgaacagcagtggcacgattgccaggcacttctaactcgctggcagcaagaaatagaaggaaaagaatttagcgatgtgctggatattgcgaagtatggcgatcgcgtgattggcattggtgaatttgaaaaaatctcctctccctggctgaccaaatcgcagagtgaaaactggcttccagatgacatcgatttctccgcgttttcagtcgaaacactgtctggctggcaacctgaaaaccttcaccatttcgatgaactgcaggagagaattactcaggcagaagctgtaggtgaaacgcatatcaccgcaccatggaatgacagccaattaccgttggatgctgctaaaaccttcagtaagaactgggaaaaacagcaaagcactgcaaatgaatctcaaggcaacgttgcagataaaacggcccgagccgtactcaaaattgagcagaatattgaagaaacggcctacatcaaacagcgccgcaattcactcctcaatgcgcgtcatgccgagcctgaaattcctctgagccttaaagagcatatccgactcaaagaccatcaacgtgaaggcgtagcctggctccagcaactcttccttcgttcacctgaggaaaccgcaggttgcctgctggcggatgatatggggcttgggaaaacgctgcaaattctgagcttcctggtatggttcattgaaaaattcccgcaagaaccgccaagtctcattgttgctcctgtctctcttttagataactgggaacgtgaactggacaatttcttctataccgcaggaataccggtattgaaattgtatggcgagaccattaaagcggtgaaatatcccaaacaggctatccctgctcatctgcaatctcaggggatcaaaaacctgcttaaacctggctggcagggtgaggcgaaaatcatcctgacaacctacgaaacgcttcgcgaccaggagttttctctggcacgccagccgtggtccattatggtgtgcgacgaggcacaaaaaataaaaaacccagctgcgttaatcacacatgcggccaacgcggtacaagccaggtttaaagtggcatgtacaggaacacctgtcgaaaacacacttgtcgacctgtggagcttatttgattttgcccagccaggattgttaggggcactaaatgaatttggtaaacactatgttcgccccatcgagaacgaagatggccgcgatacggaacggttggaaagcctgcgagcgctgatagaacctcagactttacgccgaaccaaagaagaggttgcgcgtgatttacctcagaaaattgaagtggaaagctgcaagcaattgacgttgtctggcgtgcaaaaacagctctacctttcgtccgttgcaaattggcaacaacagcaagcactgagcgaagggatgcagcaggccggaaccggtatgttaggtttgttacaccgactgaaactcatctgtgcacaccctgcagtagttaatccagaaccacgttttcgtgataactcacccaagcttaactggctgctgaaaatactcgcagaactaaaacacaccacgaaagataaggtcattatttttacggagcttcgagatttacagcgcgaacttcaacatgcgatccaccaaaagtttggtttccgccctgtcattatcaatggtgataccagcactaaaagtcaaagtcaaaacagccgccagcgcctgattgatgattttcaggctcagcctgggtttggggtgattattctctctacggttgccgtcggattcggcgttaacgtccagaaagccaatcatgttattcatttcactcgctgctggaacccagccaaagaagatcaggcaacagaccgggcgtaccgaattgggcaaactaaagatgtgtatgtctattacccgacggtgaaggacactgaaatcaccacatttgaagaaacactggatgaccttctgcagcgtcgacgtgcattggccagagatatgctctgcgctactcccgatttgagtggtgcggattttgaggccattttgaagggggcttaa

SEQ ID NO: 8796 - DNA, 2190 bp, Escherichia coli; identical to SEQ ID NO: 8505

SEQ ID NO: 8797 - DNA, 741 bp, Escherichia coli; identical to SEQ ID NO: 8506

SEQ ID NO: 8798 - DNA, 1683 bp, Escherichia coli; identical to SEQ ID NO: 8686

SEQ ID NO: 8799 - DNA, 3243 bp, Escherichia coli; identical to SEQ ID NO: 8512

SEQ ID NO: 8800 - DNA, 2190 bp, Escherichia coli; identical to SEQ ID NO: 8541

SEQ ID NO: 8801 - DNA, 741 bp, Escherichia coli; identical to SEQ ID NO: 8542

SEQ ID NO: 8802 - DNA, 1683 bp, Escherichia coli; identical to SEQ ID NO: 8543

SEQ ID NO: 8803 - DNA, 3255 bp, Escherichia coli; identical to SEQ ID NO: 8544

SEQ ID NO: 8804 - DNA, 2190 bp, Escherichia coli
atgtcctggcttaattccattttagtaacacttacatctgtagaaccctataaggtacctgtcactgttatcgtcactgttacctttgcctttgtctgctttattttcttttatttactaagatccatcagaattatttatggattaaaaaaatacacgcgttcaattaacagcattgaaaaaagtgcgccagaggttcagcttgaacaccttaagagcctgtttcagcagtctgaactcaagcatgcgtggaatgagttcgaagaatcgttgcactcacaatatgaactggagaacggcgaagagaaaatcgtccgtattcgggctactgcgccgagcgccagcttcttctcggagcaacaactggtcgatattccgctgaacactgaatttttcaaacacctgcccggtattctgaccggtatgggaattatcggtaccttctacggtctgatgattggtctcaaccacttcgaccccagcacaccagagcaggtctccagcagcgtcaataatctactacgcgatgtactgtacgccttcctgggttctgcatttgctatttttgcttccattctggtcacctggcttgaaaaattatccatcgctaaaagctacaaatatctggaaaaattcaccgcagccctcgactccctgtatgacagcggcgttggcgaggagtaccttgcctcactggtgaagtccagtaatgaaagcgcgacccaggcacgccatctgaaagagagcctggttacagatttacgcgatatgttactacatctggccgaaagtcagaaaatcgaaagtgaacgcctcgcaaatacgttaagcgcaacttaccgcgaatcaggttcacaatttgccgaccaggtcagcggtgcgattgaaaacagcttgaagtcaccattggataaaattgccggtgcggttcagaccgccagcggcgatcaaagcggcatggtacaaaacatgctgcaggatgtactgaccgcgtttatggcgaaactcgacaccacctttggtcagcagtttacaaacctcaacgaaatgatgagacaaaccgttggtgcaattcagaccatgcaaaccggtttctccgcgttattacaggacatgcgtcaggtgagcgacgattcccgccagggcagcgcgcagctcatcgagcaactgttatcagagatgaaatctggccagcaagctctacaggcaggcatgaatgatatgctcaccagccttcaggcctcagtggcgaaaattggcgcagaaggtgaaggggccggtgaacgtatagctcgccaactggaaaaaatgttcgctgatagcgaggcgcgagaaaaagctcaggcagaacatatggctgcctttgttgaagccattcagaattcagtgcaacagggacaaagcgccacaatggaaaaaatggcagcctctgtcggggcgcttggtgaacaactgggtagcctgtttggacagatcgataagggtcagcaacaaatttcagcgactcagcaagcgaatcagcagtccctgcacgaacagactcaacgggtaatgagtgaggtagacgatcagattaaacaattggtcgaaactgttgccagccagcatcagggaacaacagaaactcttcgtttgctcgcagaacaaactaaccggcagattcaggatatgcaagctggcgcggacaagatgcgtctggctgctgaacgctttgaacatgccggtgagcgggtgtcggaagcaaaccaccttaccgctgatgtgctgaataaagcgcaatcggcaggttcatcactttcccttgccaccagcgagctcacctccgttgtggctgattatcgtaacaatcgggaagcggttagcaaatccattgccatgctggagttgctcgccgcaaatacgcagtcagaacaaaccacgcgcaaccaattcatcgcagatcttaagcaacacggtgagcgtctacagagctataaccgggaagcacaggtctttatggaaaatgtaagtgacgtgctcgggaaaggatttgaagacttctctgaaggtgtttcacgcagcctggataaaacgctgggtaaactggacgtcgaaatggcgaaagcctctaatctgctcgcgggatctgtcgaacagctcggagaaagcgtcagcgaacttgatgatgttctgtcacgcgtacgaacctaa

SEQ ID NO: 8805 - DNA, 741 bp, Escherichia coli
atgtttggaaacgcatttggcgttaaaaaacgccgcagcgatgaagcagaaaaaccattctggatctcctatgccgatctgatgactgcaatgatggtgttatttctggtcgtcatggttgcgtcactgagttccgttacacagcgtattcaacgtgcggagcaaggcgaaaaagcaagggggcaggatatttccagattgtgtgaacgcctggaactgcatgcccgcaatgtgaacaaaaacatcgtagtggattgccacgataaccgtatcagctttggcgaagccgggcgtttcgctcataaccaatttttcctgaacgccgaggggcaaaaagcgttgcaggatgtagttcctcttgtactggaagcgtccaacagtgaagagggtaagaagtggtttaagcagatcgttattgaagggtttaccgacaccgacggttcgtacttatacaacctacatctctccctgcaacgctctgaatgggtaatgtgtagtctgctcgatagccgcagccctctgcaaaaaaatatctccgcagaacagcagctccaaatccgtaaacttttcctcgcgggtggcgtctccttcaataatgctaaggaaagcaaggaagccagccgccgggtcgagttgcgcatgcagttcttcgggcttaaagataaacgtgataaggccgatgaggtggattttccccccgtcgttaataaagaagtttgccagttggttatgccactatga

SEQ ID NO: 8806 - DNA, 1683 bp, Escherichia coli
atgacacccgccctgaattctctttctcaacgcattgcagcgaggctctcttccagccaaagggatgaccattatctgcataatgatttccacgcgttgaccgcggctactcttgacatggaaaagcggtttgatagggcagaaagaatcccctcaccgccacaagaaatgcggctggaggctctacgtcgctttcgcctggcacaagaactcacggaacgagagtggcggatggtgttttatggcctcgccgataatgatccattatatcctgaccagccgatcctgctggaggatgatacatttttccccagagtaaatagtgcaatcaaaaaacgtattgaaaccaaaacgttgaaacgccgggattgggcagcactttgttcaagctattttgcctaccaacaccaatcacccgagacaaaccctcactggtgcgtactgcgggggcatatcgctcagggttacctggtagtgaaagccgctatacgacgagaaaaatcgtggatgaaaaccattgagttttatcacgacatttttaccccgcaagcgggaggagtgatctccaggcagttacttgcaggtgagaacaattcactctcatcattagagaaaatcgcgcaaatccctgatagcagttggttatggaagcgcattttcactgtgcttttagctcaactggacacgctcgacgatccccagtttctgagcaaaattagctggttgttaggcttagctgcgcagtgggtgcgtttccgtgatgacatcatgactgcaaccctgactcgctattaccattctggctatcgcgatcagtcacatccagcgttgaaacaggccgcgctggaatactgggataacccccagttgaaaagccagcagaataaatggcatcagtatgtctccgagtcggttgccgcaatggtccggggctggttggcaaaacaggacctgacacatttctttgaacttctgcgcggtaatggcgatgtcgatcaggctcgactgcactactggctacgtttcgccaatcagatgggatttactcgtatcatcatggggtccgatgcctggcaagatcgtggtagcgattttgtgaaattccgcgaggaaaataagggacgattgagttacttacgaggtgggcgtaactttgataacgccatgattatgcaaatcaacgattatctgtttgtcgagttttccgggacaggaaatgcgatgtatgcctatcaaataggtcacgcgccatttaaccctgaatcacgcacgcttgatatcaacattcatctaaaagatcaggggcgatgcgcactcagactcccccatgcacctcgtgctgaggggtataacaaagtccagataaccggctggatgttgaaatacgacgatgagctacgtaagttgggcattcggtggatggctgaagaacccgtcaagtttgtcgataagaaagtgtcccctcccgtcgctatgtctgacatcaaaatcatcaacccgttgcgtgatacggctatacaacacctggttaaatgtagttcatgtatcgtcagcgataatcgacataaaggtggcatactgtccgtacaactcattacacctgacgacaccgtagaaagagagttgttacgactaggctttgcacctgtagctaaagaaccgcatcgttactggatcaaataa

SEQ ID NO: 8807 - DNA, 3243 bp, Escherichia coli
atgctgaaacgtctgttaagtaaactgacgggaaaccgtcagcagatagaacaccacctaaagaatcagtatcaggttgaggaaaacggtctcagctttccgctatcgctggttgatgattcacagctttgggcactggcatcctggcttgaacaacttgctgaagaagactatctgatatcacttacagaccggtggttattgagttgggaggcactatatcgcctgctggaggatgaggaacatgccagcagcctgcctcttatcggtgtacctgacgtattgcccttacgcgcaagcctgagttcacgaggagcattaagcgatagcgattttcgcgtctggattgctgaatgggctacatttccagcccgcaaaccgatccgtttcagtcgtaccggtgccattttaacccatgaaaatcagcaatacctgttatcgcgggaaaactgggcactcttacaggcaacagaacaactcagtgcacagcaaaatcagactcctggtgaaaccactaaccagttgggatgggccgctatccgcaaatgtgcgaaacaagctgctgcaaaatttgatgattatttggaaaaaacgcatgtcatcaaaccaacttcattgtcattacgtctgcgtaaagcaacggttgccgatactgctgttatcgaaattgagccccatttcgaggaccagcctgctaactggctgggcagttttgacaagaacttacaggttcacgatagctaccgcatcccaggagagaatggcgaactcagtcacgtcatcatccctcccgaagtgaaagaagtcctgaattcaatacactcaatcccagggcgtcgagtggccggaagtgaagcactttcctttgttcgcaatccttataccttcctgggtgaggatgccgccagtgttattgcccctgaagaacatgaacaggcactgtttgatgccaggattttctttcatcatttcaggttgataccgcaactgaatgcggaaaataagatcgcagaagttacgctgatacttgagcctgtttcacctgttccccagccagaaatcacttttgtgttctcagcgccctgggagctggataaattcatacagcaactcggtattagcgtcgctgcacagatgcctgccggttcatggcaaggttacgagctggaattaagtcagttcaccgaacagcagtggcacgattgccaggcactgctaactcgctggcaacaagaaattgaaggaaaagaatttagcgatgtgctggatattgcgaagtatggcgatagagtgattggcattggtgaatttgaaaaaatatcctctccctggctgaccaaagcgcagagtgaaaactggcttcctgatgacattgatttctccgcgttttcaatcgaaacactatctggctggcaacctgaaaatcctcaccattttgatgaactacaggagaaaattactcaggcagaagccgctggtgaaacgtatatcaccacaccatggaatgacagccaattaccgttggatgccgctaaaaccttcagtaagaactgggaaaaacagcaaatcactgctaatgaatatcaaggcaacgttgcagataaaacggcccgagccgtactcaaaattgagcagaatattgaagaaacggcctacatcaaacagcgccgcaattcactcctcaatgcacgtcatgccgaaccagaaattcctctgagccttaaagagcatatccgacttaaagaccatcaacgtgaaggcgtagcctggctccagcaactcttccttcgttcacctgaggaaacagcaggctgcctgctggcggatgatatggggcttggaaaaacgctgcaaattctgagcttcctggtatggttcattgaaaaattcccgcaagaaccgccaaatctcattgttgctcctgtctctcttttagataactgggaacatgagctgaacaatttcttctataccgcaggaataccagtattgaaattgtatggcgagaccattaaagcggtgaaatatcccaaacaggccatccctgctcatctgcagtctaaggggatcaaaaacctgcttaaacctggctggcaaggtgaggcaaaaatcatcctgacgacctacgaaacgcttcgcgaccaggagttttctctggcacgccagccatggtccattatggtgtgcgacgaggcacaaaaaataaaaaacccagctgcgttaatcacacatgcagccaacgcggtacaagccaggtttaaagtggcatgcacaggaacgccagtcgaaaacacacttgtcgatctgtggagcttatttgattttgcccagccaggattgttaggggcactaaatgaatttggtaaacagtatgttcgccccatcgagaacgaagatggccgcgatacagaacggctggaaagcctgcgggcgctgatagaacctcagactttacgccgaaccaaagaagaggttgcacgtgatttacctcagaaaattgaagtagaaagctgcaagcaactgacgttgtctggcgtgcaaaaacagctctacctttcgtctgttgcaaattggcaacaacagcaagcactgcgcgaagggatgcagcaggccggaaccggtatgttaggtttgttacaccgactgaaactcatctgtgcacaccctgcaatagttaatccagagccacgttttcgtgataactcacccaagcttaactggctgctgaaaacactcgcagaaataaaacatacctcgaaagataaggtcattatttttacggagcttcgagatttacagcgcgagcttcaacatacaatccaccaaaattttggtttccgccctgtcattatcaatggtgataccagcactaaaagtcaaagccaaaacaaccgccagcgcctgattgatgattttcaggctcagcctgggtttggggtgattattctctctacggttgctgtcgggtttggcgttaacgtccagaaagccaatcatgtgattcattttactcgctgctggaatccagccaaagaagatcaggctacggatcgggcgtatcgcattgggcaaactaaagatgtgtatgtctattacccaactgtgagagatactgaaatcacaacatttgaagaaacactggatgatctcctacaacgccgacgagcattggccagagatatgctctgcgctactcccgatttgaactgtgcggattttgagaccattttgaagggagcctaa

SEQ ID NO: 8808 - DNA, 2190 bp, Escherichia coli
atgtcctggcttaattccattttagtaacacttacatctgtagaaccctataaggtacctgtcactgttatcgtcactgttacctttgcctttgtctgctttattttcttttatttactgagatccatcagaattatttatggattaaaaaaatacacgcgttcaattaacagcattgaaaaaagtgcgccagaggttcagcttgaacaccttaagagcctgtttcagcggtctgaactcaagcatgcgtggaatgagttcgaagaatcgttgcactcacaatatgaactggagaacggcgaagagaaaatcgtccgtattcgggctactgcgccgagcgccagcttcttctcggagcaacaactggtcgatattccgctgaacactgaatttttcaaacacctgcccggtattctgaccggtatgggaattatcggtaccttctacggtctgatgattggtctcaaccacttcgaccccagcacaccagagcaggtctccagtagcgtcaataatctactacgcgatgtactgtacgccttcctgggttctgcatttgctatttttgcttccattctggtcacctggcttgaaaaattatccatcgctaaaagctacaaatatctggaaaaattcaccgcagccctcgactccctgtatgacagcggcgttggcgaggagtaccttgcctcactggtgaagtccagtaatgaaagcgcgacccaggcacgccatctgaaagagagcctagttacagatttacgcgatatgttactacatctggccgaaagtcagaaaatcgaaaatgaacgcctcgcaaatacgttaagcgcaacttaccgcgaatcaggttcacaatttgccgaccaggtcagcggtgcgattgaaaacagcttgaagtcaccattggataaaattgccggtgcggttcagaccgccagcggcgatcaaagcggcatggtacaaaacatgctgcagaatgtactgaccgcgtttatggcgaaactcgacaccacctttggtcagcagtttacaaacctcaacgaaatgatggggcaaaccgttggtgcaattcagaccatgcaaaccggtttctccgcgttattacaggacatgcgtcaggtgagcgacgattcccgccagggcagcgcgcagcttatcgagcaactgttatcagagatgaaatctggccagcaagctctacaggctggcatgaatgatatgctcaccagccttcaagtctcagtggcgaaaattggcgcagaaggtgaaggggccggtgaacgtatagctcgccaactggaaaaaatgttcgctgatagcgaggcgcgagaaaaagcccaggcagaacatatggctgcttttgttgaagccattcagaattcagtacaacagggacaaagcgccacaatggaaaaaatggcagcctctgtcggggcgcttggtgaacaactgggtagcctgtttggacagatcgataagggtcagcaacaaatttcagcgactcagcaagcgaatcagcagtccttgcacgaacagactcaacgggtaatgagtgaggtagacgatcagattaaacaattggtcgaaactgttgccagccagcatcagggaacaacagaaactcttcgtttgctcgcagaacaaactaaccggcagattcaggatatgcaagctggcgcggacaagatgcgtctggctgctgaacgctttgaacatgccggtgagcgggtgtcggaagcaaaccaccttaccgctgatgtgctgaataaagcgcaatcggcaggttcatcactttcccttgccaccagcgagctcacctccgttgtggctgattatcgtaacaatcgggaagcggttagcaaatccattgccatgctggagttgctcgccgcaaatacgcagtcagaacaaaccacgcgcaaccaattcatcgcagatcttaagcaacacggtgagcgtctacagagctataaccgggaagcacaggtctttatggaaaatgtaagtgacgtgctcgggaaaggatttgaagacttctctgaaggtgtttcacgcagcctggataaaacgctgggtaaactggacgtcgaaatggcgaaagcctctaatctgctcgcgggatctgtcgaacagctcggagaaagcgtcagcgaacttgatgatgttctgtcacgcgtacgaacctaa

SEQ ID NO: 8809 - DNA, 741 bp, Escherichia coli; identical to SEQ ID NO: 8506

SEQ ID NO: 8810 - DNA, 1683 bp, Escherichia coli; identical to SEQ ID NO: 8686

SEQ ID NO: 8811 - DNA, 3243 bp, Escherichia coli; identical to SEQ ID NO: 8512

SEQ ID NO: 8812 - DNA, 2190 bp, Escherichia coli; identical to SEQ ID NO: 8808

SEQ ID NO: 8813 - DNA, 741 bp, Escherichia coli; identical to SEQ ID NO: 8506

SEQ ID NO: 8814 - DNA, 1683 bp, Escherichia coli; identical to SEQ ID NO: 8686

SEQ ID NO: 8815 - DNA, 3243 bp, Escherichia coli
atgctgaaacgtctgttaagtaaactgacgggaaaccgtcagcagatagaacaccacctaaagaatcagtatcaggttgaggaaaacggtctcagctttccgctatcgctggttgatgattcacagctttgggcactggcatcctggcttgaacaacttgctgaagaagactatctgatatcacttacagatcggtggttattgagttgggaggcactatatcgcctgctggaggatgaggaacatgccagcagcctgcctcttatcggtgtacctgacatattgcccttacgcgcaagcctgagttcacgaggagcattaagcgatagcgattttcgcgtctggattgctgaatgggctacatttccagcccgcaagccgattcgtttcagtcgtaccggtgccattttaacgcatgataatcagcaatacctgttatcgcgggaaaactgggcgctcttacaggcaacagaacaactcagtgcacagcaaattcagactcccggcgaaaccactaaccagctgggatgggccgctatccgcaaatgtgcgaaactcgccgccgccaaatttgatgattatttagaaaaaacgcacgtcatcaaaccgacttcattgtcattacgtctgcgtaaagcaacagttgccgataccgcagttatcgaaattgaacctcatttcgaggaccagcctgctaactggctgggcagttttgacaagaacttacaggttcacgatagctaccgcatcccaggagagaatggcgaactcagtcacgtcatcatccctcccgaagtgaaagaagtcctgaattcaatacactcaatcccagggcgtcgagtggccggaagtgaagcgctttcctttgttcgcaatccttataccttcctgggtgaggatgccgccagtgttattgcccctgaagaacatgaacaggcactgtttgatgccaggattttctttcatcatttcaggttgataccgcaactgaatacggaaaataagatcacagaagttacgctgatacttgagcctgtttcacctgttccccagccagaaatcacttttgtgttctcagcgccctgggagctggataaattcatacagcaactcggtattagcgtcgctgcacagatgcctgccggttcatggcaaggttacgagctggaattaagtcagttcaccgaacagcagtggcacgattgccaggcactgctaactcgctggcaacaagaaattgaaggaaaagaatttagagatgtgctggatattgcgaagtatggagatagagtgattggcattggtgaatttgaaaaaatatcctctccctggctgaccaaagcgcagagtgaaaactggcttcctgatggcatcgatttctccgcgttttcaatcgaaacactatctggctggcaacctgaaaatcctctccattttgatgaactacaggagataattactcaggcagaagccgctggtgaaacgtatatcaccacaccatggaatgacagccaattaccgttggatgccgctaaaaccttcagtaagaactgggaaaaacagcaaatcactgctaatgaatatcaaggcaacgttgcagataaaacggcccgagccgtactcaaaattgagcagaatattgaagaaacggcctacatcaaacagcgccgcaattcactcctcaatgcgcgtcatgccgaaccagaaattcctctgagccttaaagagcatatccgacttaaagaccatcaacgtgaaggcgtagcctggctccagcaactcttccttcgttcacctgaggaaacagcaggctgcctgctggcggatgatatggggcttggaaaaacgctgcaaattctgagcttcctggtatggttcattgaaaaattcccgcaagaaccgccaaatctcattgttgctcctgtctctcttttagataactgggaacgtgagctgaacaatttcttctataccgcaggaataccagtattgaaattgtatggcgagaccattaaagcggtgaaatatcccaaacaggccatccctgctcatctgcagtctaaggggatcaaaaacctgcttaaacctggctggcaaggtgaggcaaaaatcatcctgacgacctacgaaacgcttcgcgaccaggagttttctctggcacgccagccatggtccattatggtgtgcgacgaggcacaaaaaataaaaaacccagctgcgttaatcacacatgcggccaacgcggtacaagccaggtttaaagtggcatgcacaggaacgccagtcgaaaacacacttgtcgatctgtggagcttatttgattttgcccagcctggattgttaggggcactaaatgaatttggtaaacagtatgttcgccccatcgagaacgaagatggccgcgatacagaacggctggaaagcctgcgggcgctgatagaacctcagactttacgccgaaccaaagaagaggttgcacgtgatttacctcagaaaattgaagtagaaagctgcaagcaactgacgttgtctggcgtgcaaaaacagctctacctttcgtctgttgcaaattggcaacaacagcaagcactgcgcgaagggatgcagcaggccggaaccggtatgttaggtttgttacaccgactgaaactcatctgtgcacaccctgcaatagttaatccagagccacgttttcgtgataactcacccaagcttaactggctgctgaaaatactcgcagaaataaaacatacctcgaaagataaggtcattatttttacggagcttcgagatttacagcgcgagcttcaacatgcaatccaccaaaattttggtttccgccctgtcattatcaatggtgatagcagcactaaaagtcaaagccaaaacagccgccaacgcctgattgatgattttcaggctcagcctgggtttggggtgattattctctctacggttgctgtcgggtttggcgttaacgtccagaaagccaatcatgttattcattttactcgctgctggaatccagccaaagaagatcaggctacggatcgggcgtatcgcattgggcaaactaaaaatgtgtatgtctattacccaactgtgagagatactgaaatcacaacatttgaagaaacactggatgatctcttacaacgccgacgagcattggccagagatatgctctgcgctactcccgatttgaactgtgcggattttgagaccattttgaagggagcctaa

SEQ ID NO: 8816 - DNA, 2190 bp, Escherichia coli; identical to SEQ ID NO: 8808

SEQ ID NO: 8817 - DNA, 741 bp, Escherichia coli; identical to SEQ ID NO: 8506

SEQ ID NO: 8818 - DNA, 1683 bp, Escherichia coli; identical to SEQ ID NO: 8686

SEQ ID NO: 8819 - DNA, 3243 bp, Escherichia coli; identical to SEQ ID NO: 8512

SEQ ID NO: 8820 - DNA, 2190 bp, Escherichia coli; identical to SEQ ID NO: 8808

SEQ ID NO: 8821 - DNA, 741 bp, Escherichia coli; identical to SEQ ID NO: 8506

SEQ ID NO: 8822 - DNA, 1683 bp, Escherichia coli; identical to SEQ ID NO: 8686

SEQ ID NO: 8823 - DNA, 3243 bp, Escherichia coli; identical to SEQ ID NO: 8512

SEQ ID NO: 8824 - DNA, 2190 bp, Escherichia coli; identical to SEQ ID NO: 8537

SEQ ID NO: 8825 - DNA, 741 bp, Escherichia coli; identical to SEQ ID NO: 8538

SEQ ID NO: 8826 - DNA, 1683 bp, Escherichia coli; identical to SEQ ID NO: 8539

SEQ ID NO: 8827 - DNA, 3243 bp, Escherichia coli; identical to SEQ ID NO: 8540

SEQ ID NO: 8828 - DNA, 2190 bp, Escherichia coli; identical to SEQ ID NO: 8505

SEQ ID NO: 8829 - DNA, 741 bp, Escherichia coli; identical to SEQ ID NO: 8506

SEQ ID NO: 8830 - DNA, 1683 bp, Escherichia coli
atgatacccgccctgaattctctttctcaacgcattgcagcgaggctctcttccagccaaagggatgaccattatctgcataatgatttccacgcgttgaccgcggctactcttgacatggaaaagcggtttgatagggcagaaagaatcccctcaccgccacaagaaatgcggctggaggctctacgtcgctttcgcctggcacaagaactcacggaacgagagtggcggatggtgttttatggcctcgccgataatgatccattatatcctgaccagccgatcctgctggaggatgatacatttttccccagagtaaacagtgcaatcaaaaaacgtattgaaaccaaaacgttgaaacgccgggattgggcagcactttgttcaagctattttgcctaccaacaccaatcacccgagacaaaccctcactggtgcgtactgcgggggcatatcgctcagggttacctggtagtgaaagccgctatacgacgagaaaaatcgtggatgaaaaccattgagttttatcacgacatttttaccccacaagcgggaggagtgatctccaggcagttacttgcaggtgagaacaattcactctcatcattagagaaaatcgcgcaaatccctgatagcagttggttatggaagcgcattttcactgtgcttttagctcaactggacacgctcgacgatccccagtttctgagcaaaattagctggttgttaggcttagctgcgcagtgggtgcgtttccgtgatgacatcatgactgcaaccctgactcgctattaccattctggctatcgcgatcagtcacatccagcgttgaagcaggccgcgctggaatactgggataacccccagttgaaaagccagcaaaataaatggcatcagtatgtctccgagtcggttgccgcaatggtccggggctggttggcaaaacaggacctgacacatttctttgaactgctgcgcggtaatggcgatgtcgatcaggctcgactgcactactggctgcgtttcgctaatcagatgggatttactcgtatcatcatggggtccgatgcctggcaagatcgtggtagcgattttgtgaaattccgcgaggagaataagggacgattgagttacttacgaggtgggcgtaactttgataacgccatggttatgcaaatcaacgattatctgtttgtcgagttttccgggacaggaaatgcgatgtatgcctatcaaataggtcacgcgccatttaaccctgaatcacgcacgcttgatatcaacattcatctaaaagatcaggggcgatgcgcactcagactcccccatgcacctcgtgctgaggggtataacaaagtccggataaccggctggatgttgaaatacgacgatgagctacgtaagttgggcattcggtggatggctgaagaacccgtcaggtttgtcgataagaaagtgccccctcccgtcgctatgtctgacatcaaaatcatcaacccgttgcgtgatacggctatacaacacctggttaaatgtagttcatgtatcgtcagcgataatcgacataaaggtggcatactgtccgtacaactcattacacctgacgacaccgtagaaagagagttgttacgactaggctttgcacctgtagctaaagaaccgcatcgttactggatcaaataa

SEQ ID NO: 8831 - DNA, 3243 bp, Escherichia coli; identical to SEQ ID NO: 8512

SEQ ID NO: 8832 - DNA, 2190 bp, Escherichia coli; identical to SEQ ID NO: 8545

SEQ ID NO: 8833 - DNA, 741 bp, Escherichia coli; identical to SEQ ID NO: 8546

SEQ ID NO: 8834 - DNA, 1683 bp, Escherichia coli
atgacgcccgcactgaattctctttctcaacgtattgcagcgaggctctcttccagccaacgggatgaccattatttgcataatgactttcacgcgttgacctccgccgctctcgacatggaaaagcagtttgataaggcagaaagaatcccctcaccgccccaagaaatgcggctggcggcactgcgtcgctttcgccttgcacaagaactcacagaacgagagtggcggatggtgttttatggcctcgccgataatgatccgtcatatcctgaccagcccgtactgctggaggatgatacgtttttccccagagtaagcagtgcaatcaaaaaacgtcttgaaaccaaaacgttgaaacgccgggactgggcagcactttgttcaagctattttgcctaccagcacgaatcacccgagacaaacccgcactggtgcgtactgcgtgggcatatcgctcagggttacctggtggtgaaagccgccatacgacgagaaaaatcgtggatgaaaaccattgagttttatcacgacatttttaccccgcaagcgggaggcgtgatctccaggcagttacttgcaggtgagagcaattcactctcgtcattagagaaaatcgcgcaaatccctgatagcagttggttatggaggcgcattttcacggtgcttttagcgcaactggacacgctcgacgatccgcagtttctggaaaaaattagctggttgttaggtttagctgcgcagtgggtacgtttccgtgatgacatcatgactgcgaccctgactcgctattaccattctggctatcgcgatcaggcacattcagcgttgaagcaggccgcgctggaatactgggataacccccaactgaaaagccagcagaataaatggcatcagtatgtctccgagccggttgctgcaatggtccggggctggttagcaaaacaggacctgacacatttctttgaactgctgcgaggtaatggcgatgtcgatcaggctcgactgcactactggctgcgtttcgccaatcagatgggatttactcgtatcgtcatggggtctgatgcctggcaagatcctggtagcgattttgtgaaattccgcgaggagaataagggacgattgagttacttacgaggcggacgtaactttgataacgccatgattatgcagatcaacgattatctatttgtcgagttttccgggacagggaatgcaatgtacgcctatcgaataggtcacgcgccatttaaccctgaatcacgcacgcttgacatcaatattcatctaaaagataaggggcgctgtgcactcagattgccacatacaccgcgcgctgaggggtataacaaagtccgaatcaccggctggatgttgaaatacgacgacgagctgcgtcagttgggcattcggtggatggcggaagaacccgtcaagtttgtcgataagaaagcgtcctcccccgtttctctgtctgccatcaaaatcatcaatccgttgcgtgatacggctatacagcacctggttgaaggtagttcatgtatcgtcagcgataatcgacaaaaaggtggcgtgctgtccgtacagctcaatacacctgacgacacaatagaaagagaattgttgcgactaggctttgcgcctgtggctaaagaaccgcatcgttactggatcaaataa

SEQ ID NO: 8835 - DNA, 3243 bp, Escherichia coli
atgctgaaacgtctgttaagtagactgacgggtaaccgtcagcagatagaacgccatcttaggaagatgtatcaggttgaggaaaacggactcagctttcctctatcgctggttgatgattcgcagctttggacactggcatcctggcttgagcaactggctgaagaagactatctgatatcgctgacagaccggtggttgttgagttgggacgcattgtatcgcctgctggaagatgaggatcatgccagcagcctgcctcttatcagtgtacctgaagtactgcctttacgcgcaagcctgagttcacgtggtgcgttaagcgatagcgattttcgcgtatggatttccgaatgggctacggttccagcccgcaagccgatccgtttcagtcgtaccggtgccattttaacgcacgataatcagcaatacctgttatcgcgggaaaactgggcgctcttacaggcaacagaacaactcagtgcgcagcaaattcagactcccggcgaaaccactaaccagctgggatgggccgctatccgcaaatgtgcgaaactcgccgccgcaaaatttgatgattatttagaaaaaacgcacgtcgtcaaaccgacttcattgtcattacgtctgcgtaaagcaacagttgccgataccgcagttatcgaaattgaacctcatttcgaggaccagccagctaactggctgggcagttttgacaagaactcgcaggttcacgatagctaccgcatccccggagagaatggcgaactcagccacgtcatcatccctcccgaagtgaaagaagtcctgaattcaatacactcgatcccaggtcgtcgagtggcaggaagtgaagcgctttcctttgttcgaaatccctatacatttttgggtgaagatgctgccggtgttattgcccccgaagaacatgaacaggcgttgtttgatgccaaaattttctttcatcatttcaggttgatgccgcaactgaatgctgaaaataagatcgcggaggttacgctggtacttgaacctgtttcacctgttccccagccagaaatcacttttgtgttctcagcgccctgggagcttgaaaaattcatacaacaactcggtattagcgtcgctgcacagatgcctgccggttcatggcaaggttacgagctggaattaagtcagttcactgaacagcagtggcacgattgccaggcactgctaacccgctggcagcaagaaattgaaggaaaagaatttagcgatgtgctggatattgcgaagtatggcgatcgggtgattggcattggtgaatttgaaaaaatctcctctccctggctgacgaaagcgcatagtgagaactggattcctgatgacatcgatttctccgcattttcagtcgaaacactggctggctggcaacctgaaaatcttcaccatttcgatgaactgcaggagagaataactcaggcagaagccgctgatgaaacgcatatcaccgcaccatggaatgacagccaattaccgttggatgcagctaaaaccttcagtaagcactgggaaaaacagcaaagcactgcaaatgaatctcaaggtaacgttgcagataaaacggcccgagccgtactcaaaattgagcagaatattgaagaagcggcctacatcaaacagcgccgcaattcactcctcaatgcgcgtcatgccgagcctgaaattcctctgagccttaaagagcatatccgactcaaagaccatcagcgtgaaggcgtagcctggctccagcaactcttccttcgttcacctgaggaaaccgcaggttgcctgctggcggatgatatggggcttgggaaaacgctgcaaattctgagcttcctggtatggttcattgaaaaattcccgcaagaaccgccaagtctcattgttgctcccgtctctcttttagataactgggaacgtgagctggataatttcttctataccgcaggaataccggtattgaaattgtatggcgagaccattaaagcggtgaaatatcccaaacaggctatccctgctcatctgcaatctcaagggatcaaaaacctgcttaaacctggctggcaaggtgaggcgaaaatcatcctgacgacctacgaaacgcttcgcgaccaagagttttctctggcgcgccagccgtggtctattatggtgtgcgacgaggcacaaaaaataaaaaacccagcagcgttaatcacccatgcggccaacgcggtacaagccaggtttaaagtggcatgtacaggaacgccagtcgaaaacacacttgtcgacctgtggagcttatttgattttgcccagcctgggcttttaggggcgttaaatgaatttggtaaacattatgttcgtcctatcgagaacgaaactggccgtgatacgggacgactagagagattacgagcgctgattgaaccccagacattgcgccgaaccaaagaagaggttgcgcgtgatttaccacagaaaattgaagtggaaagctgcaagcaattgacgttgtctggcgtgcaaaaacagctctacctttcgtctgttgcaaattggcaacaacagcaagcactgagcgaagggatgcagcaggccggaaccggtatgttaggcttgttacaccgactgaaactcatctgcgcacaccctgcggtagttaatccagagccacgttttcgtgataactcacccaagcttaactggctgctgaaaatactcgcagaaataaagcataccacgaaagataaggtcattatttttacggagcttcgagatttacaacgcgaacttcaacatgcgatccaccaaaagtttggtttccgccctgtcattatcaatggtgataccagcactaaaagtcatagccaaaatagccgccaacgcctgattgatgattttcaggctcagcctgggtttggggtgattattctctctacggttgccgtcggattcggcgttaacgtccagaaagccaatcatgttattcatttcacccgctgctggaacccagccaaagaagatcaggcaacagaccgggcgtaccgaattgggcaaactaaagatgtgtatgtctattacccgacggtgagagacactgaaatcaccacatttgaagaaacactggatgaccttctgcagcgtcgacgtgcattggccagagatatgctctgcgctactcccgatttgagtggtgcggattttgaggccattttgaagggggcttaa

SEQ ID NO: 8836 - DNA, 2190 bp, Escherichia coli; identical to SEQ ID NO: 8505

SEQ ID NO: 8837 - DNA, 741 bp, Escherichia coli; identical to SEQ ID NO: 8506

SEQ ID NO: 8838 - DNA, 1683 bp, Escherichia coli
atgatacccgccctgaattctctttctcaacgcattgcagcgaggctctcttccagccaaagggatgaccattatctgcataatgatttccacgcgttgaccgcggctactcttgacatggaaaagcggtttgatagggcagaaagaatcccctcaccgccacaagaaatgcggctggaggctctacgtcgctttcgcctggcacaagaactcacggaacgagagtggcggatggtgttttatggcctcgccgataatgatccattatatcctgaccagccgatcctgctggaggatgatacatttttccccagagtaaacagtgcaatcaaaaaacgtattgaaaccaaaacgttgaaacgccgggattgggcagcactttgttcaagctattttgcctaccaacaccaatcacccgagacaaaccctcactggtgcgtactgcgggggcatatcgctcagggttacctggtagtgaaagccgctatacgacgagaaaaatcgtggatgaaaaccattgagttttatcacgacatttttaccccacaagcgggaggagtgctctccaggcagttacttgcaggtgagaacaattcactctcatcattagagaaaatcgcgcaaatccctgatagcagttggttatggaagcgcattttcactgtgcttttagctcaactggacacgctcgacgatccccagtttctgagcaaaattagctggttgttaggcttagctgcgcagtgggtgcgtttccgtgatgacatcatgactgcaaccctgactcgctattaccattctggctatcgcgatcagtcacatccagcgttgaagcaggccgcgctggaatactgggataacccccagttgaaaagccagcaaaataaatggcatcagtatgtctccgagtcggttgccgcaatggtccggggctggttggcaaaacaggacctgacacatttctttgaactgctgcgcggtaatggcgatgtcgatcaggctcgactgcactactggctgcgtttcgctaatcagatgggatttactcgtatcatcatggggtccgatgcctggcaagatcgtggtagcgattttgtgaaattccgcgaggagaataagggacgattgagttacttacgaggtgggcgtaactttgataacgccatggttatgcaaatcaacgattatctgtttgtcgagttttccgggacaggaaatgcgatgtatgcctatcaaataggtcacgcgccatttaaccctgaatcacgcacgcttgatatcaacattcatctaaaagatcaggggcgatgcgcactcagactcccccatgcacctcgtgctgaggggtataacaaagtccggataaccggctggatgttgaaatacgacgatgagctacgtaagttgggcattcggtggatggctgaagaacccgtcaggtttgtcgataagaaagtgccccctcccgtcgctatgtctgacatcaaaatcatcaacccgttgcgtgatacggctatacaacacctggttaaatgtagttcatgtatcgtcagcgataatcgacataaaggtggcatactgtccgtacaactcattacacctgacgacaccgtagaaagagagttgttacgactaggctttgcacctgtagctaaagaaccgcatcgttactggatcaaataa

SEQ ID NO: 8839 - DNA, 3243 bp, Escherichia coli
atgctgaaacgtctgttaagtaaactgacgggaaaccgtcagcagatagaacaccacctaaagaatcagtatcaggttgaggaaaacggtctcagctttccgctatcgctggttgatgattcacagctttgggcactggtatcctggcttgaacaacttgctgaagaagactatctgatatcacttacagatcggtggttattgagttgggaggcactatatcgcctgctggaggatgaggaacatgccagcagcctgcctcttatcggtgtacctgacatattgcccttacgcgcaagcctgagttcacgaggagcattaagcgatagcgattttcgcgtctggattgctgaatgggctacatttccagcccgcaagccgattcgtttcagtcgtaccggtgccattttaacgcatgataatcagcaatacctgttatcgcgggaaaactgggcgctcttacaggcaacagaacaactcagtgcacagcaaattcagactcccggcgaaaccactaaccagctgggatgggccgctatccgcaaatgtgcgaaactcgccgccgccaaatttgatgattatttagaaaaaacgcacgtcatcaaaccgacttcattgtcattacgtctgcgtaaagcaacagttgccgataccgcagttatcgaaattgaacctcatttcgaggaccagcctgctaactggctgggcagttttgacaagaacttacaggttcacgatagctaccgcatcccaggagagaatggcgaactcagtcacgtcatcatccctcccgaagtgaaagaagtcctgaattcaatacactcaatcccagggcgtcgagtggccggaagtgaagcgctttcctttgttcgcaatccttataccttcctgggtgaggatgccgccagtgttattgcccctgaagaacatgaacaggcactgtttgatgccaggattttctttcatcatttcaggttgataccgcaactgaatgcggaaaataagatcacagaagttacgctgatacttgagcctgtttcacctgttccccagccagaaatcacttttgtgttctcagcgccctgggagctggataaattcatacagcaactcggtattagcgtcgctgcacagatgcctgccggttcatggcaaggttacgagctggaattaagtcagttcaccgaacagcagtggcacgattgccaggcactgctaactcgctggcaacaagaaattgaaggaaaagaatttagcgatgtgctggatattgcgaagtatggagatagagtgattggcattggtgaatttgaaaaaatatcctctccctggctgaccaaagcgcagagtgaaaactggcttcctgatggcatcgatttctccgcgttttcaatcgaaacactatctggctggcaacctgaaaatcctctccattttgatgaactacaggagataattactcaggcagaagccgctggtgaaacgtatatcaccacaccatggaatgacagccaattaccgttggatgccgctaaaaccttcagtaagaactgggaaaaacagcaaatcactgctaatgaatatcaaggcaacgttgcagataaaacggcccgagccgtactcaaaattgagcagaatattgaagaaacggcctacatcaaacagcgccgcaattcactcctcaatgcgcgtcatgccgaaccagaaattcctctgagccttaaagagcatatccgacttaaagaccatcaacgtgaaggcgtagcctggctccagcaactcttccttcgttcacctgaggaaacagcaggctgcctgctggcggatgatatggggcttggaaaaacgctgcaaattctgagcttcctggtatggttcattgaaaaattcccgcaagaaccgccaaatctcattgttgctcctgtctctcttttagataactgggaacgtgagctgaacaatttcttctataccgcaggaataccagtattgaaattgtatggcgagaccattaaagcggtgaaatatcccaaacaggccatccctgctcatctgcagtctaaggggatcaaaaacctgcttaaacctggctggcaaggtgaggcaaaaatcatcctgacgacctacgaaacgcttcgcgaccaggagttttctctggcacgccagccatggtccattatggtgtgcgacgaggcacaaaaaataaaaaacccagctgcgttaatcacacatgcagccaacgcggtacaagccaggtttaaagtggcatgcacaggaacgccagtcgaaaacacacttgtcgatctgtggagcttatttgattttgcccagccaggattgttaggggcactaaatgaatttggtaaacagtatgttcgccccatcgagaacgaagatggccgcgatacagaacggctggaaagcctgcgggcgctgatagaacctcagactttacgccgaaccaaagaagaggttgcacgtgatttacctcagaaaattgaagtagaaagctgcaagcaactgacgttgtctggcgtgcaaaaacagctctacctttcgtctgttgcaaattggcaacaacagcaagcactgcgcgaagggatgcagcaggccggaaccggtatgttaggtttgttacaccgactgaaactcatctgtgcacaccctgcaatagttaatccagagccacgttttcgtgataactcacccaagcttaactggctgctgaaaatactcgcagaaataaaacatacctcgaaagataaggtcattatttttacggagcttcgagatttacagcgcgagcttcaacatgcaatccaccaaaattttggtttccgccctgtcattatcaatggtgatagcagcactaaaagtcaaagccaaaacagccgccaacgcctgattgatgattttcaggctcagcctgggtttggggtgattattctctctacggttgctgtcgggtttggcgttaacgtccagaaagccaatcatgttattcattttactcgctgctggaatccagccaaagaagatcaggctacggatcgggcgtatcgcattgggcaaactaaaaatgtgtatgtctattacccaactgtgagagatactgaaatcacaacatttgaagaaacactggatgatctcctacaacgccgacgagcattggccagagatatgctctgcgctactcccgatttgaactgtgcggattttgagaccattttgaagggagcctaa

SEQ ID NO: 8840 - DNA, 2190 bp, Escherichia coli; identical to SEQ ID NO: 8505

SEQ ID NO: 8841 - DNA, 741 bp, Escherichia coli; identical to SEQ ID NO: 8506

SEQ ID NO: 8842 - DNA, 1683 bp, Escherichia coli
atgacacccgccctgaattctctttctcaacgcattgcagcgaggctctcttccagccaaagggatgaccattatctgcataatgatttccacgcgttgaccgcggctactcttgacatggaaaagcggtttgatagggcagaaagaatcccctcaccgccacaagaaatgcggctggaggctctacgtcgctttcgcctggcacaagaactcacggaacgagagtggcggatggtgttttatggcctcgccgataatgatccattatatcctgaccagccgatcctgctggaggatgatacatttttccccagagtaaacagtgcaatcaaaaaacgtattgaaaccaaaacgttgaaacgccgggattgggcagcactttgttcaagctattttgcctaccaacaccaatcacccgagacaaaccctcactggtgcgtactgcgggggcatatcgctcagggttacctggtagtgaaagccgctatacgacgagaaaaatcgtggatgaaaaccattgagttttatcacgacatttttaccccacaagcgggaggagtgatctccaggcagttacttgcaggtgagaacaattcactctcatcattagagaaaatcgcgcaaatccctgatagcagttggttatggaagcgcattttcactgtgcttttagctcaactggacacgctcgacgatccccagtttctgagcaaaattagctggttgttaggcttagctgcgcagtgggtgcgtttccgtgatgacatcatgactgcaaccctgactcgctattaccattctggctatcgcgatcagtcacatccagcgttgaagcaggccgcgctggaatactgggataacccccagttgaaaagccagcaaaataaatggcatcagtatgtctccgagtcggttgccgcaatggtccggggctggttggcaaaacaggacctgacacatttctttgaactgctgcgcggtaatggcgatgtcgatcaggctcgactgcactactggctgcgtttcgctaatcagatgggatttactcgtatcatcatggggtccgatgcctggcaagatcgtggtagcgattttgtgaaattccgcgaggagaataagggacgattgagttacttacgaggtgggcgtaactttgataacgccatggttatgcaaatcaacgattatctgtttgtcgagttttccgggacaggaaatgcgatgtatgcctatcaaataggtcacgcgccatttaaccctgaatcacgcacgcttgatatcaacattcatctaaaagatcaggggcgatgcgcactcagactcccccatgcacctcgtgctgaggggtataacaaagtccggataaccggctggatgttgaaatacgacgatgagctacgtaagttgggcattcggtggatggctgaagaacccgtcaggtttgtcgataagaaagtgccccctcccgtcgctatgtctgacatcaaaatcatcaacccgttgcgtgatacggctatacaacacctggttaaatgtagttcatgtatcgtcagcgataatcgacataaaggtggcatactgtccgtacaactcattacacctgacgacaccgtagaaagagagttgttacgactaggctttgcacctgtagctaaagaaccgcatcgttactggatcaaataa

SEQ ID NO: 8843 - DNA, 3243 bp, Escherichia coli; identical to SEQ ID NO: 8512

SEQ ID NO: 8844 - DNA, 2190 bp, Escherichia coli; identical to SEQ ID NO: 8545

SEQ ID NO: 8845 - DNA, 741 bp, Escherichia coli; identical to SEQ ID NO: 8546

SEQ ID NO: 8846 - DNA, 1683 bp, Escherichia coli; identical to SEQ ID NO: 8834

SEQ ID NO: 8847 - DNA, 3243 bp, Escherichia coli; identical to SEQ ID NO: 8835

SEQ ID NO: 8848 - DNA, 2190 bp, Escherichia coli; identical to SEQ ID NO: 8505

SEQ ID NO: 8849 - DNA, 741 bp, Escherichia coli; identical to SEQ ID NO: 8506

SEQ ID NO: 8850 - DNA, 1683 bp, Escherichia coli
atgatacccgccctgaattctctttctcaacgcattgcagcgaggctctcttccagccaaagggatgaccattatctgcataatgatttccacgcgttgaccgcggctactcttgacatggaaaagcgatttgatagggcagaaagaatcccctcaccgccacaagaaatgcggctggaggctctacgtcgctttcgcctggcacaagaactcacggaacgagagtggcggatggtgttttatggcctcgccgataatgatccattatatcctgaccagccgatcctgctggaggatgatacatttttccccagagtaaacagtgcaatcaaaaaacgtattgaaaccaaaacgttgaaacgccgggattgggcagcactttgttcaagctattttgcctaccaacaccaatcacccgagacaaaccctcactggtgcgtactgcgggggcatatcgctcagggttacctggtagtgaaagccgctatacgacgagaaaaatcgtggatgaaaaccattgagttttatcacgacatttttaccccacaagcgggaggagtgctctccaggcagttacttgcaggtgagaacaattcactctcatcattagagaaaatcgcgcaaatccctgatagcagttggttatggaagcgcattttcactgtgcttttagctcaactggacacgctcgacgatccccagtttctgagcaaaattagctggttgttaggcttagctgcgcagtgggtgcgtttccgtgatgacatcatgactgcaaccctgactcgctattaccattctggctatcgcgatcagtcacatccagcgttgaagcaggccgcgctggaatactgggataacccccagttgaaaagccagcaaaataaatggcatcagtatgtctccgagtcggttgccgcaatggtccggggctggttggcaaaacaggacctgacacatttctttgaactgctgcgcggtaatggcgatgtcgatcaggctcgactgcactactggctgcgtttcgctaatcagatgggatttactcgtatcatcatggggtccgatgcctggcaagatcgtggtagcgattttgtgaaattccgcgaggagaataagggacgattgagttacttacgaggtgggcgtaactttgataacgccatggttatgcaaatcaacgattatctgtttgtcgagttttccgggacaggaaatgcgatgtatgcctatcaaataggtcacgcgccatttaaccctgaatcacgcacgcttgatatcaacattcatctaaaagatcaggggcgatgcgcactcagactcccccatgcacctcgtgctgaggggtataacaaagtccggataaccggctggatgttgaaatacgacgatgagctacgtaagttgggcattcggtggatggctgaagaacccgtcaggtttgtcgataagaaagtgccccctcccgtcgctatgtctgacatcaaaatcatcaacccgttgcgtgatacggctatacaacacctggttaaatgtagttcatgtatcgtcagcgataatcgacataaaggtggcatactgtccgtacaactcattacacctgacgacaccgtagaaagagagttgttacgactaggctttgcacctgtagctaaagaaccgcatcgttactggatcaaataa

SEQ ID NO: 8851 - DNA, 3243 bp, Escherichia coli; identical to SEQ ID NO: 8839

SEQ ID NO: 8852 - DNA, 2151 bp, Escherichia fergusonii ECD227
gtggaaccccattgggttcctttcaccgttatcggcctcgttacctttgcctttgtctgctttattttcttttatttgctgagatccatcagaattatttatggactaaaaaaatacacgcgatcaattaccagcattgaaaaaagtgcgccagaggtccagcttgagcaccttaagagcctgtttcagcggcctgaactcaggcatgcgtggaatgagttcgaagaatcgttgcactcacaatatgaactggaggatggcgaagaaaaaatcgtccgtattcgggctactgcaccgagcgctagctttttctcggagcaacaactggtcgatattccgctgaacaccgaatttttcaaacacctgcccggtattctgaccggtatggggattatcggcaccttctacggtctgatgattggtctcaaccacttcgaccccagcacaccggagcaggtctccagcagcgtcaataatctgctgcgcgatgtgctgtacgcctttctgggttctgcatttgctattttcgcctccattctggtcacctggcttgaaaaattatccatcgctaagtgctacaaatatctggaaaaattcaccgcatctctcgactcgctttatgacagcggcgttggcgaggagtaccttgcctcactggtgaaatcaagtaatgaaagcgcaacccaggcacgccatctgaaagagagtctggtcactgatttacgcgatatgttgctgcatctggccgagagccagaaagtcgaaaatgaacgccttgctaatacgttaagcgcaacttaccgcgagtcaggttcacagtttgccgaccaggtcagcggcgcgattgaaaacagcctgaagtcgccattggataaaattgccggtgcggttcagaccgccagcggtgatcaaagcggcatggtacaaaacatgctgcaggatgtgctgaccgcgtttatgtcgaaactagacaccacctttggtcagcagtttacaaacctcaacgaaatgatgggacaaaccgttggcgccattcaaacaatgcaaaccggtttcgccacgttattacaagatatgcgtcaggtgagcgatgatacccgccagggcagcgcgcagctcatcgagcaactgttatcagagatgaaatctggccagcaagctatgcaggctggcatgaatgacatgctcactagccttcaggcctcggtggctaaaattggcgcagaaggtgaaggtgccggagagcgaatggctcgccaactggaaaaaatgttcgctgatagcgaggcgcgagaaaaagcccaagcagaacatatgaccgcctttattgaagcctttcagaattcagtgcagcagggacaaagcgccacaatggaaaaaatggcagcctctgtcgagtcgcttagtgaacaactgggtagcctgtttgggcagattgataagggccagcaacagatttcagcgactcagcaggcgaatcagcagtcccttcacgaacaaacacagcgtgtgatgagcgaggtagacgatcagattaaacagctgatcgacactgttgccagccagcatcagggaacgacagaaacacttcgtctgctcgcagaacaaaccaaccggcagattcaagatatgcaaaccggcgcggacaaaatgcgtctggcagccgaacgctttgaacatgcaggggatcgggtgtcggaagcaaaccaccttaccgctgacgtgctgaataaagcgcaatcggcaggttcatcactctcccttgccaccagcgaactcacttccgttgtggctgattatcgtaacaatcgggaagctgttagcaaatccattgccatgctggagctgctcgccgcaaatacgcagtctgaacaaaccacacgcaaccaattcatcgccgatcttaagcagcacggtgagcgtctgcagagctataaccgggaagcacaggcctttatggaaaatgtcagtgacgtgctcgggaaaggatttgaagacttctcggaaggtgtttcacgcagcctggataaaaccctgggcaaacttgacgtcgaaatggcgaaagcctctagcctgctcgcgggttccgtcgaacaaatcggagaaagtgtcagtgagcttgatgatgttctgtcacgcgtacgagcctaa

SEQ ID NO: 8853 - DNA, 741 bp, Escherichia fergusonii ECD227
atgtttggaaacgcatttggtgttaaaaaacgccgcggcgatgaagcagagaaacctttctggatttcctatgccgatttgatgactgccatgatggtgttatttctggtcgttatggttgcgtcgctgagttccgttacacagcgtattcaacgtgcggagcaaggtgaaaaaacaaggggacaggatatatccagattgtgtgagcgcctggaactgcatgcccgcaacgtgaacaaaaccatcgtggtggattgccacgataaccgtatcagctttggcgaagccgggcgtttcgatcacaaccaatttttcctgaacgctgaggggcaaaaagcgttgcaggatgtggttcctcttgtgctggaagcgtccaacagtgaagaaggtaaaaagtggtttaagcaaattgtcattgaagggtttaccgacaccgacggttcgtacttatacaacctacatctctccctgcaacgctctgaatgggtaatgtgtagtctgctcgatagccgcagccctctgcaaaaaaatatctccgcagaacagcagctccaaatccgtaaacttttcctcgcgggtggcgtctccttcaataatgctaaggaaagcaaggaagccagccgccgggtcgagttgcgcatgcagttcttcgggcttaaagataaacgtgataaggccgatgaagtggatttcccccccgtcgtcaataaagaagtttgccagttggtaatgcccctatga

SEQ ID NO: 8854 - DNA, 1683 bp, Escherichia fergusonii ECD227
atgacgcctgccctgaattctctttctcaacgcattgcagcgaggctctcttccagccaacgggatgaccattatctacataatgatttccacgcgctggcctcagctgctctcgacatggaaaagcggtttgataaggcagaaaaaatccctttaccgccacaaaaaatgcgactggcagctcttcgtcgccttcgccttgcagaagaactcacggaacgagagtggcggatggtgttttatggcctcgccgataatgatccgtcatatcctgatcggccaatattgctggaggatgatgtatttttccctgaggtagacaatgccatcaaaaagcggcttgaatctaaggagttgaaacgcaaggactgggcggcactctgttcaagctattttgcttaccagaacccatcacccgagacaaacccacactggtgcgtactgcgtggacatatcgcgcagggttacctggtggtgaaagcagctatacgacgagaaaaatcgtggatgaaaaccattgagttttatcacgatatttttaccccgcaggcgggaggcgtgatctccagacagttacttgcgggtgagagcaattcactctcatcattagaaaaaatcgcacaaatccctgatagcagttggttgtggaaacgtattttcacggtgcttttagcgcaactggacacactcgacgatccgcagtttctggacaaaattagctggttgttaggtctggctgcgcagtgggtacgtttccgtgatgacatcataactgcgatcctgactcgctattaccattctatatatcgcgatcaggctcattcagctttgaagcaggccgcgctggaatactgggataatccgcaactgaaaagccagcagaataaatggcatcagtatgtctctgagccggtggctgcaatggtccggggctggctggcaaaacaagatctgatgcatttctttgaattgctgcgcggtaatggcgatgttgatcaggcacgattgtactactggctgcgtttcgccaaccagatgggatttactcgtattgtcatggggactgatgcgtggcaagaccgaggtagcgactttgtgaaatttcgcgaggagaataagggacgattgagttacttactaggtggacgcagcttagataacgccatgattatgcagattaacgattatctgtttgttgagttttctgggacaggaaatgcgatgtatgcctatcgggttggccaggcaccgttcaatcctgagtcaggatcattagatattaatattcatttaaaagataaattccgtaatgttctccgacttccacatatcccccgagccgaaggttataacagggttcgactcacagggtggatgttgaaatacgacgatgagctacgcaagttgggcattcggtggatggcggaagaacccgtcaagtttgtcgataaaaaagcgtcctctcccgcctctatgtccgacattaaaatcatcaacccgttgcgtgatacggctatacagcatctggttgaaggtagttcatgtatcgtcagcgataatcgacaaaaaggtggcgtactgtccgtacaactcaatactcctgacgacaccatagaaagagagttgttacgactaggctttgcgcccgtggctaaagaaccgcatcgttactggatcaaataa

SEQ ID NO: 8855 - DNA, 3243 bp, Escherichia fergusonii ECD227
atgctgaaacgtctgttaagtagactgacgggtaaccgccagcagatagaacaccacctaatgaatcagtatcaggttgaggaaaacggactcagctttccgctatcgctggtcgatgattcgcagctttgggcgcttgcatcctggcttgagcaactggctgaagaagattatctgatatcactgacagaccggtggttgttgagttgggacgcattgtatcgcctgctggaggatgaggagcatgccagcagcctgcctcttatcggtgtacctgaggtactgcctttacgcgcaagcctgagttcacgtggcgcattaagtgaccgtgattttcgcgtctggattgctgaatgggttacgcttccagcccgcaagccgatccgtttcagtcgtaccggtgccattttaacccatgaaaataagcagcacctgttatcgcaggaaaactgggcactcttacaggcaacagaacaactcagtgcgcagcaaaatcagtcccctggcgaaaccactaaccagctgggatgggccgctattcgcaaatgtgcgaaacaagccgctgcaaaatttgatgattatttagaaaaaacgcatgtcgtcaaaccaacttcattgtctctacgtctgcgtaaagcaacggttgccgatactgcggttatcgaaatagaaccccatttcgaggaccagccagctaactggctgggtagttttgacaagaattcgcaggttcacgatagctaccgcatccctggagagaatggcgagctcagccacgtcatcatccctcctgaagtgaaagaagtcctgaattcaatacactcgatccctggccgtcgagtggccggaagtgaagcactttcctttgttcgcaatccctatacatttttgggcgaagatgccgccagtgttattgcccccgaagaacatgaacaggcgttgtttgatgccaggattttctttcatcatttcaggttgataccgcaactgaatgctgagaataagatcgcagaagttacgctggtacttgaacctgtttcacctgttccccagccagaaatcacttttgtgttctcagcgccctgggagcttgaaaaattcatacagcaactcggtatcagcgtcgctgcacagatgcctgccggttcatggcaaggttacgagctggaattaagtcagttcactgaacagcagtggcacgattgccaggcactgctaacccgctggcagcaagaaattgaagggaaagaatttagcgatgtgctggatattgcgaagtatggcgatcgggtgattggcattggtgaatttgaaaaaatctcctctccctggctaaccaaagcgcagagtgaaaactggcttcctgatgacatcgatttctccgcattttcagtcgaaacactgactggctggcaacctgaaaatcttcaccatttcgatgaactgcaggagagaattactcaggcagaagctgtaggtgaaacgcatatcaccgcaccatggaatgacagccaattaccgttggatgctgctaaaaccttcagtaagaactgggaaaaacagcaaagcactgcaaatgaatctcaaggcaacgttgcagataaaacggcccgagccgtactcaaaattgagcagaacattgaagaaacggcctacatcaaacagcgccgcaattcactcctcaatgcgcgtcatgccgagcctgaaattcctctaagccttaaagagcatatccgactcaaagaccatcaacgtgaaggcgtggcctggctccagcaactattccttcgttcacctgaggaaaccgcaggttgccttctggcggatgatatggggcttggaaaaacactgcaaattctgagcttcctggtatggttcattgaaaaattcccgcaagaaccgccaagtctcattgttgctcctgtctctcttttagataactgggaacgtgaactggacaatttcttctataccgcaggaataccggtattgaaattgtatggcgagaccattaaagcggtgaaatatcccaaacaggctatccctgcccatctgcaatctcaggggatcaaaaacctgcttaaacctggctggcaaggtgaggcgaaaatcatcctgacgacctacgaaacgcttcgcgaccaggagttttctctggcacgccagccgtggtccattatggtgtgcgacgaggcacaaaaaataaaaaacccagctgcgttaatcacacatgcggccaacgcggtacaagccaggtttaaagtggcatgcacaggaacgccagtcgaaaacacacttgtcgacctgtggagcttatttgattttgcccagccaggattgttaggggcactaaatgaatttggtaaacactatgttcgccccatcgagaacgaagatagccgcgatacggaacggctggaaagcctgcgggcgctgatagagcctcagactttacgccgaaccaaagaagaggttgcacgtgatttacctcagaaaattgaagtggaaagctgcaagcaattgacgttgtctggcgtgcaaaaacagctctacctttcgtctgttgcaaattggcaacaacagcaagcactgagtgaagggatgcagcaggccggaaccggtatgttaggtttgttacaccgactgaaactcatctgcgcacaccctgcggtagttaatccagagccacgttttcgtgataactcacccaagcttaactggctgctgaaaatactcgcagaaataaaacataccacgaaagataaggtcattatttttacggagcttcgagatttacagcgcgagcttcaacatgcgatccaccaaaagtttggtttccgtcctgtcattatcaatggtgataccagcaccaaaagtcatagccaaaacagccgccaacgcctgatcgatgattttcaggctcagcctgggtttggagtgattattctctctacggttgctgtcgggttcggcgttaacgtccagaaagccaatcatgttattcatttcactcgctgctggaatccagccaaagaagatcaggctacggaccgggcgtaccgaattgggcaaactaaagacgtatatgtttattacccgacggtgagggactctgaaatcaccacatttgaagaaacactggatgaccttctgcagcgtcgacgtgcattggccaaggatatgctatgtgcaactcctgatttgagtagtgttgattttgaggtcatattgaaaggtgcttag

SEQ ID NO: 8856 - DNA, 2190 bp, Escherichia hermannii NBRC 105704
atgtcctggcttaattcctttttaatgacgcttacatccgtggagcctcataatgtgcccttcactgtaatcagcatcgtgtgcctggccgttgcctgctttattttcttttatttacttcgggccattaaaattattaacagcctgaaaaaatatacccgatcaattaatagcattgaaagcagttccccagaggaacagcttgcacatctgcaaaatctctttaagcgccctgaactcaaacacgcgtggaatgagtttaaagagtcgttacatccgcagagtgagctggaagatggggaagaaaaaatcgtccgcattcgtgccacagcgccaagttcgagctatttctctgagcaacagttagtcgatattccactcaatactgaattcttcaaacacctgcccggtattctgactggtgtggggattatcggtacgttttacggcctgatgattggccttaaccacttcgaccccagcactccagagcaggttaccagcagcgtcaataatttgcttcacgatgttttgtacgcattccttggctctgccgtagctattgccgcctctattttcgttacctggctggaaaaactatccatcgccaagtgctataagtatctcgaaaaatttaccgccgctatcgacaagctctacgttagcggtgtgggcgaggaatatctcgcctcgctggtgaaatccagtaatgaaagcgcaacccaggcgcgccaactgaaagagagtctggttaccgatttacgcgatatgttgctgagtctcgccgaaagccagaaggtagaaaatgagcgactggcaaagactcttagtgctacctatcgcgattcaggtgcacaatttgccgaccaggtgagtggtgcaattgaaaatagtctaaagtcaccgctggaaaaaatcgcgggtgcagttcagaccgccagcggcgatcaaagcggcatggtgcagaatatgctgcaggatgtgctgaccgcatttatggcgaaacttgataccacctttggtcagcagtttacaaacctgaacgacatgatggggcaaaccgttggcgctattcaaacaatgcaaaccggttttgccacgttattacaggacatgcgtcaggtgagcgatgattcccgccagggcagcgcgcagctcatcgagcaactgttatcagagatgaaatctggccagcaggctatgcaggctggcatgaatgacatgctcaccagccttcaggcctcggtggctaaaattggcgcggaaggtgaaggtgccggtgagcgaatggctcgccaactggaaaaaatgttcgctgatagcgaggcgcgagaaaaagctcaggcagaacatatgaccgcctttattgaagccattcagaattcagtgcagcaggggcaaagcgccacaatggaaaaaatggcagcctctgtcgagtcgcttagtgaacaactgggtagcctgtttgggcagattgataagggtcagcaacagatttcagcgactcagcaagccaaccaacagtcactgcacgaacagacacaacgtgtgatgagtgaggttgacgatcagattaaacagctgatcgacaccgttgcgcagcagcatcagggaaccaccgaaacgcttaacaatctcgcagaacagaccaaccgacagattcaggatatgcaaaacggcgcggataaaatgcgggtggccgctgaacgcttcgaagaagcgggagagcgcgtgtcacaagccaaccacattaccgctgatgttctgaataaagcacaaacggcgggctcatcgctttctggtgcaaccagcgaacttgcctctgtcgttgccgattaccgtaacaaccgcgaagccgtcagcaaatctattgccatgctggagctgctcgccgccaatacgcaatctgaacaaaccacccgcagcaaattcatcgccgatcttcagctacatggtgagcgccttcagggctacaaccgtgaagcacaggcttttatggaaaatgtcagtgacgtgctcgggaaagggttcgaagacttctctgaaggtgttttacgcagcctggataaaacgctgggcaaactggatgtggaaatggcgaaggcctctactttgctcgcgggttctgttgaacagattggagagagcatcaacgagcttgatgatgtcctgtcacgcgttcgtgcctga

SEQ ID NO: 8857 - DNA, 741 bp, Escherichia hermannii NBRC 105704
atgtttggaaatgcatttggcgttaaaaaacgccgcagcgatgaagcagagaaacccttctggatctcctatgccgatctgatgacggccatgatggtattatttctggtggttatggtagcgtcactgagttctgtcacacagcgtattcaacgtgcggaagaaggggaaaaaatcaggggacacgatattgccagattgtgtgaacgcctggagcttcatgcccgtaatctgaacaaaactattgtggtggattgtcacgataatcgtatcagttttggcgaggctggccgtttcgatcacaatcgttttttcctcaatgctgaaggccaaaaagcgttgcaggatgtcgttccgctcgtgcttgaagcctctgaaagcgaagaaggcaaaaaatggtttaagcaaatcgttattgaagggttcaccgataccgacggttcatacctttataatttacatctttctttacagcgttctgaatgggtcatgtgcagcttgctcgatagccgcagcccgttacaaaagagcatctccgcacagcagcagatcaagattcgtaagctttttctcgcaggtggcgtctcgtttaacaatgccaaagaaagtaaagaagccagccgtcgtgtcgaattacgtatgcagttcttcggtctcaaagataaacgtgatggcgaggaggcggtgaatttccctcccgtggtcaataaagaagtgtgccagttggtaatgccattatga

SEQ ID NO: 8858 - DNA, 1683 bp, Escherichia hermannii NBRC 105704
atgacctccgcactgcactctctttctcaacgtatcgccgctacgctcaccgccagccagcagagcgatacctttttgaaaaatggcttccatgcgctgacattagccgtaaacgagatggaaaaacggtttgataaagccgataaaatcccttcccctccgcatgaaacccgcctgaaagcgttacgtcgttttcgtcttgcagaggaactgaacgagcgagaatggcggatggtattttatggtctcgccgacaacgatccgttacatcctaaacaaccagtcttgcttgaagacgacacgctctttccaaaagttgatagtgaaatcaaaaaacggctcgcatcgaaggatttgaaacggaaggattgggccgcactctgtgcaagctattttgcctacaggaatgaaaagccggaacaaaatccacactggtgcgtactgcgcgggcatatcgctaagggctaccttgtcgtgaaagcggctatacggcgagaaaaaccgtggatgaaaaccattgagttttaccacgatatttttacaccgcaagcaggtggcgtcatctccagacagttactggcaggtgagaaaaactctctctcatccctggaaaaaatcgctcaaattcctgatagcagctggctatggaagcgtatcttcaccgtacttctggcgcagcttgatactcttgacgatcctcaatacctggacaaaataagctggctattaggcctggcggcgcagtgggttcgttttcgcgatgatattatgacggcgacactgacccgctattaccattctacctatcgcgatcaagcgcattccgctctgaaacaggccgcgctggaatactgggacaatccgcaactaaaaagccaacagaataagtggcatcaatatgtttctgaacccgtcgccgcgatggtacggggctggctggcaaaacaagatctgatgcatttcttcgagttgttgcgtggaaacggggatgttgaccaggcacgtctcttttactggctgcgtttcgcaaaccagatgggattcactcgtatagtgatggggccagatgcctggcacgatcgtggcagcgacttcgtgaaattccgcgaagagaataaagggcggttgagttacttactaggtggacgcaacttagataacgccatgattatgcagattaacgattatctgttcgttgagttttctgggacaggaaatgcgatgtatgcctatcgggttggccaggcgccgttcaatcctgagtcagaatcattagatattaatattcatttaaaagataaattccgtaatgttctccgacttccacatatcccacgagccgaaggttataacagggttcgactcactggctggatgctgaaatacgacgatgaattacgtcagctgggtatccgctggatggctgaagagcccgttaaatttgtagataaaaaagcgccctcacccgcttcggtatctgacatcaaaatcatcaatccattgcgggacaccgcaatacagcgcctggttgaaagcacttcatgcatcgtcagcgataaccgacaaaaaggcggcgtgctgtctgtccagctgaaaataccggatgacacaacggaaagagagttactccgactcggcttcgctcccgtaactaaagaaccgcatcgctactggattaaataa

SEQ ID NO: 8859 - DNA, 1882 bp, Escherichia hermannii NBRC 105704
atgctgaaacgtctgttaagtaaactggcgggaaaccgtcagcagatagaacgccacctgaagaaacagtaccaggctgaagaaaacgggctcagttttccacaatcgttggttgatgacccagagctttgggctctggcatcctggcttgagcaactggctgaagaagactatctgatatcacttacagaccggtggctgttgagttgggacgcactgtatcgcctgctggaggatgaggaacatgccagcagcctgccgcttatcggtatacctgacatactgcctttacgcgcaagcctgagttcacgaagtgcgttaagcgatagcgattttcgcgtctggatcgctgaatgggccacgcttccagcccgcaagccgatccgtttcagtcgtaccggtgccattttaacccatgaaaatcagcaatacctgttatcgcgcgaaaactgggcactcatacaggcaacagaacaacttagtgcacagcagtatcagacgcctggcgaaaccactaaccagttaggatgggccgctatccgcaaatgtgcgaagcaagcagccgcaaaatttgatgattatttagaaaaaacgcatgtcgtcaaaccaacttcattgtcattacgtctgcgtaaagcaacgattgccgatactgctgttatcgaaattgagccccatttcgaggaccagcctgctaactggctgggcagttttgacaagaattcgcaggttcacgatagttatcgtatccccggcaagaatggcgaactcagccacatcatccttcctcccgaagtgaaagaagtcctgaattcaatacactcaattcccggtcgccgggttgccggtagtgaagcgttatcctttgttcgcaacccctatactttcctgggtgaagatgccgccagtgttattgcccctgaggaacacgaacaggcactgtttgacgcccatattttctttcatcacttcaggcttcaactccaaatcaatgatgaaaataagatagagagtattacgctggtgctggagccggtctcaccggtgccgcaaccggaggtgtcattcctcctctccgcgccatgggaactggaaaaatttgttcaggccgtagggatcagcgttgccgcgcaaatgccagcaggctcctggcagggatacgagctggaactgagccaattcaccgaacagcaatggcacgattgccagtcgctgttgtcgcgctggcaacaggaagtcgagggtaaggaatttaacgatgtcttggatctgggcaaatatggcgatcgcgtcattggcatcggtgagtttgaaaaaatatcctctccctggctgaccaaggcgcaaagtgaaaactggctccctgatggcatcgacttttccgaattttcggtagaaacgctggatggttggcaacctgataacctacagcatttcgatgaactgcagcagaggattacccaagcagaagcatctggcgaaacgcatatcatctccccctggaatgagactaaactgccgctggacgccgctaaaactttcagtaaaaactgggaaaaacagcaaaatgcagcacatgaatcagagggcaatgttgttgaaaaagcggcccgggcagtgctcaaaattgaacagaatattgaagaagcggcctacatcaaacaacgccgcgattcactccttgatgcacgtcatgcagaacctgaaattccactgggtcttaaagagcatattcgactcaaagatcatcaacgtgaaggcttagcctggctccagcaactcttccttcgttcaccagaggaaaccgctggctgtctgctagctgatgacatggggctggggaaaacgctgcagatcctgagcttcctggtttggttcattg

SEQ ID NO: 8860 - DNA, 2190 bp, Hafnia alvei ATCC 51873
atgtcctggcttaattctattttagtggcgctgacatctgtgcagccctttatggtgcctgcaaccgttattggtctcgtcactttggcttttctctgttttatcctgttttatcttttcagagcggtgaaaattgttaacggcctgaaaaaatacacacagtcaattaatagcattgaaaagaatgagccagaggcgcaacttcagcatttgcaaaacctgttcatacaaccagaactcaaacacgcctggagcgagtttgaggagtcgttgcacctgcagcatgagctcgtgggaagcgaagaaagaatcgcgcagattcgcgcaactgcgcccagtgccagctacttctcagaacaacagctggtcgatattccgcttaacaccgaattcttcaaacatctacccggcattctgacgggggtggggatcatcgggacgttttatggcctgatgatcggcttgaaccattttgaccccagtacaccagagcaggtcaccagcagcgttaataacctgctgcatgatgtgttgtacgccttcctgggttcggccgtagcgattttcgcctccatcgtggttacgtggctggagaaattctcgctggcgaagtgctacaagtatctggaaaaatttactgcctccatcgacaaactctatatcagcggcgtcggcgaggagtatctcgcctcattggtgaagtccagtaacgaaagcgcgacccaagcccgtcatttgaaagagagcctggtcactgaccttcgcgatatgctgctgcatcttgccgaaagccagaaagtcgaaaatgaacgtctggcgaatacgttaagcaccacttatcgcgaatcaagctcgcagtttgccgaccaggtgagtggcgctattgaaaatagcctgaagtcaccgctggataaaattgccggggcggtccaaaccgccagcggcgatcaaagcggcatggttcagaacatgctgcaggatgtgctgacggcattcatggcgaagctcgacaccactttcggccaacagtttacgaacctcaatgaaatgatggggcaaaccgtaggcgccatccagaccatgcagagcggtttctccgcactgttgcaggatatgcgtcaggtcagcgatgattctcgccagggcagcgcacagttgatggagcagctgttatctgaaatgaaatcaggccagcaggcgatgcaggctggaatgaacgatatgctcagtagccttcagacatccgtcgccaaaattggtgctgaaggagaaggtgccggtgaacgtatggcacgccagctagagaaaatgttcgctgacagtgaggcgcgagaaaaagcgcaggccgagcacatgtctgcctttattgaagccattcagaattccgtgcaacagggacaaagtgccacgatggaaaaaatggcgacctctgttgaagccctcggtgaacaactgggtagcctgtttggccaaatcgataaaggccagcagcagatttccgcaaaccagcaggtaaatcagcaatcactgcatgagcagacgcagcgcgtgatgagtgaagtggacgatcaaatcaaacagctgatcgagaccgttgccagccagcatcaggggacaaccgaaacactgaataaactcgcagaacaaaccaaccgacagattcaggatatgcaaaacggcgcagacaaaatgcgcattgccgccgagcgatttgagcatgcaggcgatcgggtgtcagaggccaaccacctcaccgcggatgttctgaacaaagcacaatcagccggttcatcgctttcacttgccactaacgaactcacgtctgtagtggcggattatcgtaataatcgggaagccgttagcaaatccatcaccatgctggaactgcttgctgccaatacacagtctgaacaaaccactcgtagccagttcatcaccgaccttaaacagcatggcgaacgcctgcaaagttacaaccgtgaagcgcagacctttatggaaaacgtcagcgacgtgctcggaaaagggtttgaagacttctcagaaggcgtttcgcgtagtctggataaaacgctgggcaaactggacgtcgaaatggcgaaagcctctaatctgcttgccggatccgttgagcagatcggcgaaagcgttagcgagcttgatgatgttctgtctcgcgtgcgtgcctga

SEQ ID NO: 8861 - DNA, 741 bp, Hafnia alvei ATCC 51873
atgtttggtaatgcatttggcgttaaaaaacgcaggggcgatgaagcggagaaacccttctggatttcctacgcggatctgatgaccgccatgatggtgttatttttggtggttatggtggcgtcgctgagctccgtaactcagcgtattcaacgcgcagaacaaggtgaaaaaacgagagggcaagatatttccaggctgtgtgaacgtctggagttgcatgcccgtagcgtgaacaaaaccatcgtggtggattgccacgataaccgcatcagctttggtgaagccgggcgctttgaccacaatcagttcttccttaatgctgagggacaaaaagcgttgcaggatgtcgttccgctggtgctggaagcatccgacagcgaagaaggtaaaaaatggtttaaacaaatcgtgattgaagggttcactgataccgacggctcttacctctacaatttacacctctctctgcaacgttccgaatgggtaatgtgcagcttgattgatagccgcagcccgctgcaaaaaagcatttcggcaaaacagcagatccaaattcgaaagctattcctcgcgggaggagtttcgtttaataacgcgaaggaaagtaaagaggccagccgccgcgtcgagctacgaatgcagttcttcgggcttaaagataagcatgatgccgcagacgaggtggatttccctccggtcgttaataaagaagtttgccagctggtaatgccgcaatga

SEQ ID NO: 8862 - DNA, 1683 bp, Hafnia alvei ATCC 51873
atgacgcccgcgctgagttctctctcacagcgtattgcagcgaagctctcttccagccagcaggaggaccattatctgcgcaatgatttccacgcgctggcttctgctggccgtgagatggaaaaacgatttgataaagcagagaaaatccccacgcccccacatgaaatgcggctggcagccctgcttcgttttcgtcttgcggaagaactgagtgaacgtgaatggcggatggtgttttatggcctcgcagataccgatccgctcgaccctgaacggccagtattactggaggatgatacattctttcctcatgtagacaacgctataaaaaaacagattgaatcgaagacactgaagcgcaaggactgggcagcactctgttcaagttatttcgcctacaaacatgaatcgccagaaataaacccacactggtgtgtactgcgtggtcatattgcccaaggttaccccgttgtaaaagccgccatccgcagagaaaaatcgtggatgagaaccattgagttttatcacgatatttttacgcctcaggctggtggtgtgatatcccagcagctcctttccggagagagtaactcgttatcatcattagaaaaaatagcgcaaatccccgatagcagctggttatggaaacgtattttcacggtgttgctggcgcagctcgatactctggacgatcctcaatatctggacaaaatcagttggctattaggcctagcggcgcagtgggtacgttttcgtgatgacattatgacggcgacgctgacccgctattatcattctacttatcgcgatcaggcgcattcctccctgaaacaggccgcactggaatactgggataacccgcagctgaaaagccagcagaataagtggcatcagtatgtttctgaacccgtcgcagcgatggtgcgaggctggctggcaaaacaggatctgatgcacttctttgaactgcttcgcggtaatggcgatgtcgatcaggcaaggctgcactattggctacgttttgcgaatcagatggggttcactcgtatcgtgatggggccggatgcctggcacgatcgtggcagcgattttataaaattccgtgaggagaatcgtggacgactaagtcatttgcgcggcgggcgtagtttcgataacgccatgattatgcaaattaacgactacattttcgttgagttttccggaacggggaatgcaatgtatgcctaccgggtgggtcaggctccctttaacccagagtcacactcattggatattaatatccaattaaaagacaaataccgtaatgttctccgtcttccacataccccacgagcggaagggtacaacaagacccggatcaccggctggatgctgaaatatgacgatgaattacgtcagctgggtatccgctggatggctgaagaacccgtcaaatttatagataaaaaagcgccctcacccgcctcggtatctgacatcaaaatcatcaatccattgcgggatacagcaatacagcgcctggttgaaaacacctcgtgcatcgtcagcgataaccgacaaaaaggtggagtgctgtccgttcagctcaaagctcctgacgatataacagaaagagagttgcttcgactcgggttcacccctgtgactaaagaaccgcatcgctactggatcaaataa

SEQ ID NO: 8863 - DNA, 3243 bp, Hafnia alvei ATCC 51873
atgctgaaacgtctgttaagtaaactgacgggaaaccgtcagcagatagaacgccacctgaagaatcagtaccaggctgaagaaaacgggctcagcttccctcaatctttggtggatgatcccgaactttgggcgctggcatcctggcttgagcaactggctgaagaagactatctgatatcactcacagaccgatggttgctaagctgggaggcgttgtatcgcctgctggaagatgaagagcatgccagtagcctgcctctgattggtgtacctgaagtattgcctttgcgtgcaagcatgagttcacgaggagcgctaagcgatagtgatttccgcgtctggattgctgaatgggctacgcttccttcgcgtcaaactatccgtttcagccgcaccggggctatttttactcataaaaaccagcagcatctgctatcacgagaaaactgggctctcttgcagtcaactgagcagctaagcatccagcaaactcagactcccggcgaaaccactaatcagctgggatgggccgcaattcgcaaatgcgcaaaacaggccgctgcaaaatttgatgattatttagagaaaacgcacgtcgtcaaacccacttcattgtcgttacgcctccgtaaggcgacagttgctgatactgccgttatcgagattgaaccccattttgaggaccaacccgctaactggcttggcagttttgacaagaactcactggtccacgatagctatcgtattcccggagagaacggcgagctcagccacataatcatcccacctgaagtaaaagaagtcctgaattcaatacactcaattcccggtcgccgggttgccggaagtgaagctctttcctttgttcgcaatccctatactttcctcggcgaagatgccgccagtgttattgcccccgaggaacacgaacaagcactgtttgatgcccatattttctttcatcactttaggcttcaaccccaaatcaatgatgagaataagatagagagcattacgctagtgctggaacctgtctcaccggtgccacaacccgagacgtcattcctcttctctgctccatgggagttagataaatttattcaggccttagggataagtgttgccgcacaaatgcctgcaggttcctggcagggttacgaactggaactgagtcaattcactgagcaacaatggcatgattgccaatcgctgttgttgcgttggcaacaggaagttgaaggtaaagaatttaacgatgtcctagatcttggtaaatatggcgatcgcgtcattggcatcggcgagttcgaaaaaatatcctctccctggctaaccaaggcgcaaagtgaaaactggcttcctgatggcattgacctctccgaattttcggtagaaacactggatggctggcaacctgataacctgcagcatttcgatgaactgcaggagagaatcatccaggcagaagcaactggcgaaacgcatatcatctccccctggaatgagactgaactgccactggatgcggcaaaaaccttcagtaagaactgggaaaaacagcaaaatgcagcacatgaatcagggggcaatgttgttgaaaaagcagtccgggcagtgctcaaaattgaacagaatattgaagaagcggtttacattaaacagcgccgaaattcactcctgaatgcacgccatgctgaacctgaaattccactgagcctgaaagagcacatccagctcaaagaccatcagcgtgaaggcgtggcctggcttcaacagcttttccttcgttcacctaaggaaactgcaggttgcctgctcgcggatgatatggggctggggaaaacgctgcagatcctgagcttcctggtctggttccttgaaaaattccctgacgagccaccaagcctcatcgttgcccccgtctctcttttggataactgggagcgtgaactcgacaatttcttctacacctccgggatttcggtgatgaaattgtatggcgatactattaaagcggtgaaatacccaaaacaggctattcctgctcatcttcaatctcaggggatcaaaaatctgcttaaaccaggctggcagggtgaggcgaaaatcattctgacaacctacgaaacgcttcgcgatcaggagttctccctggcgcgccaaccatggtccatcatggtctgcgacgaggcacaaaaaataaagaacccggcggcattaatcactcatgcagccaatgcgatacaagcaagattcaaagtggcatgtaccggcacgcctgtcgaaaacacgcttgtagacctgtggagcctctttgatttcgcacagccgggtctgttaggcgcactcaatgaatttggcaaacactatgttcgccctatagagaacgaagcgggtcgggatacagggcagcttgaaagtttacgagcgttgattgaaccacaaacattacgccggactaaagaagaggttgcgcgtgatttgccgctaaaaatcgaagtcgtcagctgtaaacaactgccgctttctggccctcaaaagcaactgtatctttcttcgatagcgaactggcaacaacagcaggcacttagtgaaggaatgcagcaagcaggcgcgggtatgttggggttattacatcgtcttaaactcatttgtgcgcacccagcagtcgttaacccagagcctcgctatcgggaagggtcgccaaagctgaactggatgttgaaaacgttggatgaaattaagcacaccagcaaagataaagtaatcatctttactgagctgcgcgatctccagcgcgagatacagcatgctattcaacagcgattcggttttcgtccggtgatcatcaacggcgacaccagcactaaaagtcagagccagaatagccgccagcgattgattgacgatttccagtcccaacccggctttggcgtgattattctctccaccgtcgcagttggatttggagttaacgtgcagaaagcaaaccacgttattcatttcacccgctgttggaatccggcaaaagaagatcaggcaaccgaccgcgcttaccgtatcggccagacaaaggatgtgtatgtgtactatccaacggtgatggactctgaaatcacgacgtttgaagaaacgctagacgaactccttcagcgtcgccgggcattggcgagggatatgttgtgctctgcaccggatctaagcagtgctgattttgagaacattttaaaagggacgtaa

SEQ ID NO: 8864 - DNA, 2190 bp, Klebsiella pneumoniae subsp. pneumoniae WGLW2
atgtcctggcttaattcctttttagttactcttacatctgtggagccccataatgtgcctttcaccgtaatcagcatcgtaagcttggccgttgcttgctttcttttcttttatttattccgagctattaaaattgttaacagcctgaaaaaatacacccgttcaattactagcattgaaagcagttccccagaggaacagcttgcacatctgcaaaatctgtttaagcgccctgagctcaaacacgcgtggaatgagtttgaagagtcgttacatcctcaacgcgagctagaaggtggggaagaaaaaattgtccgcattcgtgccacggcgccaagctctagctacttctccgaacaacagttagtcgatatcccactcaatacggaattcttcaagcacctgcccggtattctgaccggtgtgggtattatcggtacattttacggcctgatgattggcctcaaccacttcgatcccagcactccagagcaggttaccagcagtgtcaataatttgctgcacgatgtgttgtatgctttccttggctctgccgtggctattgctgcctctattttcatcacctggctggaaaaactatccatcgccaagtgctataagtatctcgaaaaatttaccgccgctatcgacaagctctacgttagcggcgtaggtgaggaatacctcgcctcgctggtgaaatccagcaacgaaagcgcaacccaggcgcgtcatctgaaagagagcctggttaccgatcttcgtgacatgctgcttcatctcgccgaaagccagaaagttgaaaatgaacgcctcgcgaatacgttaagcaacacctaccgtgaatcaggcgcacagtttgccgatcaggtgagcggggcaattgaaaatagcctgaagtcaccgctggataaaattgcgggtgcggttcagactgccagcggcgatcaaagcggcatggtacagaacatgctgcaggatgtgctcaccgcatttatggcgaagctcgacaccacctttggccaacagtttacgaaccttaatgaaatgatggggcaaaccgtaggcgccatccagaccatgcagagcggcttctccgcactgttgcaggatatgcgtcaggtcagcgatgactcccgccagggcagcgcacagttgatggagcagctgttatccgaaatgaaatcgggccagcaggcaatgcaggctggaatgaacgatatgctcagtagccttcaggcatccgtcgccaaaatcggtgctgaaggggaaggcgccggtgaacgaatggcacgtcagttggaaaaaatgttcgctgacagcgaggcgcgagaaaaagcgcaggccgagcacatgtccgcatttattgaagctattcagaattcagtgcaacagggacaaagtgccacgatggaaaaaatggcgacctctgttgaagcgcttggtgaacagttaggtagcctgtttggtcagatcgataaaggccaacagcagatttccgcaaaccaacaggtaaatcagcaatcactgcatgagcagacacagcgagtaatgagtgaagtggacgatcaaatcaaaaagctgatcgagaccgttgccaaccagcatcagggtacgaccgaaacactgaacaaactcgcagaacaaaccagccgacagattcaggatatgcaaaacggcgcagacaaaatgcgcgttgccgccgagcgatttgaacatgcaggagatcgggtatcagaggccaaccacctcaccgcagatgttctgaacaaagcacaatcagccggttcatcgctttcacttgccactagcgaactcacgtctgtggtggcggattaccgtaataatcgggaagccgttagcaaatccatcgccatgctggagctacttgctgccaatacccagtcagaacaaaccactcgcagccagttcatcaccgatcttaagcagcatggtgagcgcctgcaaagttataaccgtgaagcgcagacctttatggaaaatgttagcgacgtgcttggcaaagggtttgaagacttctcagagggcgtttcacgtagcctggataaaacactgggcaaactggatgtcgaaatggcaaaagcctctaacttgctcgctggctctgtcgaacagatcggagaaagcgtcagcgaacttgatgatgttctgtctcgcgtacgtgcctga

SEQ ID NO: 8865 - DNA, 744 bp, Klebsiella pneumoniae subsp. pneumoniae WGLW2
atgatgtttgcgaatgcatttggcgttaaaaagcgccatagtgatgaagctgaaaaacccttctggatttcttacgccgatctaatgaccgctatgatggtgttatttttggtcgtcatggtagcgtcattgagttctgtgacccaacgtattcagcgtgcagaacaaggtgaaaaaacgaggggacaggatatctccagattatgtgaacgcttggaattgcatgctcgcagcgtgaataaaacgattgtggttgattgccacgataaccgcatcagcttcggtgaagcaggccggttcgaccacaaccgatttttcctgaatgccgaagggcaaaaagcattacaggatgtagtgccgcttgtacttgaagcctccgacagcgaagaaggtaaaaagtggtttaagcaaatcgtcattgaaggttttactgacaccgatggctcgtatctttacaacctgcatctatccttacagcgttctgaatgggtaatgtgtagcttgctcgatagccgcagccctctgcaaaagagcatctccgcagaacaacaaatccagattcgtaagcttttccttgcgggtggcgtctcctttaacaacgctaaagagagcaaagaagccagccgtcgcgtcgagctacgcatgcagttctttgggctcaaagataaacgcgatggcactgaagaggtggattttccgcctgttgtgaataaagaagtttgccagttggtaatgccacaatga

SEQ ID NO: 8866 - DNA, 1683 bp, Klebsiella pneumoniae subsp. pneumoniae WGLW2
atgacgccagcactaagctctcttgcacaacgtattgcagcgaagctgtcctccagccagcagaatgacaatttcctgcgtcatgattttcatgctctgacctctgcgggtctcgacatggaaaagcgatttgataaagccgagaaaatccctgcgcctccacatgagatgcggctggcggcgctgcgtcgatttcgtcttgcagaagaattgaccgaacgtgagtggcgaatggtgttttatggtcttgttgatacggatccactccaccccaatcagccgatattgctggaagatgagcagcttttccctgaggtgaacagcgctatcaaaaagcggatcgaaaccaaaacgctgaagcgccgggattgggctgcactctgtgccagctattttgcttacaggaacgaaactccggaatcaaatccgcattggtgcgtgctgcgtggccacatcgctcagggctacctggtggtgaagtccgctatccgcagagaaaaatcgtggatgaaaacgattgagttttaccacgatatttttacacctcaggcaggcggcgtaatctcccaacagttactcgcgggcgaaagcaactcactctcctcactagaaaaaatcgcgcaaatccctgacagcagctggctatggaaacgtattttcacggtgctactggctcagcttgataccctggacgatcctcactatctggacaaaatcatttggttattagggctggcagcgcagtgggtacgttttcgcgatgacatcatgacggcgacgctaacccgttactatcattcaacctatcgcgatcaggcgcattccgccctgaaacaggctgcactggaatactgggataacccgcaactcaagagtcagcagaataagtggcatcagtatgtatccgaaccagtggctgcgatggtccggggctggctggcaaaacaggacttgatgcacttctttgagctgcttcgcggcaatggtgatgtcgatcaggccaggctgcactattggctgcgtttcgccaatcagatggggttcacccgtatcgtgatggggcaggatgcctggaccgatcgtgacagcgattttgtgaaattccgggaggagaatcgtgggaggctgagccatctgcgcggtggccgtagttttgataacgcgatgatcatgcagataaacgattacatcttcgttgaattttcaggaacggggaacgcgatgtacgcttaccgcatcggcgaggctccgttcaatcccgagtctggatctctggagattaatgtgcacttaaaaagccaggggcgctgcatcctgcgattaccgcatgctcctcgggcttatggatacagcaacgttcgcatcaccggctggatgctgaaatacgatgatgaactgcacaaactgggcattcgctggatggctgaagaacccattaagtttgttgataaaaaagagtcctcccccacttcgctctctgatgtcaaaatcattaatccgctgcgggatacggccatacagcgcctgctggaaaatatttcctgcatcgtcagcgataatcggcaaaaaggtggcgtgttgtctgtacagctcaaaacaccggatgacacaacggaaagagaattactcagactcggtttcacccccgtggccaaagaaccgcaccgttactggatcaaataa

SEQ ID NO: 8867 - DNA, 3243 bp, Klebsiella pneumoniae subsp. pneumoniae WGLW2
atgctaaaacgtctgttaagtaaactgacgggagaccgtcagcagatagaacgccacctgaagaatcagtaccgggctgaagaaaacgggctcagcttccctcaatctttggtggatgatcccgagctttgggcgctggcatcctggcttgagcaactggctgaagaagactatctaatatcactcacagaccgatggttgctgagctgggaggcgttgtatcacctgctggaagatgaagagcatgccagtagcctgcctctaattggcatacctgaagtattgcctttacgtgcaagcatgagttcacgaggagcgctaagcgataaggatttccgcgtctggattgctgaatggactacgcttccctcacgtcaaactatccgtttcagccgcaccggggctatttttactcatgaaaaccagcagcatctgttatcacgagaaaactgggcgctcttgcaggcaaccgagcagctaagcatccagcaaactcaggcccccggcgaaaccactaaccagctgggatgggccacaattcgcaaatgcgcgaaacaggccgctgcaaaatttgatgattatttagaaaaaacgcatgtcattaaacccacttcattgtcgttacgcctccgtaaggcgacagttgctgatactgccgttatcgagattgaaccccactttgaggaccaacctgcaaactggctcggcagttttgataagaacgctcaggttcatgatagctaccgtattcccggggagaacggtgaactcagccatgtcattatcccacccgaagtgaaagaagttctgaattcaatacactcaatcccaggccgtcgggtggccggtagtgaggctctttcctttgttcgcaacccctatactttcctgggtgaagatgccgccagtgttattgcccctgaagagcatgagcaggcgctgtttgatgcccatatcttcttccaccatttcagacttcaacccagtgtaaatgatgagaacaagataaacgatattacgctggtacttgaacctgtctctcccataccgcaaccggaagtgacattccttttctctgctccatgggagttggataaatttgttcaggccgtagggataagtgttgccgcacaaatgccagcaggttcctggcagggttacgagctggaactgagccaattcacggaacagcaatggcatgactgccagtcactgctgacgcgctggcaacaggaagtcgaaggtaaagaatttagcgatgtcctggatctgggcaaatatggcgatcgcgtcatcggcatcggtgagttcgaaaaaatatcctctccctggctgaccaaggcgcaaagtgaaaactggctccctgttggcatcgacttctccgaattttcggtagaaacactggatggctggcaacccgataatctgcagcatttcgatgaactgcaggagagaataacctatgccgaagcgactggcgaaacgcatatcatctctccctggaatgagactgaactgccactggatgcggcgaaaaccttcagtaagaactgggaaaaacagcaaaatgcagcacatgaatcagagagcaatgttgttgaaaaagcagcccgggcagtgctcaaaattgaacagaatattgaagaagcggtttacattaaacagcgccgaaattcactcctcaatgcacgcaatgctgaacctgaaattccactgagcctgaaagagcacatccgactcaaagaccaccagcgtgaaggtgtggcctggcttcagcagcttttccttcgttcacctcaggaaactgcaggttgcctgctcgcggatgatatggggctggggaaaacgctgcagattctgaccttcctggtgtggttcattgaaaaattccctgacgagccaccaagtctcatcgttgcccccgtctctcttttggataactgggagcgtgaactcgacaatttcttctacacctctgggatttcggtgatgaaattgtatggcgacactatcaaagcggtgaaatacccgaaacaggcgattcctgctcatctccaaagtcaggggattaaaaatttgctcaaacccggctggcagggtgaagcgaaaatcattctgacaacctacgagacgcttcgcgatcaggagttctccctggcgcgccagccatggtccatcatggtctgcgacgaggcacaaaaaataaagaacccggcggcattaatcactcatgcagccaatgcgatacaagcaagattcaaagtggcatgtaccggcacgcctgtcgaaaacacgcttgtagacctgtggagcctctttgatttcgcacagcctggcctgttaggtgcactcaatgaatttggcagacactatgttcgcccgatagagaacgaagcgggtcgggatacagggcagcttgaaagcttacgagcgttgattgaaccacaaacattacgccggactaaagaagaagttgcgcgtgatttaccgcaaaaaatcgaagtcgttagttgtaagcaactgccgctttctggccctcaaaagcaactgtatctttcttcgatagcgaactggcaacaacagcaggcacttagtgaaggaatgcagcaggcgggggcggggatgctggggttattacatcgtcttaaactcatttgtgcacacccagcagtcgttaaccctgagcctcgatatagggaagggtcgccaaagctaaactggatgttgaaaacgctagatgaaattaagcacaccagcaaagacaaagtaatcatctttactgagctgcgcgatctccagcgcgagatacagcatgctattcaacagcgattcggtttccgtccggtgatcatcaacggcgacaccagtactaagagtcatagccagaatagccgccagcgattgattgataatttccagtcccaatccggctttggcgtgattattctctccaccgtcgcagttggatttggggttaacgtgcagaaagcaaaccacgttattcatttcacccgctgttggaatccggcaaaagaagatcaggcaactgaccgcgcttaccgtatcggccagacaaaagatgtatatgtgtattatccgacggtaatggactctgaaatcacgacgtttgaagaaacattagatgaactccttcagcgtcgccgtgcattggccagagatatgttatgttctacacctgagctgagcagtgccgattttgagaatattttaaaagggacataa

SEQ ID NO: 8868 - DNA, 2190 bp, Klebsiella pneumoniae subsp. pneumoniae WGLW2
atgtcctggcttaattccctcttagtggcgcttacgtctgtggaacctcattgggttcccgtcaccgttatcgtccttgttagctttgccgtcatctgctttattttcttttatttatcaagagccatcaaaattgttaatggcctaaaaaaatatacaaaatcaatcagcagcgttgaaaacagtgcaccagaggcccagcttgagcatcttaagagcctgtttcagcggcctgagctcaggcatgcgtggaatgagttcaaagaatcgttacacccgcagcgcgaactggagaacggggaagagaaaatcgtccgcattagagctactgcaccaagtgccagctttttctcggagcaacaactggtcgatattccgctgaataccgaattcttcaaacacttacctggaatcctgaccggtgtagggattattggtaccttctatggcctgatgattggtctcaatcacttcgatcccagcacaccagagcaggtctccagcagcgtcaataatctgttgcacgatgtgttgtacgccttcctaggttcggcatttgctattttcgcctccattattgtcacctggctggaaaagctatccatcgccaagtgctacaaatatctggaaaaattcacagctgccctggactccctttatgacagtggtgttggtgaggagtaccttgcctcgctggtgaaatccagtaatgaaagcgcgactcaggctcgccatctgaaagagagtctggtcaccgatttacgcgatatgttgctgcaactggcagataaccagaaagtagaaaacgaacggttagcagccacgcttagcactacctatcgtgaatcagggcaacaatttgccgagcaagtcagtggcgcgattgaaaacagcctgaagtcgccgctagataaaattgccggtgcagtgcagaccgccagcggcgatcaaagcggcatggtacaaaacatgctgcaggatgtgctgactgcgtttatggcgaaactcgacaccacctttggtcagcagtttacaaacctcaacgacatgatggggcaaaccattggcgtgattcagacaatgcaaactggatttgctgcgttgttacaggacatgcgtcaggtgagtgatgattcccgccagggtagcgcgcagctcattgagcaactgttgtcagagatgaagtctggccagcaagctatgcaggctggtatgaatgacatgctcactagtcttcaggcatcggtggctaaaattggcgccgaaggtgagggggccggagagcgtatggctcgccaactggaaaaaatgttcgccgatagtgaggcacgagaaaaggcgcaggcagagcatatggctgcctttatcgaagccatccagagctcggtgcagcagggacaaagtgccacaatggaaaaaatggcaacttctgtcgaggcgctgggtgagcaattagggagcctctttgggcagatcgataaggggcagcaacagatttcagcaaatcagcaagcgaatcagcagtccctgcatgaacaaactcagcgagtgatgagtgaggcagacgatcagattaaacaactgattgaaacagttgccagtcaacaccagggcaccactgaaacccttcgcctgcttgccgaacaaaccaaccgacagattcaggatatgcaaaacggcgcggataaaatgcgtcaggctgccgaacgctttgaacatgcaggtgagcgggtgtcggaagcaaaccacctcaccgctgatgtgctgaataaagcgcaatcagcaggttcatctctctctcttgccaccagcgaactcgcgtctgttgttgctgattatcgtaacaatcgggaagctgttagcaaatctattgccatgctggagttgctcgccgcaaatacgcagtctgaacaaaccacgcgcagtcaatttatcgccgatcttaagcagcacggtgagcatttgcagagttataacagggaggctcagacctttatggaaaatgtcagtgacgtgctcgggaaaggatttgaagacttctctgaaggtgtttcacgcagcctggataaaacgctgggcaaactggacgtcgaaatggcgaaagcctctaatctactcgccagttctgtcgaacagctcggagaaagcgtcagcgagcttgacgatgtcctgtcacgcgtgcgtgcgtga

SEQ ID NO: 8869 - DNA, 741 bp, Klebsiella pneumoniae subsp. pneumoniae WGLW2
atgtttggaaacgcatttggcgttaaaaaacgccgtagcgatgaggcggagaaaccattctggatctcttatgccgatctgatgacggctatgatggtgttatttctggttgtcatggttgcgtcgttgagttccgtgacacagcgtattcaacgtgcggagcaaggtgaaaaaacaagggggcaggatatatccagattgtgtgagcgtctggaactgcatgcccgcaacgtgaacaaaactatcgttgtggattgccatgataaccgcatcagctttggtgaggccggacgcttcgatcacaaccgttttttcctgaacactgaggggcaaaaagcactgcaggatgttgttccgcttgtgttggatgcagccgacagtgaagagggtaagaagtggttcaagcaaatcgttattgaagggtttaccgacactgatggctcatatctgtacaacctacatctctccctacaacgctctgaatgggtcatgtgtagcctgctcgatagccgcagcccactgcaaaaaagtatttccgcagaacaacagatccaaatccgtaaacttttccttgcagggggagtctccttcaataatgccaaggaaagcaaggaagccagccgtcgcgttgagttacgtatgcagttcttcgggctcaaagataaacgagataaggctgatgaggtggatttcccccctgtggttaataaagaagtttgccagctggtaatgccccaatga

SEQ ID NO: 8870 - DNA, 1683 bp, Klebsiella pneumoniae subsp. pneumoniae WGLW2
atgacgcccgcactgaattctctttctcaacgcattgctgtgaagctctcttccattcaacgggatgacgattatctgcgtaatgatttccatacgttaacatccgcggccctggatatggaaagacggtttgataaagcagaaagaattccttcgccgccacaagaaatgcggctggaggctctgcgtcgcctccgccttgcggaagaactcactgagagagaatggcggatggtattttatagtcttgccgataacgatccgttatatcctgaccggccaatcttgctggaggatgatatatttttccctgaggtcgacaacgctatcaagacgcggcttgaatctaaggagttgaaacgcaaggattggactgcactttgttcaagttattttgcttatcagcatgagtctcccgagaaaaatccacactggtgcatactacgtggacatattgcccaaggttacttcgtggtgaaagccgctatacgacgcgaaaaatcatggatgaagacaattgagctttatcacgacatttttaccccgcaagctggaggcgttatttccaggcagttacttgcgggtgaaaacaattcgctctcgtcattagataaaatcgcgcaaatccccgatagcagctggctatggaagcggatcttcgcggtgcttttagcgcaactggacacacttgacgatcctcagtttctggaaaaaattagctggctgttaggtctggcttcacagtgggttcgctttcgtgatgacatcatgacggagactctgacccgctattactactctgtctatcgcgatcaagaacattcagcgttgaagcaagctgcgctggaattctgggataacccccagttgaaaagccagcagaataaatggcatcaatatgtctccgagccggttgctgcaatggtccggggatggttagcaaaacaggacctgacacatttcttcgagctgttgcgcggtaatggcgatgtcgatcaggcacgattgcactattggttgcgtttcgccaatcaaatgggattcactcgtatcgtcatgggacctgatgcctggcaagaccgtggaagtgactttgtgaaattccgcgaagaaaataaggggcgattgagctatttacgaggcggacgtagctttgataacgccatgattatgcaaatcaacgattatctattcgtcgaattttccgggacaggaaatgcgatgtacgcctatcgaataggccacgcgccatttaaccctgaatcacgtacgattgatatcaacattcatctaaaagatcaggggcgctgcgcgctcaggttgccccatgcacctcgtgctgaggggtataacaaagtccggataaccggctggatgctgaaatacgacgatgagctacgcaagttgggcgttcggtggatggcggaagaacccgtcaagtttgtcgataaaaaagcctcctctcccgcttctttgtctggcatcaaaatcattaatcctctgcgtgatacggcaattcaaagcctggttgaaggtgcttcatgtgtcgtcagcgataatcgacaaaaaggtggcgtactgtctgtactgctcaatacgcctgacgacaccatagaaagagagttgttacgactaggctttacgcctgtggcaaaagaaccgcatcgttactggatcaaataa

SEQ ID NO: 8871 - DNA, 3249 bp, Klebsiella pneumoniae subsp. pneumoniae WGLW2
atgctgaaacgcctcttaagtaaactgacgggaaatcgtcagcagatagagcataatcttaagaatcagtatcaggttgaggaaaacggactcagttttccgctatcgctggttgatgattcgcagctttgggcactggcatcctggcttgagcaactggctgaagaagactatctgatatcactaacagaccggtggttattgagttgggatgccttgtacagtcttctggatgatgacgaacatgccagcagcctgcctcttatcggtgtaccagagatacttcctttacgcgcaagcctgagttcacgtggtgcattaagtgacagtgattttcgcatctggattgcagaatgggccacacttcctgaacgtcaccctatccgtttcagccgtactggtgccatttttacttttgagaatcagcaatatctgttatccagggaaaactgggtactcatacaggcaacagaacgacttagtgcacagcaaagccaggttcccggcgaaaccactaaccaacttggatgggctgctatccgcaaatgtgcgaaacaagcctccgcaaaatttgatgattatttagaaaaaacgcatgtcgtcaaaccgacgtcattgtcattacgtttgcgtaaagcaacggttgctgacactgcggttatcgaaattgaaccccattttgaggagcagcctgctaactggctgggtagttttgacaagaattcacaggttcatgatagctatcgcatcccaggagagaacggcgaacttagccatgtcatcattactcctgaagtgaaagaagtcctgaattccatacactcaatccctggccgtcgagtggcgggaagtgaagcgctttcgtttgttcgtaacccctattcatttttaggtgaagatgctgccgatgttctggcccccgaagaacatgaacaggcgttgtttgatgccaggattttctttcatcatttcaggttgataccccaacagagcgatgagaataagataatcgaagttacgctggtacttgaacctatttcacctgttccccagccagaggtcacttttgtgttctcagctccctgggagcttgaaaaatttatacagcaactcggtattagcgttgcagcgcagatgcctgctggatcctggcaaggttacgagctggagttaagccagttcactgaacaacagtggtacgattgccaggacctatttacacgctggcagcaagaaattgaaggagaagaatttagcgatgtgctggatattgcgaagtatggcgatcgggtgattggtattggtgaatttgaaaaaatttcctcgccctggctgaccaaggcacaaagtgaaaactggcttccagatgacatcgatttctcagtattttcgggcgaagtactgactggttggcaacccgaaaatcttcaccacttaggtgaattgcaggagagaattactcaggcagaagctgctggtgaaacgcatatcgccgcaccatggaatgatagccaattaccgctggatacagccaaaaccttcattaaaaactgggcaaaacagcagagcactgaaaatggatctcaagacaacgttgctgataaagctgtccgggctgtgctcaaaattgagcagaatattgaagaagctgcctacatcaaacagcgccgtgattcactcctcagtgcgcgcaacgcagaacctgaaattcccctgagtcttaaagagaatatccgactcaaagatcatcaacgcgaaggtgtggcctggctacagcaactcttccttcgttcaccagaggaaaccgctggctgtctgcttgctgatgatatgggcttggggaaaacgctgcaaattctgattttcctggtatggtttattgaaaagtttccacaggaaccgccaagtctgattgttgcccctgtctctcttttagataactgggaacgtgagctggataatttcttctacaccgcgggtattcctgtgttgaaattgtacggtgagaccatcaaagtggtgaaataccccaaacaggctatacccgctcatctgcagtctcaggggattaaaaacctgcttaaacctggctggcaaggtgaggcgaaaatcatactgacgacttacgaaacgcttcgcgatcaagaattttctctggcacgccaaccgtggtccattatggtatgcgacgaggctcaaaaaataaaaaatccagctgcgttaatcactcatgctgccaacgcaatacaagcccggtttaaagtggcgtgcaccggtacacctgtcgagaatacacttgtagacctgtggagtttatttgattttgcgcagccagggttgttaggggcgctgaatgaatttggtaaacactatgttcgccctatcgaaaatgaggcaggccgcgatacggaacgactggaacgcttacgagcactgattgagccccagacattacgccgaactaaagaagaggttgcgcgtgatttaccacagaaaattgaagtggaaagttgcaagcagttgatgttgtctggagtgcaaaaacagctctacctttcgtctgttgcaaactggcaacagcaacaggcgctgagcgaaggcatgcagcaggctggaacaggtatgctggggttgctacaccgattgaagcttatttgcgcacaccctgcagttgtcaatccagagccgcgttttcgtgataactcacccaagcttaactggttgctgaaaatactcgcagaaataaaaagcactacgaaagataaagtcattatttttactgagcttcgagacttacagcgtgaacttcagcatgcgatccatcaaaagtttggtatccgccctgtcattattaacggtgataccagcactaaaagtaatagtcagaatagccgccagaggctgatcgatgatttccaggttcatcctggatttggggtgattattctctctacggttgcagtcggtttcggtgttaacgtacagaaagccaatcatgttattcatttcactcgttgctggaacccagccaaagaagatcaagcaacagatcgggcgtaccggattgggcaaattaaagatgtgtatgtttattatccgacggtgagggatcccgaaatcaccacatttgaagaaactctggatgaccttctgctgcggcggcgttcattagcaagagatatgctgtgtgcaactcctgacttgagtggcgctgattttgaggacattttgaaaggggcgttggactga

SEQ ID NO: 8872 - DNA, 2136 bp, Klebsiella pneumoniae JHCK1
gtgcctttcaccgtaatcagcatcgtaagcttggccgttgcttgctttcttttcttttatttattccgagctattaaaattgttaacagcctgaaaaaatacacccgttcaattactagcattgaaagcagttccccagaggaacagcttgcacatctgcaaaatctgtttaagcgccctgagctcaaacacgcgtggaatgagtttgaagagtcgttacatcctcaacgcgagctagaaggtggggaagaaaaaattgtccgcattcgtgccacggcgccaagctctagctacttctccgaacaacagttagtcgatatcccactcaatacggaattcttcaagcacctgcccggtattctgaccggtgtgggtattatcggtacattttacggcctgatgattggcctcaaccacttcgatcccagcactccagagcaggttaccagcagtgtcaataatttgctgcacgatgtgttgtatgctttccttggctctgccgtggctattgctgcctctattttcatcacctggctggaaaaactatccatcgccaagtgctataagtatctcgaaaaatttaccgccgctatcgacaagctctacgttagcggcgtaggtgaggaatacctcgcctcgctggtgaaatccagcaacgaaagcgcaacccaggcgcgtcatctgaaagagagcctggttaccgatcttcgtgacatgctgcttcatctcgccgaaagccagaaagttgaaaatgaacgcctcgcgaatacgttaagcaacacctaccgtgaatcaggcgcacagtttgccgatcaggtgagcggggcaattgaaaatagcctgaagtcaccgctggataaaattgcgggtgcggttcagactgccagcggcgatcaaagcggcatggtacagaacatgctgcaggatgtgctcaccgcatttatggcgaagctcgacaccacctttggccaacagtttacgaaccttaatgaaatgatggggcaaaccgtaggcgccatccagaccatgcagagcggcttctccgcactgttgcaggatatgcgtcaggtcagcgatgactcccgccagggcagcgcacagttgatggagcagctgttatccgaaatgaaatcgggccagcaggcaatgcaggctggaatgaacgatatgctcagtagccttcaggcatccgtcgccaaaatcggtgctgaaggggaaggcgccggtgaacgaatggcacgtcagttggaaaaaatgttcgctgacagcgaggcgcgagaaaaagcgcaggccgagcacatgtccgcatttattgaagctattcagaattcagtgcaacagggacaaagtgccacgatggaaaaaatggcgacctctgttgaagcgcttggtgaacagttaggtagcctgtttggtcagatcgataaaggccaacagcagatttccgcaaaccaacaggtaaatcagcaatcactgcatgagcagacacagcgagtaatgagtgaagtggacgatcaaatcaaaaagctgatcgagaccgttgccaaccagcatcagggtacgaccgaaacactgaacaaactcgcagaacaaaccagccgacagattcaggatatgcaaaacggcgcagacaaaatgcgcgttgccgccgagcgatttgaacatgcaggagatcgggtatcagaggccaaccacctcaccgcagatgttctgaacaaagcacaatcagccggttcatcgctttcacttgccactagcgaactcacgtctgtggtggcggattaccgtaataatcgggaagccgttagcaaatccatcgccatgctggagctacttgctgccaatacccagtcagaacaaaccactcgcagccagttcatcaccgatcttaagcagcatggtgagcgcctgcaaagttataaccgtgaagcgcagacctttatggaaaatgttagcgacgtgcttggcaaagggtttgaagacttctcagagggcgtttcacgtagcctggataaaacactgggcaaactggatgtcgaaatggcaaaagcctctaacttgctcgctggctctgtcgaacagatcggagaaagcgtcagcgaacttgatgatgttctgtctcgcgtacgtgcctga

SEQ ID NO: 8873 - DNA, 741 bp, Klebsiella pneumoniae JHCK1
atgtttgcgaatgcatttggcgttaaaaagcgccatagtgatgaagctgaaaaacccttctggatttcttacgccgatctaatgaccgctatgatggtgttatttttggtcgtcatggtagcgtcattgagttctgtgacccaacgtattcagcgtgcagaacaaggtgaaaaaacgaggggacaggatatctccagattatgtgaacgcttggaattgcatgctcgcagcgtgaataaaacgattgtggttgattgccacgataaccgcatcagcttcggtgaagcaggccggttcgaccacaaccgatttttcctgaatgccgaagggcaaaaagcattacaggatgtagtgccgcttgtacttgaagcctccgacagcgaagaaggtaaaaagtggtttaagcaaatcgtcattgaaggttttactgacaccgatggctcgtatctttacaacctgcatctatccttacagcgttctgaatgggtaatgtgtagcttgctcgatagccgcagccctctgcaaaagagcatctccgcagaacaacaaatccagattcgtaagcttttccttgcgggtggcgtctcctttaacaacgctaaagagagcaaagaagccagccgtcgcgtcgagctacgcatgcagttctttgggctcaaagataaacgcgatggcactgaagaggtggattttccgcctgttgtgaataaagaagtttgccagttggtaatgccacaatga

SEQ ID NO: 8874 - DNA, 1452 bp, Klebsiella pneumoniae JHCK1
atggtgttttatggtcttgttgatacggatccactccaccccaatcagccgatattgctggaagatgagcagcttttccctgaggtgaacagcgctatcaaaaagcggatcgaaaccaaaacgctgaagcgccgggattgggctgcactctgtgccagctattttgcttacaggaacgaaactccggaatcaaatccgcattggtgcgtgctgcgtggccacatcgctcagggctacctggtggtgaagtccgctatccgcagagaaaaatcgtggatgaaaacgattgagttttaccacgatatttttacacctcaggcaggcggcgtaatctcccaacagttactcgcgggcgaaagcaactcactctcctcactagaaaaaatcgcgcaaatccctgacagcagctggctatggaaacgtattttcacggtgctactggctcagcttgataccctggacgatcctcactatctggacaaaatcatttggttattagggctggcagcgcagtgggtacgttttcgcgatgacatcatgacggcgacgctaacccgttactatcattcaacctatcgcgatcaggcgcattccgccctgaaacaggctgcactggaatactgggataacccgcaactcaagagtcagcagaataagtggcatcagtatgtatccgaaccagtggctgcgatggtccggggctggctggcaaaacaggacttgatgcacttctttgagctgcttcgcggcaatggtgatgtcgatcaggccaggctgcactattggctgcgtttcgccaatcagatggggttcacccgtatcgtgatggggcaggatgcctggaccgatcgtgacagcgattttgtgaaattccgggaggagaatcgtgggaggctgagccatctgcgcggtggccgtagttttgataacgcgatgatcatgcagataaacgattacatcttcgttgaattttcaggaacggggaacgcgatgtacgcttaccgcatcggcgaggctccgttcaatcccgagtctggatctctggagattaatgtgcacttaaaaagccaggggcgctgcatcctgcgattaccgcatgctcctcgggcttatggatacagcaacgttcgcatcaccggctggatgctgaaatacgatgatgaactgcacaaactgggcattcgctggatggctgaagaacccattaagtttgttgataaaaaagagtcctcccccacttcgctctctgatgtcaaaatcattaatccgctgcgggatacggccatacagcgcctgctggaaaatatttcctgcatcgtcagcgataatcggcaaaaaggtggcgtgttgtctgtacagctcaaaacaccggatgacacaacggaaagagaattactcagactcggtttcacccccgtggccaaagaaccgcaccgttactggatcaaataa

SEQ ID NO: 8875 - DNA, 1413 bp, Klebsiella pneumoniae JHCK1
atggggctggggaaaacgctgcagattctgaccttcctggtgtggttcattgaaaaattccctgacgagccaccaagtctcatcgttgcccccgtctctcttttggataactgggagcgtgaactcgacaatttcttctacacctctgggatttcggtgatgaaattgtatggcgacactatcaaagcggtgaaatacccgaaacaggcgattcctgctcatctccaaagtcaggggattaaaaatttgctcaaacccggctggcagggtgaagcgaaaatcattctgacaacctacgagacgcttcgcgatcaggagttctccctggcgcgccagccatggtccatcatggtctgcgacgaggcacaaaaaataaagaacccggcggcattaatcactcatgcagccaatgcgatacaagcaagattcaaagtggcatgtaccggcacgcctgtcgaaaacacgcttgtagacctgtggagcctctttgatttcgcacagcctggcctgttaggtgcactcaatgaatttggcagacactatgttcgcccgatagagaacgaagcgggtcgggatacagggcagcttgaaagcttacgagcgttgattgaaccacaaacattacgccggactaaagaagaagttgcgcgtgatttaccgcaaaaaatcgaagtcgttagttgtaagcaactgccgctttctggccctcaaaagcaactgtatctttcttcgatagcgaactggcaacaacagcaggcacttagtgaaggaatgcagcaggcgggggcggggatgctggggttattacatcgtcttaaactcatttgtgcacacccagcagtcgttaaccctgagcctcgatatagggaagggtcgccaaagctaaactggatgttgaaaacgctagatgaaattaagcacaccagcaaagacaaagtaatcatctttactgagctgcgcgatctccagcgcgagatacagcatgctattcaacagcgattcggtttccgtccggtgatcatcaacggcgacaccagtactaagagtcatagccagaatagccgccagcgattgattgataatttccagtcccaatccggctttggcgtgattattctctccaccgtcgcagttggatttggggttaacgtgcagaaagcaaaccacgttattcatttcacccgctgttggaatccggcaaaagaagatcaggcaactgaccgcgcttaccgtatcggccagacaaaagatgtatatgtgtattatccgacggtaatggactctgaaatcacgacgtttgaagaaacattagatgaactccttcagcgtcgccgtgcattggccagagatatgttatgttctacacctgagctgagcagtgccgattttgagaatattttaaaagggacataa

SEQ ID NO: 8876 - DNA, 2190 bp, Klebsiella pneumoniae JHCK1; identical to SEQ ID NO: 8868

SEQ ID NO: 8877 - DNA, 741 bp, Klebsiella pneumoniae JHCK1; identical to SEQ ID NO: 8869

SEQ ID NO: 8878 - DNA, 1683 bp, Klebsiella pneumoniae JHCK1; identical to SEQ ID NO: 8870

SEQ ID NO: 8879 - DNA, 3249 bp, Klebsiella pneumoniae JHCK1; identical to SEQ ID NO: 8871

SEQ ID NO: 8880 - DNA, 2106 bp, Klebsiella pneumoniae UHKPC57
ttggccgttgcttgctttcttttcttttatttattccgagctattaaaattgttaacagcctgaaaaaatacacccgttcaattactagcattgaaagcagttccccagaggaacagcttgcacatctgcaaaatctgtttaagcgccctgagctcaaacacgcgtggaatgagtttgaagagtcgttacatcctcaacgcgagctagaaggtggggaagaaaaaattgtccgcattcgtgccacggcgccaagctctagctacttctccgaacaacagttagtcgatatcccactcaatacggaattcttcaagcacctgcccggtattctgaccggtgtgggtattatcggtacattttacggcctgatgattggcctcaaccacttcgatcccagcactccagagcaggttaccagcagtgtcaataatttgctgcacgatgtgttgtatgctttccttggctctgccgtggctattgctgcctctattttcatcacctggctggaaaaactatccatcgccaagtgctataagtatctcgaaaaatttaccgccgctatcgacaagctctacgttagcggcgtaggtgaggaatacctcgcctcgctggtgaaatccagcaacgaaagcgcaacccaggcgcgtcatctgaaagagagcctggttaccgatcttcgtgacatgctgcttcatctcgccgaaagccagaaagttgaaaatgaacgcctcgcgaatacgttaagcaacacctaccgtgaatcaggcgcacagtttgccgatcaggtgagcggggcaattgaaaatagcctgaagtcaccgctggataaaattgcgggtgcggttcagactgccagcggcgatcaaagcggcatggtacagaacatgctgcaggatgtgctcaccgcatttatggcgaagctcgacaccacctttggccaacagtttacgaaccttaatgaaatgatggggcaaaccgtaggcgccatccagaccatgcagagcggcttctccgcactgttgcaggatatgcgtcaggtcagcgatgactcccgccagggcagcgcacagttgatggagcagctgttatccgaaatgaaatcgggccagcaggcaatgcaggctggaatgaacgatatgctcagtagccttcaggcatccgtcgccaaaatcggtgctgaaggggaaggcgccggtgaacgaatggcacgtcagttggaaaaaatgttcgctgacagcgaggcgcgagaaaaagcgcaggccgagcacatgtccgcatttattgaagctattcagaattcagtgcaacagggacaaagtgccacgatggaaaaaatggcgacctctgttgaagcgcttggtgaacagttaggtagcctgtttggtcagatcgataaaggccaacagcagatttccgcaaaccaacaggtaaatcagcaatcactgcatgagcagacacagcgagtaatgagtgaagtggacgatcaaatcaaaaagctgatcgagaccgttgccaaccagcatcagggtacgaccgaaacactgaacaaactcgcagaacaaaccagccgacagattcaggatatgcaaaacggcgcagacaaaatgcgcgttgccgccgagcgatttgaacatgcaggagatcgggtatcagaggccaaccacctcaccgcagatgttctgaacaaagcacaatcagccggttcatcgctttcacttgccactagcgaactcacgtctgtggtggcggattaccgtaataatcgggaagccgttagcaaatccatcgccatgctggagctacttgctgccaatacccagtcagaacaaaccactcgcagccagttcatcaccgatcttaagcagcatggtgagcgcctgcaaagttataaccgtgaagcgcagacctttatggaaaatgttagcgacgtgcttggcaaagggtttgaagacttctcagagggcgtttcacgtagcctggataaaacactgggcaaactggatgtcgaaatggcaaaagcctctaacttgctcgctggctctgtcgaacagatcggagaaagcgtcagcgaacttgatgatgttctgtctcgcgtacgtgcctga

SEQ ID NO: 8881 - DNA, 744 bp, Klebsiella pneumoniae UHKPC57; identical to SEQ ID NO: 8865

SEQ ID NO: 8882 - DNA, 1683 bp, Klebsiella pneumoniae UHKPC57; identical to SEQ ID NO: 8866

SEQ ID NO: 8883 - DNA, 3243 bp, Klebsiella pneumoniae UHKPC57; identical to SEQ ID NO: 8867

SEQ ID NO: 8884 - DNA, 2106 bp, Klebsiella pneumoniae UHKPC179; identical to SEQ ID NO: 8880

SEQ ID NO: 8885 - DNA, 741 bp, Klebsiella pneumoniae UHKPC179; identical to SEQ ID NO: 8873

SEQ ID NO: 8886 - DNA, 1683 bp, Klebsiella pneumoniae UHKPC179; identical to SEQ ID NO: 8866

SEQ ID NO: 8887 - DNA, 3243 bp, Klebsiella pneumoniae UHKPC179; identical to SEQ ID NO: 8867

SEQ ID NO: 8888 - DNA, 2136 bp, Klebsiella pneumoniae 303K; identical to SEQ ID NO: 8872

SEQ ID NO: 8889 - DNA, 744 bp, Klebsiella pneumoniae 303K; identical to SEQ ID NO: 8865

SEQ ID NO: 8890 - DNA, 1683 bp, Klebsiella pneumoniae 303K; identical to SEQ ID NO: 8866

SEQ ID NO: 8891 - DNA, 3243 bp, Klebsiella pneumoniae 303K; identical to SEQ ID NO: 8867

SEQ ID NO: 8892 - DNA, 2190 bp, Klebsiella pneumoniae MGH 46; identical to SEQ ID NO: 8864

SEQ ID NO: 8893 - DNA, 744 bp, Klebsiella pneumoniae MGH 46; identical to SEQ ID NO: 8865

SEQ ID NO: 8894 - DNA, 1683 bp, Klebsiella pneumoniae MGH 46; identical to SEQ ID NO: 8866

SEQ ID NO: 8895 - DNA, 3243 bp, Klebsiella pneumoniae MGH 46; identical to SEQ ID NO: 8867

SEQ ID NO: 8896 - DNA, 1494 bp, Klebsiella pneumoniae IS46
gtgaaatccagcaacgaaagcgcaacccaggcgcgtcatctgaaagagagcctggttaccgatcttcgtgacatgctgcttcatctcgccgaaagccagaaagttgaaaatgaacgcctcgcgaatacgttaagcaacacctaccgtgaatcaggcgcacagtttgccgatcaggtgagcggggcaattgaaaatagcctgaagtcaccgctggataaaattgcgggtgcggttcagactgccagcggcgatcaaagcggcatggtacagaacatgctgcaggatgtgctcaccgcatttatggcgaagctcgacaccacctttggccaacagtttacgaaccttaatgaaatgatggggcaaaccgtaggcgccatccagaccatgcagagcggcttctccgcactgttgcaggatatgcgtcaggtcagcgatgactcccgccagggcagcgcacagttgatggagcagctgttatccgaaatgaaatcgggccagcaggcaatgcaggctggaatgaacgatatgctcagtagccttcaggcatccgtcgccaaaatcggtgctgaaggggaaggcgccggtgaacgaatggcacgtcagttggaaaaaatgttcgctgacagcgaggcgcgagaaaaagcgcaggccgagcacatgtccgcatttattgaagctattcagaattcagtgcaacagggacaaagtgccacgatggaaaaaatggcgacctctgttgaagcgcttggtgaacagttaggtagcctgtttggtcagatcgataaaggccaacagcagatttccgcaaaccaacaggtaaatcagcaatcactgcatgagcagacacagcgagtaatgagtgaagtggacgatcaaatcaaaaagctgatcgagaccgttgccaaccagcatcagggtacgaccgaaacactgaacaaactcgcagaacaaaccagccgacagattcaggatatgcaaaacggcgcagacaaaatgcgcgttgccgccgagcgatttgaacatgcaggagatcgggtatcagaggccaaccacctcaccgcagatgttctgaacaaagcacaatcagccggttcatcgctttcacttgccactagcgaactcacgtctgtggtggcggattaccgtaataatcgggaagccgttagcaaatccatcgccatgctggagctacttgctgccaatacccagtcagaacaaaccactcgcagccagttcatcaccgatcttaagcagcatggtgagcgcctgcaaagttataaccgtgaagcgcagacctttatggaaaatgttagcgacgtgcttggcaaagggtttgaagacttctcagagggcgtttcacgtagcctggataaaacactgggcaaactggatgtcgaaatggcaaaagcctctaacttgctcgctggctctgtcgaacagatcggagaaagcgtcagcgaacttgatgatgttctgtctcgcgtacgtgcctga

SEQ ID NO: 8897 - DNA, 744 bp, Klebsiella pneumoniae IS46; identical to SEQ ID NO: 8865

SEQ ID NO: 8898 - DNA, 1683 bp, Klebsiella pneumoniae IS46; identical to SEQ ID NO: 8866

SEQ ID NO: 8899 - DNA, 2190 bp, Klebsiella pneumoniae BIDMC 11; identical to SEQ ID NO: 8868

SEQ ID NO: 8900 - DNA, 741 bp, Klebsiella pneumoniae BIDMC 11; identical to SEQ ID NO: 8869

SEQ ID NO: 8901 - DNA, 1683 bp, Klebsiella pneumoniae BIDMC 11; identical to SEQ ID NO: 8870

SEQ ID NO: 8902 - DNA, 3249 bp, Klebsiella pneumoniae BIDMC 11; identical to SEQ ID NO: 8871

SEQ ID NO: 8903 - DNA, 2190 bp, Klebsiella pneumoniae BIDMC 11; identical to SEQ ID NO: 8864

SEQ ID NO: 8904 - DNA, 744 bp, Klebsiella pneumoniae BIDMC 11; identical to SEQ ID NO: 8865

SEQ ID NO: 8905 - DNA, 1683 bp, Klebsiella pneumoniae BIDMC 11; identical to SEQ ID NO: 8866

SEQ ID NO: 8906 - DNA, 3243 bp, Klebsiella pneumoniae BIDMC 11; identical to SEQ ID NO: 8867

SEQ ID NO: 8907 - DNA, 2190 bp, Klebsiella pneumoniae MGH 63; identical to SEQ ID NO: 8864

SEQ ID NO: 8908 - DNA, 744 bp, Klebsiella pneumoniae MGH 63; identical to SEQ ID NO: 8865

SEQ ID NO: 8909 - DNA, 1683 bp, Klebsiella pneumoniae MGH 63; identical to SEQ ID NO: 8866

SEQ ID NO: 8910 - DNA, 3243 bp, Klebsiella pneumoniae MGH 63; identical to SEQ ID NO: 8867

SEQ ID NO: 8911 - DNA, 2190 bp, Klebsiella pneumoniae MGH 75; identical to SEQ ID NO: 8864

SEQ ID NO: 8912 - DNA, 744 bp, Klebsiella pneumoniae MGH 75; identical to SEQ ID NO: 8865

SEQ ID NO: 8913 - DNA, 1683 bp, Klebsiella pneumoniae MGH 75; identical to SEQ ID NO: 8866

SEQ ID NO: 8914 - DNA, 3243 bp, Klebsiella pneumoniae MGH 75; identical to SEQ ID NO: 8867

SEQ ID NO: 8915 - DNA, 2190 bp, Klebsiella pneumoniae CHS 66; identical to SEQ ID NO: 8864

SEQ ID NO: 8916 - DNA, 744 bp, Klebsiella pneumoniae CHS 66; identical to SEQ ID NO: 8865

SEQ ID NO: 8917 - DNA, 1683 bp, Klebsiella pneumoniae CHS 66; identical to SEQ ID NO: 8866

SEQ ID NO: 8918 - DNA, 3243 bp, Klebsiella pneumoniae CHS 66; identical to SEQ ID NO: 8867

SEQ ID NO: 8919 - DNA, 2190 bp, Klebsiella pneumoniae MGH 65; identical to SEQ ID NO: 8864

SEQ ID NO: 8920 - DNA, 744 bp, Klebsiella pneumoniae MGH 65; identical to SEQ ID NO: 8865

SEQ ID NO: 8921 - DNA, 1683 bp, Klebsiella pneumoniae MGH 65; identical to SEQ ID NO: 8866

SEQ ID NO: 8922 - DNA, 3243 bp, Klebsiella pneumoniae MGH 65; identical to SEQ ID NO: 8867

SEQ ID NO: 8923 - DNA, 2190 bp, Klebsiella pneumoniae BIDMC 33B; identical to SEQ ID NO: 8864

SEQ ID NO: 8924 - DNA, 744 bp, Klebsiella pneumoniae BIDMC 33B; identical to SEQ ID NO: 8865

SEQ ID NO: 8925 - DNA, 1683 bp, Klebsiella pneumoniae BIDMC 33B; identical to SEQ ID NO: 8866

SEQ ID NO: 8926 - DNA, 3243 bp, Klebsiella pneumoniae BIDMC 33B; identical to SEQ ID NO: 8867

SEQ ID NO: 8927 - DNA, 2136 bp, Klebsiella pneumoniae subsp. pneumoniae PittNDM01; identical to SEQ ID NO: 8872

SEQ ID NO: 8928 - DNA, 744 bp, Klebsiella pneumoniae subsp. pneumoniae PittNDM01; identical to SEQ ID NO: 8865

SEQ ID NO: 8929 - DNA, 1566 bp, Klebsiella pneumoniae subsp. pneumoniae PittNDM01
atggaaaagcgatttgataaagccgagaaaatccctgcgcctccacatgagatgcggctggcggcgctgcgtcgatttcgtcttgcagaagaattgaccgaacgtgagtggcgaatggtgttttatggtcttgttgatacggatccactccaccccaatcagccgatattgctggaagatgagcagcttttccctgaggtgaacagcgctatcaaaaagcggatcgaaaccaaaacgctgaagcgccgggattgggctgcactctgtgccagctattttgcttacaggaacgaaactccggaatcaaatccgcattggtgcgtgctgcgtggccacatcgctcagggctacctggtggtgaagtccgctatccgcagagaaaaatcgtggatgaaaacgattgagttttaccacgatatttttacacctcaggcaggcggcgtaatctcccaacagttactcgcgggcgaaagcaactcactctcctcactagaaaaaatcgcgcaaatccctgacagcagctggctatggaaacgtattttcacggtgctactggctcagcttgataccctggacgatcctcactatctggacaaaatcatttggttattagggctggcagcgcagtgggtacgttttcgcgatgacatcatgacggcgacgctaacccgttactatcattcaacctatcgcgatcaggcgcattccgccctgaaacaggctgcactggaatactgggataacccgcaactcaagagtcagcagaataagtggcatcagtatgtatccgaaccagtggctgcgatggtccggggctggctggcaaaacaggacttgatgcacttctttgagctgcttcgcggcaatggtgatgtcgatcaggccaggctgcactattggctgcgtttcgccaatcagatggggttcacccgtatcgtgatggggcaggatgcctggaccgatcgtgacagcgattttgtgaaattccgggaggagaatcgtgggaggctgagccatctgcgcggtggccgtagttttgataacgcgatgatcatgcagataaacgattacatcttcgttgaattttcaggaacggggaacgcgatgtacgcttaccgcatcggcgaggctccgttcaatcccgagtctggatctctggagattaatgtgcacttaaaaagccaggggcgctgcatcctgcgattaccgcatgctcctcgggcttatggatacagcaacgttcgcatcaccggctggatgctgaaatacgatgatgaactgcacaaactgggcattcgctggatggctgaagaacccattaagtttgttgataaaaaagagtcctcccccacttcgctctctgatgtcaaaatcattaatccgctgcgggatacggccatacagcgcctgctggaaaatatttcctgcatcgtcagcgataatcggcaaaaaggtggcgtgttgtctgtacagctcaaaacaccggatgacacaacggaaagagaattactcagactcggtttcacccccgtggccaaagaaccgcaccgttactggatcaaataa

SEQ ID NO: 8930 - DNA, 3243 bp, Klebsiella pneumoniae subsp. pneumoniae PittNDM01; identical to SEQ ID NO: 8867

SEQ ID NO: 8931 - DNA, 2190 bp, Klebsiella pneumoniae; identical to SEQ ID NO: 8864

SEQ ID NO: 8932 - DNA, 744 bp, Klebsiella pneumoniae; identical to SEQ ID NO: 8865

SEQ ID NO: 8933 - DNA, 1683 bp, Klebsiella pneumoniae; identical to SEQ ID NO: 8866

SEQ ID NO: 8934 - DNA, 3243 bp, Klebsiella pneumoniae; identical to SEQ ID NO: 8867

SEQ ID NO: 8935 - DNA, 2190 bp, Klebsiella pneumoniae; identical to SEQ ID NO: 8864

SEQ ID NO: 8936 - DNA, 741 bp, Klebsiella pneumoniae; identical to SEQ ID NO: 8873

SEQ ID NO: 8937 - DNA, 1683 bp, Klebsiella pneumoniae; identical to SEQ ID NO: 8866

SEQ ID NO: 8938 - DNA, 3243 bp, Klebsiella pneumoniae; identical to SEQ ID NO: 8867

SEQ ID NO: 8939 - DNA, 2190 bp, Klebsiella pneumoniae; identical to SEQ ID NO: 8864

SEQ ID NO: 8940 - DNA, 744 bp, Klebsiella pneumoniae; identical to SEQ ID NO: 8865

SEQ ID NO: 8941 - DNA, 1683 bp, Klebsiella pneumoniae; identical to SEQ ID NO: 8866

SEQ ID NO: 8942 - DNA, 3243 bp, Klebsiella pneumoniae; identical to SEQ ID NO: 8867

SEQ ID NO: 8943 - DNA, 2190 bp, Klebsiella pneumoniae; identical to SEQ ID NO: 8864

SEQ ID NO: 8944 - DNA, 744 bp, Klebsiella pneumoniae; identical to SEQ ID NO: 8865

SEQ ID NO: 8945 - DNA, 1683 bp, Klebsiella pneumoniae; identical to SEQ ID NO: 8866

SEQ ID NO: 8946 - DNA, 3243 bp, Klebsiella pneumoniae; identical to SEQ ID NO: 8867

SEQ ID NO: 8947 - DNA, 2190 bp, Klebsiella pneumoniae; identical to SEQ ID NO: 8864

SEQ ID NO: 8948 - DNA, 744 bp, Klebsiella pneumoniae; identical to SEQ ID NO: 8865

SEQ ID NO: 8949 - DNA, 1683 bp, Klebsiella pneumoniae; identical to SEQ ID NO: 8866

SEQ ID NO: 8950 - DNA, 3243 bp, Klebsiella pneumoniae; identical to SEQ ID NO: 8867

SEQ ID NO: 8951 - DNA, 2190 bp, Klebsiella pneumoniae
atgtcctggcttaattccctcttagtggcgcttacgtctgtggaacctcattgggttcccgtcaccgttatcgtccttgttagctttgccgtcatctgctttattttcttttatttatcaagagccatcaaaattgttaatggcctaaaaaaatatacaaaattaatcagcagcgttgaaaacagtgcaccagaggcccagcttgagcatcttaagagcctgtttcagcggcctgagctcaggcatgcgtggaatgagttcaaagaatcgttacacccgcagcgcgaactggagaacggggaagagaaaatcgtccgcattagagctactgcaccaagtgccagctttttctcggagcaacaactggtcgatattccgctgaacaccgaattcttcaaacacttacctggaatcctgaccggtgtagggattattggtaccttctatggcctgatgattggtctcaatcacttcgatcccagcacaccagagcaggtctccagcagcgtcaataatctgttgcacgatgtgttgtacgccttcctgggttcggcatttgctattttcgcctccattattgtcacctggctggaaaaactatccatcgccaagtgctacaaatatctggaaaaattcacagctgccctggactccctttatgacagtggtgttggtgaggagtaccttgcctcgctggtgaaatccagtaatgaaagcgcgactcaggctcgccatctgaaagagagtctggtcaccgatttacgcgatatgttgctgcaactggcagataaccagaaagtagaaaacgaacggttagcagccacgcttagcactacctatcgtgaatcagggcaacaatttgccgagcaagtcagtggcgcgattgaaaacagcctgaagtcgccgctagataaaattgccggtgcagtgcagaccgccagcggcgatcaaagcggcatggtacaaaacatgctgcaggatgtgctgactgcgtttatggcgaaactcgacaccacctttggtcagcagtttacaaacctcaacgacatgatggggcaaaccgttggcgtgattcagacaatgcaaactggatttgctgcgttgttacaggacatgcgtcaggtgagtgatgattcccgccagggtagcgcgcagctcattgagcaactgttgtcagagatgaagtctggccagcaagctatgcaggctggtatgaatgacatgctcactagtcttcaggcatcggtggctaaaattggcgccgaaggtgagggggccggagagcgtatggctcgccaactggaaaaaatgttcgccgatagtgaggcacgagaaaaggcgcaggcagagcatatggctgcctttaccgaagccatccagagctcggtgcagcagggacaaagtgccacaatggaaaaaatggcaacttctgtcgaggcgctgggtgagcaattagggagcctctttgggcagatcgataaggggcagcaacagatttcagcaaatcagcaagcgaatcagcagtccctgcatgaacaaactcagcgagtgatgagtgaggcagacgatcagattaaacaactgattgaaacagttgccagtcaacaccagggcaccactgaaacccttcgcctgcttgccgaacaaaccaaccgacagattcaggatatgcaaaacggcgcggataaaatgcgtcaggctgccgaacgctttgaacatgcaggtgagcgggtgtcggaagcaaaccacctcaccgctgatgtgctgaataaagcgcaatcagcaggttcatctctctctcttgccaccagcgaactcgcgtctgttgttgctgattatcgtaacaatcgggaagctgttagcaaatctattgccatgctggagttgctcgccgcaaatacgcagtctgaacaaaccacgcgcagtcaatttatcgccgatcttaagcagcacggtgagcatttgcagagttataacagggaggctcagacctttatggaaaatgtcagtgacgtgctcgggaaaggatttgaagacttctctgaaggtgtttcacgcagcctggataaaacgctgggcaaactggacgtcgaaatggcgaaagcctctaatctactcgccagttctgtcgaacagctcggagaaagcgtcagcgagcttgacgatgtcctgtcacgcgtgcgtgcgtga

SEQ ID NO: 8952 - DNA, 741 bp, Klebsiella pneumoniae
atgtttggaaacgcatttggcgttaaaaaacgccgtagcgatgaggcggagaaaccattctggatctcttatgccgatctgatgacggctatgatggtgttatttctggttgtcatggttgcgtcgttgagttccgtgacacagcgtattcaacgtgcggagcaaggtgaaaaaacaagggggcaggatatatccagattgtgtgagcgcctggaactgcatgcccgcaacgtgaacaaaactatcgttgtggattgccatgataaccgcatcagctttggtgaggccggacgcttcgatcacaaccgttttttcctgaacgctgaggggcaaaaagcactgcaggatgttgttccgcttgtgttggatgcagccgacagtgaagagggtaagaagtggttcaagcaaatcgttattgaagggtttaccgacactgatggctcatatctgtacaacctacatctctccctacaacgctctgaatgggtcatgtgtagcctgctcgatagccgcagcccactgcaaaaaagtatttccgcagaacaacagatccaaatccgtaaacttttccttgcagggggagtctccttcaataatgccaaggaaagcaaggaagccagtcgtcgcgttgagttacgtatgcagttcttcgggctcaaagataaacgagataaggctgatgaggtggatttcccccctgtggttaataaagaagtttgccagctggtaatgccccaatga

SEQ ID NO: 8953 - DNA, 1683 bp, Klebsiella pneumoniae
atgacgcccgcactgaattctctttctcaacgcattgctgcgaagctctcttccattcaacgggatgacgattatctgcgtaatgatttccatacgttaacatccgcggccctggatatggaaagacggtttgataaagcagaaagaattccttcgccgccacaagaaatgcggctggaggctctgcgtcgcctccgccttgtggaagaactcactgagagagaatggcggatggtattttatagtcttgccgataacgatccgttatatcctgaccggccaatcttgctggaggatgatatatttttccctgaggtcgacaacgctatcaagacgcggcttgaatctaaggcgttgaaacgcaaggattggactgcactttgttcaagttattttgcttatcagcatgagtcgcccgagaaaaatccacactggtgcatactacgtggacatattgcccaaggttacttcgtggtgaaagccgctatacgacgcgaaaaatcatggatgaagacaattgagctttatcacgacatttttaccccgcaagctggaggcgttatttccaggcagttacttgcgggtgaaaacaattcgctctcgtcattagataaaatcgcgcaaatccccgatagcagctggctatggaagcggatcttcgcggtgcttttagcgcaactggacacacttgacgatcctcagtttctggaaaaaattagctggctgttaggtctggcttcacagtgggttcgctttcgtgatgacatcatgacggagactctgacccgctattactactctgtctatcgcgatcaagaacattcagcgttgaagcaagctgcgctggaattctgggataacccccagttgaaaagccagcagaataaatggcatcaatatgtctccgagccggttgctgcaatggtccggggatggttagcaaaacaggacctgacacatttcttcgagctgttgcgcggtaatggcgatgtcgatcaggcacgattgcactattggttgcgtttcgccaatcaaatgggattcactcgtatcgtcatgggacctgatgcttggcaagaccgtggaagtgactttgtgaaattccgcgaagaaaataaggggcgattgagctatttacgaggcggacgtagctttgataacgccatgattatgcaaatcaacgattatctattcgtcgaattttccgggacaggaaatgcgatgtacgcctatcgaataggccacgcgccatttaaccctgaatcacgtacgattgatatcaacattcatctaaaagatcaggggcgctgcgcgctcaggttgccccatgcacctcgtgctgaggggtataacaaagtccggataaccggctggatgctgaaatacgacgatgagctatgcaagttgggcgttcggtggatggcggaagaacccgtcaagtttgtcgataaaaaagcctcctctcccgcttctttgtctggcatcaaaatcattaatcctctgcgtgatacggcaattcaaagcctggttgaaggtgcttcatgtgtcgtcagcgataatcgacaaaaaggtggcgtactgtctgtactgctcaatacgcctgacgacaccatagaaagagagttgttacgactaggctttacgcctgtggcaaaagaaccgcatcgttactggatcaaataa

SEQ ID NO: 8954 - DNA, 3249 bp, Klebsiella pneumoniae
atgctgaaacgcctcttaagtaaactgacgggaaatcgtcagcagatagagcacaatcttaagaatcagtatcaggttgaggaaaacggactcagttttccgctatcgctggttgatgattcgcagctttgggcactggcatcctggcttgagcaactggctgaagaagactatctgatatcactaacagaccggtggttattgagttgggatgccttgtacagtcttctggatgatgacgaacatgccagcagcctgcctcttatcggtgtaccagagatacttcctttacgcgcaagcctgagttcacgtggtgcattaagtgacagtgatcttcgcatctggattgcagaatgggccacacttcctgaacgtcaccctatccgtttcagccgtactggtgccatttttacttttgagaatcagcaatatctgttatccagggaaaactgggtactcatacaggcaacagaacgacttagtgcacagcaaagccaggttcccggcgaaaccactaaccaacttggatgggctgctatccgcaaatgtgcgaaacaagcctccgcaaaatttgatgattatttagaaaaaacgcatgtcgtcaagccgacgtcattgtcattacgtttgcgtaaagcaacggttgctgacactgcggttatcgaaattgaaccccattttgaggagcagcctgctaactggctgggtagttttgacaagaattcacaggttcatgatagctatcgcatcccaggagagaacggcgaacttagccatgtcatcattactcctgaagtgaaagaagtcctgaattccatacactcaatccctggccgtcgagtggcgggaagtgaagcgctttcgtttgttcgtaacccctattcatttttaggtgaagatgctgccgatgttctggcccccgaagaacatgaacaggcgttgtttgatgccaggattttctttcatcatttcaggttgataccccaacagagcgatgagaataagataatcgaagttacgctggtacttgaacctatttcacctgttccccagccagaggtcacttttgtgttctcagctccctgggagcttgaaaaatttatacagcaactcggtattagcgttgcagcgcagatgcctgctggatcctggcaaggttacgagctggagttaagccagttcactgaacaacagtggtacgattgccaggccctatttacacgctggcagcaagaaattgaaggagaagaatttagcgatgtgctggatattgcgaagtatggcgatcgggtgattggtattggtgaatttgaaaaaatttcctcgccctggctgaccaaggcacaaagtgaaaactggcttccagatgacatcgatttctcagtattttcgggcgaagtactgactggttggcaacccgaaaatcttcaccacttaggtgaattgcaggagagaattactcaggcagaatctgctggtgaaacgcatatcgccgcgccatggaatgatagccaattaccgctggatacagccaaaaccttcattaaaaactgggcaaaacagcagagcactgaaaatggatctcaagacaacgttgctgataaagctgtccgggctgtgctcaaaattgagcagaatattgaagaagctgcctacatcaaacagcgccgtgattcactcctcagtgcgcgcaacgcagaacctgaaattcccctgagtcttaaagagaatatccgactcaaagatcatcaacgcgaaggtgtggcctggctacagcaactcttccttcgttcaccagaggaaaccgctggctgtctgcttgctgatgatatgggcttggggaaaacgctgcaaattctgagtttcctggtatggtttattgaaaagtttccacaggaaccgccaagtctgattgttgcccctgtctctcttttagataactgggaacgtgagctggataatttcttctacaccgcgggtattcctgtgttgaaattgtacggtgagaccatcaaagtggtgaaataccccaaacagggtatacccgctcatctgcagtctcaggggattaaaaacctgcttaaacctggctggcaaggtgaggcgaaaatcatactgacgacttacgaaacgcttcgcgatcaagaattttctctggcacgccaaccgtggtccattatggtatgcgacgaggctcaaaaaataaaaaatccagctgcgttaatcactcatgctgccaacgcaatacaagcccggtttaaagtggcgtgcaccggtacacctgtcgagaatacacttgtagacctgtggagtttatttgattttgcgcagccagggttgttaggggcgctgaatgaatttggtaaacactatgttcgccctatcgaaaatgaggcaggccgcgatacggaacgactggaacgcttacgagcactgattgagccccagacattacgccgaactaaagaagaggttgcgcgtgatttaccacagaaaattgaagtggaaagttgcaagcagttgatgttgtctggagtgcaaaaacagctctacctttcgtctgttgcaaactggcaacagcaacaggcgctgagcgaaggcatgcagcaggctggaacaggtatgctggggttgctacaccgattgaagcttatttgcgcacaccctgcagttgtcaatccagagccgcgttttcgtgataactcacccaagcttaactggttgctgaaaatactcgcagaaataaaaagcactacgaaagataaagtcattatttttactgagcttcgagacttacagcgtgaacttcagcatgcgatccatcaaaagtttggtatccgccctgtcattattaacggtgataccagcactaaaagtaatagtcagaatagccgccagaggctgatcgatgatttccaggttcatcctggatttggggtgattattctctctacggttgcagtcggtttcggtgttaacgtacagaaagccaatcatgttattcatttcactcgttgctggaacccagccaaagaagatcaagcaacagatcgggcgtaccggattgggcaaattaaagatgtgtatgtttattatccgacggtgagggatcccgaaatcaccacatttgaagaaactctggatgaccttctgctgcggcggcgttcattagcaagagatatgctgtgtgcaactcctgacttgagtggcgctgattttgaggacattttgaaaggggcgttggactga

SEQ ID NO: 8955 - DNA, 2190 bp, Klebsiella pneumoniae; identical to SEQ ID NO: 8864

SEQ ID NO: 8956 - DNA, 744 bp, Klebsiella pneumoniae; identical to SEQ ID NO: 8865

SEQ ID NO: 8957 - DNA, 1683 bp, Klebsiella pneumoniae; identical to SEQ ID NO: 8866

SEQ ID NO: 8958 - DNA, 3243 bp, Klebsiella pneumoniae; identical to SEQ ID NO: 8867

SEQ ID NO: 8959 - DNA, 2190 bp, Klebsiella pneumoniae; identical to SEQ ID NO: 8864

SEQ ID NO: 8960 - DNA, 744 bp, Klebsiella pneumoniae; identical to SEQ ID NO: 8865

SEQ ID NO: 8961 - DNA, 1683 bp, Klebsiella pneumoniae; identical to SEQ ID NO: 8866

SEQ ID NO: 8962 - DNA, 3243 bp, Klebsiella pneumoniae; identical to SEQ ID NO: 8867

SEQ ID NO: 8963 - DNA, 2190 bp, Klebsiella pneumoniae; identical to SEQ ID NO: 8864

SEQ ID NO: 8964 - DNA, 744 bp, Klebsiella pneumoniae; identical to SEQ ID NO: 8865

SEQ ID NO: 8965 - DNA, 1683 bp, Klebsiella pneumoniae; identical to SEQ ID NO: 8866

SEQ ID NO: 8966 - DNA, 3243 bp, Klebsiella pneumoniae; identical to SEQ ID NO: 8867

SEQ ID NO: 8967 - DNA, 2190 bp, Klebsiella pneumoniae; identical to SEQ ID NO: 8864

SEQ ID NO: 8968 - DNA, 744 bp, Klebsiella pneumoniae; identical to SEQ ID NO: 8865

SEQ ID NO: 8969 - DNA, 1683 bp, Klebsiella pneumoniae; identical to SEQ ID NO: 8866

SEQ ID NO: 8970 - DNA, 3243 bp, Klebsiella pneumoniae; identical to SEQ ID NO: 8867

SEQ ID NO: 8971 - DNA, 2190 bp, Klebsiella pneumoniae; identical to SEQ ID NO: 8864

SEQ ID NO: 8972 - DNA, 744 bp, Klebsiella pneumoniae; identical to SEQ ID NO: 8865

SEQ ID NO: 8973 - DNA, 1683 bp, Klebsiella pneumoniae; identical to SEQ ID NO: 8866

SEQ ID NO: 8974 - DNA, 3243 bp, Klebsiella pneumoniae; identical to SEQ ID NO: 8867

SEQ ID NO: 8975 - DNA, 2190 bp, Klebsiella pneumoniae; identical to SEQ ID NO: 8864

SEQ ID NO: 8976 - DNA, 744 bp, Klebsiella pneumoniae; identical to SEQ ID NO: 8865

SEQ ID NO: 8977 - DNA, 1683 bp, Klebsiella pneumoniae; identical to SEQ ID NO: 8866

SEQ ID NO: 8978 - DNA, 3243 bp, Klebsiella pneumoniae; identical to SEQ ID NO: 8867

SEQ ID NO: 8979 - DNA, 2190 bp, Klebsiella pneumoniae; identical to SEQ ID NO: 8868

SEQ ID NO: 8980 - DNA, 741 bp, Klebsiella pneumoniae; identical to SEQ ID NO: 8869

SEQ ID NO: 8981 - DNA, 1683 bp, Klebsiella pneumoniae; identical to SEQ ID NO: 8870

SEQ ID NO: 8982 - DNA, 3249 bp, Klebsiella pneumoniae; identical to SEQ ID NO: 8871

SEQ ID NO: 8983 - DNA, 2190 bp, Klebsiella pneumoniae
atgtcctggcttaattccctcttagtggcgcttacgtctgtggaacctcattgggttcccgtcaccgttatcgtccttgttagctttgccgtcatctgctttattttcttttatttatcaagagccatcaaaattgttaacggcctaaaaaaatatacaaaattaatcagcagcgttgaaaacagtgcaccagaggcccagcttgagcatcttaagagcctgtttcagcggcctgagctcaggcatgcgtggaatgagttcaaagaatcgttacacccgcagcgcgaactggagaacggggaagagaaaatcgtccgcattagagctactgcaccaagtgccagctttttctcggagcaacaactggtcgatattccgctgaataccgaattcttcaaacacttacctggaatcctgaccggtgtagggattattggtaccttctatggcctgatgattggtctcaatcacttcgatcccagcacaccagagcaggtctccagcagcgtcaataatctgttgcacgatgtgttgtacgccttcctgggttcggcatttgctattttcgcctccattattgtcacctggctggaaaagctatccatcgccaagtgctacaaatatctggaaaaattcacagctgccctggactccctttatgacagtggtgttggtgaggagtaccttgcctcgctggtgaaatccagtaatgaaagcgcgactcaggctcgccatctgaaagagagtctggtcaccgatttacgcgatatgttgctgcaactggcagataaccagaaagtagaaaacgaacggttagcagccacgcttagcactacctatcgtgaatcagggcaacaatttgccgagcaagtcagtggcgcgattgaaaacagcctgaagtcgccgctagataaaattgccggtgcagtgcagaccgccagcggcgatcaaagcggcatggtacaaaacatgctgcaggatgtgctgactgcgtttatggcgaaactcgacaccacctttggtcagcagtttacaaacctcaacgacatgatggggcaaaccgttggcgtgattcagacaatgcaaactggatttgctgcgttgttacaggacatgcgtcaggtgagtgatgattcccgccagggtagcgcgcagctcattgagcaactgttgtcagagatgaagtctggccagcaagctatgcaggctggtatgaatgacatgctcactagtcttcaggcatcggtggctaaaattggcgccgaaggtgagggggccggagagcgtatggctcaccaactggaaaaaatgttcgccgatagtgaggcacgagaaaaggcgcaggcagagcatatggctgcctttatcgaagccatccagagctcggtgcagcagggacaaagtgccacaatggaaaaaatggcaacttctgtcgaggcgctgggtgagcaattagggagcctctttgggcagatcgataaggggcagcaacagatttcagcaaatcagcaagcgaatcagcagtccctgcatgaacaaactcagcgagtgatgagtgaggcagacggtcagattaaacaactgattgaaacagttgccagtcaacaccagggcaccactgaaacccttcgcctgcttgccgaacaaaccaaccgacagattcaggatatgcaaaacggcgcggataaaatgcgtcaggctgccgaacgctttgaacatgcaggtgagcgggtgtcggaagcaaaccacctcaccgctgatgtgctgaataaagcgcaatcagcaggttcatctctctctcttgccaccagcgaactcgcgtctgttgttgctgattatcgtaacaatcgggaagctgttagcaaatctattgccatgctggagttgctcgccgcaaatacgcagtctgaacaaaccacgcgcagtcaatttatcgccgaccttaagcagcacggtgagcatttgcagagttataacagggaggctcagacctttatggaaaatgtcagtgacgtgctcgggaaaggatttgaagacttctctgaaggtgtttcacgcagcctggataaaacgctgggcaaactggacgtcgaaatggcgaaagcctctaatctactcgccagttctgtcgaacagctcggagaaagcgtcagcgagcttgacgatgtcctgtcacgcgtgcgtgcgtga

SEQ ID NO: 8984 - DNA, 741 bp, Klebsiella pneumoniae; identical to SEQ ID NO: 8952

SEQ ID NO: 8985 - DNA, 1683 bp, Klebsiella pneumoniae
atgacgcccgcactgaattctctttctcaacgcattgctgcgaagctctcttccattcaacgggatgacgattatctgcgtaatgatttccatacgttaacatccgcggccctggatatggaaagacggtttgataaagcagaaagaattccttcgccgccacaagaaatgcggctggaggctctgcgtcgcctccgccttgcggaagaactcactgagagagaatggcggatggtattttatagtcttgccgataacgatccgttatatcctgaccggccaatcttgctggaggatgatatatttttccctgaggtcgacaacgctatcaagacgcggcttgaatctaaggcgttgaaacgcaaggattggactgcactttgttcaagttattttgcttatcagcatgagtcgcccgagaaaaatccacactggtgcatactacgtggacatattgcccaaggttacttcgtggtgaaagccgctatacgacgcgaaaaatcatggatgaagacaatagagctttatcacgacatttttaccccgcaagctggaggcgttatttccaggcagttacttgcgggtgaaaacaattcgctctcgtcattagataaaatcgcgcaaatccccgatagcagctggctatggaagcggatcttcgcggtgcttttagcgcaactggacacacttgacgatcctcagtttctggaaaaaattagctggctgttaggtctggcttcacagtgggttcgctttcgtgatgacatcatgacggagactctgacccgctattactactctgtctatcgcgatcaagaacattcagcgttgaagcaagctgcgctggaattctgggataacccccagttgaaaagccagcagaataaatggcatcaatatgtctccgagccggttgctgcaatggtccggggatggttagcaaaacaggacctgacacatttcttcgagctgttgcgcggtaatggcgatgtcgatcaggcacgattgcactattggttgcgtttcgccaatcaaatgggattcactcgtatcgtcatgggacctgatgcctggcaagaccgtggaagtgactttgtgaaattccgcgaagaaaataaggggcgattgagctatttacgaggcggacgtagctttgataacgccatgattatgcaaatcaacgattatctattcgtcgaattttccgggacaggaaatgcgatgtacgcctatcgaataggccacgcaccatttaaccctgaatcacgtacgattgatatcaacattcatctaaaagatcaggggcgctgcgcgctcaggttgccccatgcacctcgtgctgaggggtataacaaagtccggataaccggctggatgctgaaatacgacgatgagctacgcaagttgggcgttcggtggatggcggaagaacccgtcaagtttgtcgataaaaaagcctcctctcccgcttctttgtctggcatcaaaatcattaatcctctgcgtgatacggcaattcaaagcttggttgaaggtgcttcatgtgtcgtcagcgataatcgacaaaaaggtggcgtactgtctgtactgctcaatacgcctgacgacaccatagaaagagagttgttacgactaggctttacgcctgtggcaaaagaaccgcatcgttactggatcaaataa

SEQ ID NO: 8986 - DNA, 3249 bp, Klebsiella pneumoniae
atgctgaaacgcctcttaagtaaactgacgggaaatcgtcagcagatagagcacaatcttaagaatcagtatcaggttgaggaaagcggactcagttttccgctatcgctggttgatgattcgcagctttgggcactggcatcctggcttgagcaactggctgaagaagactatctgatatcactaacagaccggtggttattgagttgggatgccttgtacagtcttctggatgatgacgaacatgccagtagcctgcctcttatcggtgtaccagagatacttcctttacgcgcaagcctgagttcacgtggtgcattaagtgacagtgattttcgcatctggattgcagaatgggccacacttcctgaacgtcaccctatccgtttcagccgtactggtgccatttttacttttgagaatcagcaatatctgttatccagggaaaactgggtactcatacaggcaacagaacgacttagtacacagcaaagccaggttcccggcgaaaccactaaccaacttggatgggctgctatccgcaaatgtgcgaaacaagcctccgcaaaatttgatgattatttagaaaaaacgcatgtcgtcaaaccgacgtcattgtcattacgtttgcgtaaagcaacggttgctgacactgcggttatcgaaattgaaccccattttgaggagcagcctgctaactggctgggtagttttgacaagaattcacaggttcatgatagctatcgcatcccaggagagaacggcgaacttagccatgtcatcattactcctgaagtgaaagaagtcctgaattccatacactcaatccctggccgtcgagtggcgggaagtgaagcgctttcgtttgttcgtaacccctattcatttttaggtgaagatgctgccgatgttctggcccccgaagaacatgaacaggcgttgtttgatgccaggattttctttcatcatttcaggttgataccccaacagagcgatgagaataagataatcgaagttacgctggtacttgaacctatttcacctgttccccagccagaggtcacttttgtgttctcagctccctgggagcttgaaaaatttatacagcaactcggtattagcgttgcagcgcagatgcctgctggatcctggcaaggttacgagctggagttaagccagttcactgaacaacagtggtacgattgccaggccctatttacacgctggcagcaagaaattgaaggagaagaatttagcgatgttctggatattgcgaagtatggcgatcgggtgattggtattggtgaatttgaaaaaatttcctcgccctggctgaccaaggcacaaagtgaaaactggcttccagatgacatcgatttctcagtattttcgggcgaagtactgactggttggcaacccgaaaatcttcaccacttaggtgaattgcaggagagaattactcaggcagaagctgctggtgaaacgcatatcgccgcgccatggaatgatagccaattaccgctggatacagtcaaaaccttcattaaaaactgggcaaaacagcagagcactgaaaatggatctcaagacaacgttgctgataaagctgtccgggctgtgctcaaaattgagcagaatattgaagaagctgcctacatcaaacagcgccgtgattcactcctcagtgcgcgcaacgcagaacctgaaattcccctgagtcttaaagagaatatccgactcaaagatcatcaacgcgaaggcgtggcctggctacagcaactcttccttcgttcaccagaggaaaccgctggctgtctgcttgctgatgatatgggcttggggaaaacgctgcaaattctgagtttcctggtatggtttattgaaaagtttccacaggaaccgccaagtctgattgttgcccctgtctctcttttagataactgggaacgtgagctggataatttcttctacaccgcgggtattcctgtgttgaaattgtacggtgagaccatcaaagtggtgaaatactccaaacaggctatacccgctcatctgcagtctcaggggattaaaaacctgcttaaacctggctggcaaggtgaggcgaaaatcatactgacgacttacgaaacgcttcgcgatcaagaattttctctggcacgccaaccgtggtccattatggtatgcgacgaggctcaaaaaataaaaaatccagctgcgttaatcactcatgctgccaacgcaatacaagcccggtttaaagtggcgtgcaccggtacacctgtcgagaatacacttgtagacctgtggagtttatttgattttgcgcagccaggattgttaggggcgctgaatgaatttggtaaacactatgttcgccctatcgaaaatgaggcaggccgcgatacggaacgactggaacgcttacgagcactgattgagccccagacattacgccgaactaaagaagaggttgcgcgtgatttaccacagaaaattgaagtggaaagttgcaagcagttgatgttgtctggagtgcaaaaacagctctacctttcgtctgttgcaaactggcaacagcaacaggcgctgagcgaaggcatgcagcaggctggaacaggtatgctggggttgctacaccgattgaagcttatttgcgcacaccctgcagttgtcaatccagagccgcgttttcgtgataactcacccaagcttaactggttgctgaaaatactcgcagaaataaaaagcactacgaaagataaagtcattatttttactgagcttcgagacttacagcgtgaacttcagcatgcgatccatcaaaagtttggtatccgccctgtcattattaacggtgataccagcactaaaagtaatagtcagaatagccgccagaggctgatcgatgatttccaggttcatcctggatttggggtgattattctctctacggttgcagtcggtttcggtgttaacgtacagaaagccaatcatgttattcatttcactcgttgctggaacccagccaaagaagatcaagcaacagatcgggcgtaccggattgggcaaattaaagatgtgtatgtttattatccgacggtgagggatcccgaaatcaccacatttgaagaaactctggatgaccttctgctgcggcggcgttcattagcaagagatatgctgtgtgcaactcctgacttgagtggcgctgattttgaggacattttgaaaggggcgttggactga

SEQ ID NO: 8987 - DNA, 2190 bp, Klebsiella pneumoniae; identical to SEQ ID NO: 8864

SEQ ID NO: 8988 - DNA, 744 bp, Klebsiella pneumoniae; identical to SEQ ID NO: 8865

SEQ ID NO: 8989 - DNA, 1683 bp, Klebsiella pneumoniae; identical to SEQ ID NO: 8866

SEQ ID NO: 8990 - DNA, 3243 bp, Klebsiella pneumoniae
atgctaaaacgtctgttaagtaaactgacgggagaccgtcagcagatagaacgccacctgaagaatcagtaccgggctgaagaaaacgggctcagcttccctcaatctttggtggatgatcccgagctttgggcgctggcatcctggcttgagcaactggctgaagaagactatctaatatcactcacagaccgatggttgctgagctgggaggcgttgtatcacctgctggaagatgaagagcatgccagtagcctgcctctaattggcatacctgaagtattgcctttacgtgcaagcatgagttcacgaggagcgctaagcgataaggatttccgcgtctggattgctgaatggactacgcttccctcacgtcaaactatccgtttcagccgcaccggggctatttttactcatgaaaaccagcagcatctgttatcacgagaaaactgggcgctcttgcaggcaaccgagcagctaagcatccagcaaactcaggcccccggcgaaaccactaaccagctgggatgggccacaattcgcaaatgcgcgaaacaggccgctgcaaaatttgatgattatttagaaaaaacgcatgtcattaaacccacttcattgtcgttacgcctccgtaaggcgacagttgctgatactgccgttatcgagattgaaccccactttgaggaccaacctgcaaactggctcggcagttttgataagaacgctcaggttcatgatagctaccgtattcccggggagaacggtgaactcagccatgtcattatcccaccccaagtgaaagaagttctgaattcaatacactcaatcccaggccgtcgggtggccggtagtgaggctctttcctttgttcgcaacccctatactttcctgggtgaagatgccgccagtgttattgcccctgaagagcatgagcaggcgctgtttgatgcccatatcttcttccaccatttcagacttcaacccagtgtaaatgatgagaacaagataaacgatattacgctggtacttgaacctgtctctcccataccgcaaccggaagtgacattccttttctctgctccatgggagttggataaatttgttcaggccgtagggataagtgttgccgcacaaatgccagcaggttcctggcagggttacgagctggaactgagccaattcacggaacagcaatggcatgactgccagtcactgctgacgcgctggcaacaggaagtcgaaggtaaagaatttagcgatgtcctggatctgggcaaatatggcgatcgcgtcatcggcatcggtgagttcgaaaaaatatcctctccctggctgaccaaggcgcaaagtgaaaactggctccctgttggcatcgacttctccgaattttcggtagaaacactggatggctggcaacccgataatctgcagcatttcgatgaactgcaggagagaataacctatgccgaagcgactggcgaaacgcatatcatctctccctggaatgagactgaactgccactggatgcggcgaaaaccttcagtaagaactgggaaaaacagcaaaatgcagcacatgaatcagagagcaatgttgttgaaaaagcagcccgggcagtgctcaaaattgaacagaatattgaagaagcggtttacattaaacagcgccgaaattcactcctcaatgcacgcaatgctgaacctgaaattccactgagcctgaaagagcacatccgactcaaagaccaccagcgtgaaggtgtggcctggcttcagcagcttttccttcgttcacctcaggaaactgcaggttgcctgctcgcggatgatatggggctggggaaaacgctgcagattctgaccttcctggtgtggttcattgaaaaattccctgacgagccaccaagtctcatcgttgcccccgtctctcttttggataactgggagcgtgaactcgacaatttcttctacacctctgggatttcggtgatgaaattgtatggcgacactatcaaagcggtgaaatacccgaaacaggcgattcctgctcatctccaaagtcaggggattaaaaatttgctcaaacccggctggcagggtgaagcgaaaatcattctgacaacctacgagacgcttcgcgatcaggagttctccctggcgcgccagccatggtccatcatggtctgcgacgaggcacaaaaaataaagaacccggcggcattaatcactcatgcagccaatgcgatacaagcaagattcaaagtggcatgtaccggcacgcctgtcgaaaacacgcttgtagacctgtggagcctctttgatttcgcacagcctggcctgttaggtgcactcaatgaatttggcagacactatgttcgcccgatagagaacgaagcgggtcgggatacagggcagcttgaaagcttacgagcgttgattgaaccacaaacattacgccggactaaagaagaagttgcgcgtgatttaccgcaaaaaatcgaagtcgttagttgtaagcaactgccgctttctggccctcaaaagcaactgtatctttcttcgatagcgaactggcaacaacagcaggcacttagtgaaggaatgcagcaggcgggggcggggatgctggggttattacatcgtcttaaactcatttgtgcacacccagcagtcgttaaccctgagcctcgatatagggaagggtcgccaaagctaaactggatgttgaaaacgctagatgaaattaagcacaccagcaaagacaaagtaatcatctttactgagctgcgcgatctccagcgcgagatacagcatgctattcaacagcgattcggtttccgtccggtgatcatcaacggcgacaccagtactaagagtcatagccagaatagccgccagcgattgattgataatttccagtcccaatccggctttggcgtgattattctctccaccgtcgcagttggatttggggttaacgtgcagaaagcaaaccacgttattcatttcacccgctgttggaatccggcaaaagaagatcaggcaactgaccgcgcttaccgtatcggccagacaaaagatgtatatgtgtattatccgacggtaatggactctgaaatcacgacgtttgaagaaacattagatgaactccttcagcgtcgccgtgcattggccagagatatgttatgttctacacctgagctgagcagtgccgattttgagaatattttaaaagggacataa

SEQ ID NO: 8991 - DNA, 2190 bp, Klebsiella pneumoniae; identical to SEQ ID NO: 8864

SEQ ID NO: 8992 - DNA, 744 bp, Klebsiella pneumoniae; identical to SEQ ID NO: 8865

SEQ ID NO: 8993 - DNA, 1683 bp, Klebsiella pneumoniae; identical to SEQ ID NO: 8866

SEQ ID NO: 8994 - DNA, 3243 bp, Klebsiella pneumoniae; identical to SEQ ID NO: 8867

SEQ ID NO: 8995 - DNA, 2190 bp, Klebsiella pneumoniae; identical to SEQ ID NO: 8864

SEQ ID NO: 8996 - DNA, 741 bp, Klebsiella pneumoniae; identical to SEQ ID NO: 8873

SEQ ID NO: 8997 - DNA, 1683 bp, Klebsiella pneumoniae; identical to SEQ ID NO: 8866

SEQ ID NO: 8998 - DNA, 3243 bp, Klebsiella pneumoniae; identical to SEQ ID NO: 8867

SEQ ID NO: 8999 - DNA, 2190 bp, Klebsiella pneumoniae subsp. pneumoniae; identical to SEQ ID NO: 8864

SEQ ID NO: 9000 - DNA, 741 bp, Klebsiella pneumoniae subsp. pneumoniae; identical to SEQ ID NO: 8873

SEQ ID NO: 9001 - DNA, 1683 bp, Klebsiella pneumoniae subsp. pneumoniae; identical to SEQ ID NO: 8866

SEQ ID NO: 9002 - DNA, 3243 bp, Klebsiella pneumoniae subsp. pneumoniae; identical to SEQ ID NO: 8867

SEQ ID NO: 9003 - DNA, 2556 bp, Klebsiella pneumoniae
atgttttcgctgacctcgttcctcgacacgttaacctctgttaatccagaaaatgtgccgaaatatgtcgctcttgttgtcgtggttctgttggtgtgcttcattgctcgctatgccatcccttcctttgtgatttcagcccgcttcaagaagaaagcgagagaaattcaactgattgcaaaagataaaccggctcagcaactggaaaaactggatgcctttttttccggaaagttctttgcgcatccctggagtgaatttaaagagtcgctccatcggcagtttgagttagacggtgacgaaggtcaaaagcggatccatagcattcgttctactgcaccagcttccgcctggttctctgaacccttactggtagagattccactctatacggaggcctttaagcatttgcctggcatcctgaccgggattggaataataggaactttctcaggcctgatgatcggcttgcaccacttcgaccccagtacacccgaacaagtgagcgccagcgtagctaaccttttgcgtgatgttctgtacgcgtttttaggctccgcctttgccattactttctccatcctggtcaccatgtttgaaaaatggcggctggcgagatgctataaaaaccttgagtttctgaccgccagtatcgaccagctttttgaaggcggtgtcggtgaagattatctttctcagcttctctccagcaccaaagaaaacaccattcatgccaaacaactaaaagatggcctcgtcagtgatttaagagagatgctgcagaacctggtggacagtcaggtgcgagaaaatcagaaaatggcagagacattgtcttctacttatcgggaatccggtcagcagattgcggagcaggttagcggtgccatcgaaactagtctgaaaaatccgttggacaaaattgcgggcgtggtgcaaaccgcctccggcgatcagagtcatcgagtgcagtcgatgcttgagaacgtccttactgcttttatgaacaaaatggataacacgtttggtcagcagtttaccacgatgcaggagatgatgggccgttccgtggaggcgatccagagcatgcaaagcggtttcgctaccctgctgcaggatatgcgtcaggctggggatgattcgcgtcagggcagtgcccaactgatctctcagttactcagcgaaatgaaaagcggccagcaagagatgcaggcgggtatgaatgacatgctgcgaagcctgcaggaatctgtagcccgcattggcgcagaaggtgaaggtgctggcgaacgcatggcccaacagctggaaaaaatctttgccgacagtgaagtgcgtgaaaaagcgatggcagaacagatgcgtgcctttattgaagccattcagtccagtgttcaacagggacaaaatgaaactatggagaaaatggcggcctctgtggatacgcttggcagccatatggcaaccttgttcgcacaactggaaaatggtcagcagcaactcaatcagcagcaaaaccaggcgcaaaatctgttgatgagcaatatgagtaaaggtgttgaagatctgactcaaagcctggcaggtgtattcagtcaactggagtctggacaaaaacagatgagccagactcaggaactaggacagcgcgctctgcatgaagagactcaacaactattggcccgtagcgaagctcgtgaacaggcggccgccgagcaacaacaagattttatggctgccctgcaaaaaactatgcactcaggtcaggatgccctgcgtgagaaaatgaccagcggtattgatcagttgggtagccaattgggcagcctgtttgggcaactggaagaaggccagaaatcactgagccagcaacaacaatcggctcagaatgctctgcaacaggaagctcagcgaatcatcggccagcctgagagtcaggttcaggcattaatgcagatgctgcgtgagcagcaatccgcatcaggcgatttactgcaacggatggcgcaaaacacgacgcgtcacctggaagaaattcagacgggtgccgataaaatgcgggttgctgccgatcgctttgaagcagcggggaatcgtgtcaccgaagctaataatctgactgcagaagttctgaatggtacccagcaagcaggcagaaccctttccagtgccagcgctgagctgggcgcattgatcgctgattaccgcaacacccgtgaggttgtggcgaatgccatcagtacactggaaacgctgatcaatagcagctatgacgagcaaacatcccgcagccggtttgttgaggatctgaaatcgtattccgagggtctgcaacaatataaccgtgaggcccaggagttcctccacaacatcgctgacgtgatgggcaccagctttgagtccttcaccaccggggtagtaagcggtctgaaccgttcgctccaggagatggatacgcaactgacaaaagcggctggggcgttaagttcttctgttgaaatcatcggtgaaagcgtggatacgctggaaactgtgctccgtagtcgtcgcgcgtaa

SEQ ID NO: 9004 - DNA, 738 bp, Klebsiella pneumoniae
atgtttaaccgggcattcaatggtaggcagcgtcgtagtgatgaagcggaaaaaccattctggatttcctatgccgacctgatgacagccatgatggtgctatttttggtcgtcatggtggcatcacttagttccgtcacacaaaggatccagcaggcagaagcaggcgaaaagtcccgagggcatgatatcgcccgtctgtgtgaaaaacttgagctacaggcaaagaacctgaataaaacgatacatgtcgactgccatgataatcgtattagctttggtgaggcaggccgttttgagcataatcgcttttcgctcactcctgaagggttgaaggctctacaggatgtggtgccgttagtcctggatgcggcaaatagcgatgaaggtaagaaatggtttaaacagatcgttattgaggggtttactgataccgacggttcgtatctctacaacttgcatctctctcttcagcgctcggaatgggtgatgtgcagtctgctggatagcagaagcgcgttacagcaaagaattaccgcagaccaacaaatacagattcgaaaattatttttggcgggtggcgtgtcgttcaacaacgcgaaagagagtaaagaagccagccgtcgtgtcgagttacgcatgcagttctttggcttaaaagataaaaaacaagacgagagtatggatgtcgtcccgagtattagtcaggaaacctgccaactgggtgcagtgcaatga

SEQ ID NO: 9005 - DNA, 1884 bp, Klebsiella pneumoniae
atgacgtccgcgatagagaagcttaaatcacgacttctcccttaccgggaaaagagtgtggatccggttgtgggtcacccgtttacctatctacaacgcgtcatcaaccaacttgagagaaaggtagatgctcgcgcagttaagatggtgcctcctgcagagaaacgcagacaagcaatttcccgattgcgttcgggagaaacgccacagccatctgagtggaagatgatcttttttggcctcaatgacgttgcagaaggtgatctatttgatacagcactcattgatgatgcggcagattttgccaaaatctcggctgaaattcagagcaaaattgcacatcaacgattaacgcgtagggagtggctggcgttatgtaccagctattttggacttgtcagcgatgctcccgaagaaaatccgcagtggcttcagttacgaatgcagattgtaagcgggtttaaacagttaaaagagagttcgcctcgcccgttgtcatggatggcggtcatcgatacctacggtgatatttttaccgacaatgcgggttttctgcttgggcaacagctcggccgtggggaaataaccgatatctccgtgctggaaaaagtggcacagatcccccagaccagttggctatggtgcaaaattgttaaccatctggtgagcgagatttttcgtcagactgacgatgagtttgaacaaaaaattaatgaactgatcgcgttgagccgtcagctttctcgttttaaagataacctgttggccgcgatgttaactcgttattgtcattcagtttataaacaaaaaacacatcttgagcttaagcaaatttcgcttgaatattggggaaatcctcagcttatcgcgcgtaacaaagggtggcttttgcatgtagagaagccagtactcttgatggtccaaagttggtttgcgaaggatgaccttaagttattctttgaattacttaaagggaatcgggatgttgatgaagctcgtttattttactggttacgttatacaaaccagatgagttatacgcggattgtgttaggcaccgactctcaggagtcgaaagatcccgcctttgttgagtttcgtaataaaaatgcgtgtcgtttaagccaactgacaggtactggcgcacgagataataatgctatcattatgcaaattggtgattatctctttgttgaatattctaaagttggtgcggtttatccttaccatcatgcaaaggctccttttgatgcagaaaaacaaacgcttaacatagagcgtgaactcaaaagtatgagtaaaaccgtaggggagcgtttaatacaccgttcttctgtcaatgactgggagcacaatcctatccatggctggatgaagaactttgatgatgctctgaaccgtttgggtatttattatcaggcagaggacacgacactggtaaactcgaattccgtggattactcacgttttgaaattaagcctctaacgacaacctctgttacggactcagttattgaatccgtaaatattcctgaacctcctactgccgctgaacctatagcacctcctaaacaggtccgttcttcacttgcggcatcgatgcttgaacgtcatcagcgtaacgatgttctggccaaggaaaagcgccttaaaattattactaaatcacaaaaagccagacaggctcgtgaagccgagctatccagagaacaacaaataaaagaaattattcgctctgcgggttgcaaggtcgaggatcggagaggtatgggaggagtacttcatattcaatttttgacccctaattacgacgccaccaaagaattgctcaggctaggttttaaacctgtctcaggtaaatatcttcgctactggagcaaatga

SEQ ID NO: 9006 - DNA, 3234 bp, Klebsiella pneumoniae
atgttcaaaggtttgtttggtaaattatttagagacaaaaaaagcaattctgctcctaccatcccgttatatggactacagcctgagggggtgctctttccctttagcattgccgaaaatgaagataactggcttgtagtttcatgcctggaacaactccatgaagaagattatgtatcacattggtcggattgctggtttctcagttgggatgatttctatcgcatactgaaaaatgaagattatgccagtagcctggcaattttcagcttccctcaacagcgtaatctgaccgcccatcttactgcgacagggagcatcagcaatgacacctttcgagttttcattgataaatggacccagcctgacgattatcgccccgtagagatcactaacctgggggccagcttttcctcaccggaaggcacttttgtgctcagcgaagaaaactggcagcttctggactcactacagcagctcagattacagcagcgacagacgccgggtgaaacggtaaaccaaaccgggtgggcaaaaatacgtcagctggctaaaaaggcagaggcaacactggatgattatcttgctaaaacgatagttatcaggcctgaggcattgcagttaaagttgcggaaatttcttgtggcggatacccgcgtgctggaaattgagccggtttttgacgaacaacctgcaaactggctgcagagttttgatcgtacacagcaggtacaagatcgttatcgtgttttaggtgatgacggtgaattaaaccacgtcattctttctcctgaagttaaagatgtgcttgcctctgtacatgccattaccggccgtcgagttgctggtgatgatgcgctttcgttcgttcgcaatccgtatacctggattggtgaagaagccagccaggtacttgatcccgaggtctatgagcagaatctacaggatgcagggatctacttttatgattttcgcctggagcctcaggttgatgaaaacatgcagattaagtctgtttcgctgatcctgagccccaggactgaacagcctgtgccaaatgaaacatacgtgtttaatcgaccaattgaattggctgcgttgattactgaattagaacaaaagttagcggcgcatcttcctgctggtgtctggcagggctatgacctcgagctgtccagattcacgcaggatgaattgcaagaatatcaggcattgctggaagactggcggaaacaggctgcgggattgaatttttctcacgtactcgatctcaacaagtacagcgacagggtcatagggataggagagtttgagaaaatcagttcaccgtatctcgtcaaaaatgaaagtgaaaattggcttccagataatctcgttaaggagatgtgtgaagacatgttctcgggctgggacctggataatcatcaacattttcatgaactagaaacgcgtctggaagatgcaaaagcctctgatgctcctgaagtcgctatgccctggaacgagaaccttctaccacgagaagaagcagaggttttccacgaaaagtggaaaaagaaaatcgatgctgagacaagcgatactgcgaatgctaagccggtgagtcgggctgtcctgcttatcgaacaaaatattgagcaggcactgtatatcaaacagcggcgaacatccttgctggaagcacacttggctgaagccgagcttcctataattctcaaggactctattcagctacgtgagcatcagtgtaaaggcgttgcctggctccagcagttgtaccttaaatccccaacagagacgacgggatgcttgctggcagacgatatggggctggggaaaacgttacagattttaaccttcctcatctggcatcgtgagcgtttccccgatgctccgccctctctgattgttgccccggtttcgttactcgacaactgggagcgcgaggtcggtaattttttcctgcgcgagcaggtatcgattttaaagctttacggcaatgaactcagagagaaaaagtgcgctaaggagagtatccctttggcgttaaagagtaaggggattaaaaacctgctgcaaaatgactgggttggagaagctcagatcgttctgaccacatacgaaacgttacgcgatcaggaattttctttggctcgccaaccctggtccatcatggtttgcgatgaggcacagaaaattaaaaatccggcagccctaattacccagtcagctaaggcaattcaggtgcaattcaaagttgcgtgtactggaacacctgttgaaaatacgctagttgatctatggtgcttgtttgactttgttcagccaggtctcttgggagcactgaataattttggcaaagattacctgtggccgatcgagcaagagagtaatgataaggtgcttgaatctctcagaaaattgattgaaccacagacactgcggcgcactaaggaagaagtggcgaaagatcttccggaaaaaattgaagataaatcctgtaagcagcttagtatgttgccgttacagcgggacctctatactcactcggtagtgagctggcagaaccaacaggaaatcagcgaaggtctggatcaacgtggtgcaggtatgcttggactactccaccgcctgaaactgatttgtgcatggccttattccgtgagtgctgatctacgcttacgtaacgatgccccgaaagtgaaatggcttttggatactttgaataatattcgccagtcatcagatgataaggtcattatctttactgaactgcgagatattcaacgtgaattgcagcatctggtctcgcagcattttggattcaagccttttatcattaatggtgataccagcacgaaatccggaagtgaccaaaaccgtcagagtttgatcgataactttcagtcatcgccgggttttaacgtcattatcctatcgacaatagccgttgggtttggtgtcaatgtacaaaaagcaaatcatgtcatccattttactcgctgttggaaccctgccaaagaagatcaggcaactgaccgggcttatcgcatagggcagcaaaaagatgtctacgtttactatccaactgtgcgtgatagtcagttaatgactttcgaagagaccctggatgaattactgaaccggcgcagagctatggcaagagatatgctcaaagcttcaaccgatctcattgctgctgattttgaagcggtacttacccgagccccgtag

SEQ ID NO: 9007 - DNA, 2190 bp, Klebsiella pneumoniae; identical to SEQ ID NO: 8864

SEQ ID NO: 9008 - DNA, 741 bp, Klebsiella pneumoniae; identical to SEQ ID NO: 8873

SEQ ID NO: 9009 - DNA, 1683 bp, Klebsiella pneumoniae; identical to SEQ ID NO: 8866

SEQ ID NO: 9010 - DNA, 3243 bp, Klebsiella pneumoniae; identical to SEQ ID NO: 8867

SEQ ID NO: 9011 - DNA, 2190 bp, Klebsiella pneumoniae; identical to SEQ ID NO: 8864

SEQ ID NO: 9012 - DNA, 741 bp, Klebsiella pneumoniae; identical to SEQ ID NO: 8873

SEQ ID NO: 9013 - DNA, 1683 bp, Klebsiella pneumoniae; identical to SEQ ID NO: 8866

SEQ ID NO: 9014 - DNA, 3243 bp, Klebsiella pneumoniae; identical to SEQ ID NO: 8867

SEQ ID NO: 9015 - DNA, 2190 bp, Klebsiella pneumoniae subsp. pneumoniae; identical to SEQ ID NO: 8864

SEQ ID NO: 9016 - DNA, 741 bp, Klebsiella pneumoniae subsp. pneumoniae; identical to SEQ ID NO: 8873

SEQ ID NO: 9017 - DNA, 1683 bp, Klebsiella pneumoniae subsp. pneumoniae; identical to SEQ ID NO: 8866

SEQ ID NO: 9018 - DNA, 3243 bp, Klebsiella pneumoniae subsp. pneumoniae; identical to SEQ ID NO: 8867

SEQ ID NO: 9019 - DNA, 2190 bp, Klebsiella pneumoniae; identical to SEQ ID NO: 8864

SEQ ID NO: 9020 - DNA, 741 bp, Klebsiella pneumoniae; identical to SEQ ID NO: 8873

SEQ ID NO: 9021 - DNA, 1683 bp, Klebsiella pneumoniae; identical to SEQ ID NO: 8866

SEQ ID NO: 9022 - DNA, 3243 bp, Klebsiella pneumoniae; identical to SEQ ID NO: 8867

SEQ ID NO: 9023 - DNA, 2190 bp, Klebsiella pneumoniae; identical to SEQ ID NO: 8864

SEQ ID NO: 9024 - DNA, 741 bp, Klebsiella pneumoniae; identical to SEQ ID NO: 8873

SEQ ID NO: 9025 - DNA, 1683 bp, Klebsiella pneumoniae; identical to SEQ ID NO: 8866

SEQ ID NO: 9026 - DNA, 3243 bp, Klebsiella pneumoniae; identical to SEQ ID NO: 8867

SEQ ID NO: 9027 - DNA, 2190 bp, Klebsiella pneumoniae; identical to SEQ ID NO: 8864

SEQ ID NO: 9028 - DNA, 741 bp, Klebsiella pneumoniae; identical to SEQ ID NO: 8873

SEQ ID NO: 9029 - DNA, 1683 bp, Klebsiella pneumoniae; identical to SEQ ID NO: 8866

SEQ ID NO: 9030 - DNA, 3243 bp, Klebsiella pneumoniae; identical to SEQ ID NO: 8867

SEQ ID NO: 9031 - DNA, 2190 bp, Klebsiella pneumoniae; identical to SEQ ID NO: 8864

SEQ ID NO: 9032 - DNA, 741 bp, Klebsiella pneumoniae; identical to SEQ ID NO: 8873

SEQ ID NO: 9033 - DNA, 1683 bp, Klebsiella pneumoniae; identical to SEQ ID NO: 8866

SEQ ID NO: 9034 - DNA, 3243 bp, Klebsiella pneumoniae; identical to SEQ ID NO: 8867

SEQ ID NO: 9035 - DNA, 2190 bp, Klebsiella pneumoniae; identical to SEQ ID NO: 8864

SEQ ID NO: 9036 - DNA, 741 bp, Klebsiella pneumoniae; identical to SEQ ID NO: 8873

SEQ ID NO: 9037 - DNA, 1683 bp, Klebsiella pneumoniae; identical to SEQ ID NO: 8866

SEQ ID NO: 9038 - DNA, 3243 bp, Klebsiella pneumoniae; identical to SEQ ID NO: 8867

SEQ ID NO: 9039 - DNA, 2190 bp, Klebsiella pneumoniae; identical to SEQ ID NO: 8864

SEQ ID NO: 9040 - DNA, 741 bp, Klebsiella pneumoniae; identical to SEQ ID NO: 8873

SEQ ID NO: 9041 - DNA, 1683 bp, Klebsiella pneumoniae; identical to SEQ ID NO: 8866

SEQ ID NO: 9042 - DNA, 3243 bp, Klebsiella pneumoniae; identical to SEQ ID NO: 8867

SEQ ID NO: 9043 - DNA, 2190 bp, Klebsiella pneumoniae; identical to SEQ ID NO: 8864

SEQ ID NO: 9044 - DNA, 741 bp, Klebsiella pneumoniae; identical to SEQ ID NO: 8873

SEQ ID NO: 9045 - DNA, 1683 bp, Klebsiella pneumoniae; identical to SEQ ID NO: 8866

SEQ ID NO: 9046 - DNA, 3243 bp, Klebsiella pneumoniae; identical to SEQ ID NO: 8867

SEQ ID NO: 9047 - DNA, 2190 bp, Klebsiella pneumoniae; identical to SEQ ID NO: 8864

SEQ ID NO: 9048 - DNA, 741 bp, Klebsiella pneumoniae; identical to SEQ ID NO: 8873

SEQ ID NO: 9049 - DNA, 1683 bp, Klebsiella pneumoniae; identical to SEQ ID NO: 8866

SEQ ID NO: 9050 - DNA, 3243 bp, Klebsiella pneumoniae; identical to SEQ ID NO: 8867

SEQ ID NO: 9051 - DNA, 2190 bp, Klebsiella pneumoniae; identical to SEQ ID NO: 8864

SEQ ID NO: 9052 - DNA, 741 bp, Klebsiella pneumoniae; identical to SEQ ID NO: 8873

SEQ ID NO: 9053 - DNA, 1683 bp, Klebsiella pneumoniae; identical to SEQ ID NO: 8866

SEQ ID NO: 9054 - DNA, 3243 bp, Klebsiella pneumoniae; identical to SEQ ID NO: 8867

SEQ ID NO: 9055 - DNA, 2190 bp, Klebsiella pneumoniae; identical to SEQ ID NO: 8864

SEQ ID NO: 9056 - DNA, 741 bp, Klebsiella pneumoniae; identical to SEQ ID NO: 8873

SEQ ID NO: 9057 - DNA, 1683 bp, Klebsiella pneumoniae; identical to SEQ ID NO: 8866

SEQ ID NO: 9058 - DNA, 3243 bp, Klebsiella pneumoniae; identical to SEQ ID NO: 8867

SEQ ID NO: 9059 - DNA, 2190 bp, Klebsiella pneumoniae; identical to SEQ ID NO: 8864

SEQ ID NO: 9060 - DNA, 741 bp, Klebsiella pneumoniae; identical to SEQ ID NO: 8873

SEQ ID NO: 9061 - DNA, 1683 bp, Klebsiella pneumoniae; identical to SEQ ID NO: 8866

SEQ ID NO: 9062 - DNA, 3243 bp, Klebsiella pneumoniae; identical to SEQ ID NO: 8867

SEQ ID NO: 9063 - DNA, 2190 bp, Klebsiella pneumoniae; identical to SEQ ID NO: 8864

SEQ ID NO: 9064 - DNA, 741 bp, Klebsiella pneumoniae; identical to SEQ ID NO: 8873

SEQ ID NO: 9065 - DNA, 1683 bp, Klebsiella pneumoniae; identical to SEQ ID NO: 8866

SEQ ID NO: 9066 - DNA, 3243 bp, Klebsiella pneumoniae; identical to SEQ ID NO: 8867

SEQ ID NO: 9067 - DNA, 2190 bp, Klebsiella pneumoniae; identical to SEQ ID NO: 8864

SEQ ID NO: 9068 - DNA, 741 bp, Klebsiella pneumoniae; identical to SEQ ID NO: 8873

SEQ ID NO: 9069 - DNA, 1683 bp, Klebsiella pneumoniae; identical to SEQ ID NO: 8866

SEQ ID NO: 9070 - DNA, 3243 bp, Klebsiella pneumoniae; identical to SEQ ID NO: 8867

SEQ ID NO: 9071 - DNA, 2190 bp, Klebsiella pneumoniae; identical to SEQ ID NO: 8864

SEQ ID NO: 9072 - DNA, 741 bp, Klebsiella pneumoniae; identical to SEQ ID NO: 8873

SEQ ID NO: 9073 - DNA, 1683 bp, Klebsiella pneumoniae; identical to SEQ ID NO: 8866

SEQ ID NO: 9074 - DNA, 3243 bp, Klebsiella pneumoniae; identical to SEQ ID NO: 8867

SEQ ID NO: 9075 - DNA, 2190 bp, Klebsiella pneumoniae; identical to SEQ ID NO: 8864

SEQ ID NO: 9076 - DNA, 741 bp, Klebsiella pneumoniae; identical to SEQ ID NO: 8873

SEQ ID NO: 9077 - DNA, 1683 bp, Klebsiella pneumoniae; identical to SEQ ID NO: 8866

SEQ ID NO: 9078 - DNA, 3243 bp, Klebsiella pneumoniae; identical to SEQ ID NO: 8867

SEQ ID NO: 9079 - DNA, 2190 bp, Klebsiella pneumoniae; identical to SEQ ID NO: 8864

SEQ ID NO: 9080 - DNA, 741 bp, Klebsiella pneumoniae; identical to SEQ ID NO: 8873

SEQ ID NO: 9081 - DNA, 1683 bp, Klebsiella pneumoniae; identical to SEQ ID NO: 8866

SEQ ID NO: 9082 - DNA, 3243 bp, Klebsiella pneumoniae; identical to SEQ ID NO: 8867

SEQ ID NO: 9083 - DNA, 2037 bp, Yersinia enterocolitica
atggacatcttgctggcccctggcgtgctggtgcgtaatggcattttgcatattgcttcaatattgaaaaatgatgcggctcccggctatgtgactattctattagtcgccgctctttgtattatcgtagtacgctggcgaaagctggttaagcgccgtcttactgcacttggcagcatccatgccattattgccaaaaccccggaagatgaatttagccagcatgtaactaacgtcgatgccagtatcgctgccttaaatatgacagaagaacagcaaaatgtggccgaggcatggaaggaatatcgggaaacccatattgtcgacgatcaggacggtaagcttgtcgttcgcaatgctgttcgccctagtcagttttttaatttggatgatttgcatttcacacagggattctggcgcatcgttccgggattgtttgtaactattggtctttctctgaccttcctcggcttgatttctgcgcttaattcgatgagtacctctctggacgatggcggtagcgcggcattagaaggtttacttaccatcgcctcagcgaagttcatcatgtcgctcacgggccttttctgctcaatagtttttaccataggcttgcgtagcggcacctcacagctggaaaaaacagttcatagcctcaatagtttgattgaaaaacgcctgacatttatcagcctggaagatttatccattcgtcagctaaaagctacgattgaaagtcgagaacatttccgaaagctgggacttgagatggtggcagaaattggtcgcccacttcgcgaagatctgccaagagcgatttcggaatccatcagctcagcaattaccccagtcatagaacaagttagccgcttaggtaatgatggtgtcggcgaaatggtacaaagtctctcctcgcgtttttctgaagatgttggccgggccttaacacaagccagtgagcgtatttcgctggcaggcgatcaaatcaaattgctcgcggaaagaatggatcaaagctcagggaaaatgggcaacgaaatggaaagcgctattgggcgcttaggtctggcggttgaaacactgcgggaaggtatgtcacaaacagctgaaacggcaacgtctgcatttaatcaaggtgccgaaaatctgctggcaaccatgaactcaacgctacaaggcattaaagacaatacgggtgatggcgcaagagcaatgggcgaagcagctgcagatatgaaagccgccgccctagggatccgaacagaaatggaaaccgcagcaaaacagggcgcagaagccgcacaagctcgcatgtcagaatctgcctcacaagcgagtgatgctatcggccaggctgcgacaaacatactgagcgcatttgataataccgccggagagatcaccaaagtgacagaaacgatgactcagaacgccagcagccaacttctttcccctctttctactattgcggaaaaactggaaggcgtcatgggtatgcttgacgaaacaagtaccgctttacgtcgtgcttcagatggtattaaagagggagccattgcctctgaaaatgcatcaggtagcttccgctcgtcggctcaatcactcactgacgcagctaacccgatccgctcggtgatggagcgtattgaaatcagcacgcgtcaactacgtgaaagcagcgagaatagcctttcagctattgccaacgcagcgaaaacgaatgctgagcaatccgctatgacactgtcggcagcgcaagagacattgggtggacagcagcgtgcggttgaatccactctgactaaccttcagtctctgatcactgcattacgtggtcagggtgaacggctggatagtattgatgagaagctcggcaaggcgttcgactcttatcaggagcaagttgcaacgtctgtagaaacactgtttgatcacgttaaaactatgcagtccgcgttaatgccagcactggatacaatgcagggtattgtccaccaggccgaaaactttgcgcctaaacagggacgcatgtcgtga

SEQ ID NO: 9084 - DNA, 864 bp, Yersinia enterocolitica
gtgagagggaacgccaatcgcaagcgttcaaatgaagaggaagaagaatccgtctttgtttcaatgacggacatgacggtgagcttcctgtttatcgttatggtgctgctcgcattctttgccagccggtataacgataaaaatactgttccccgtgacgaatatgaacaagctgttcaatcacgcgataaaacgattgaagatctccgctctgaaatagcagcattgaagcgagttgatcctttggaacagtatatgtctcgcgcagcaacagctcgccttaacctactttatcagctacgcgataatctcaaacagtcttttccattgttgccagttgatgtgattcctgaggaaggaactctgcgtttccaaggcgaagggctatttatcagcaatagttttgccttaaacgatgacaagcgaaagattgtcgaagcgctggcaaaaaccctcgactcactcctgccctgctatacctttaaccagaatacgggctggaacaaaagctgtaatccttcattcgccatcattgaggctgttcagattgaaggccatactgactcgaaaggtgatggtgtttataacctgaatctttcgactaaccgtgcaataacgacatttaccagtatgcttgcggctgcaccggatttggtcgcacatttcaatatgcggcatcagccggttctttcggttgcgggctacggtaaaatgcgtcctgttcgccctaatgacacacaacagaatatggcaatgaatcgccgcatcgatcttcgcattattatgcatacaccagccaatgctgcagaaattgaagacattcgccagcgtctgattgaaccgttgaagaagagcatgccatga

SEQ ID NO: 9085 - DNA, 1329 bp, Yersinia enterocolitica
atgaaattgagcgatatctttctgaagccagtcgcacttttcaagccagcaatagcggtatcaaaaggtttatcggccaagattcaagccattcatgagcgctggccagatgtagttagagagattgccgaacgcgatcgtgaaaaggttttacgcaagctgctcgggtatgtagaaagctggcaatgggatgaggtgaaaatgtcattcatctgctctggggcaccgattgtttttgataaagaattcagaactcaggacgactttgccgcgctgcaagagttttatctgcgggaaaccattgttacggactcatcatcctttatttccgcaatgatttcggcatacattcgcagttacgaacctggttcagcgcacacaaccaaaattaaaaactgtcttgatatctccagcgagcacatgagcgataaatggaaagatgttatcgatcaattacctgaattctttgacgctaatcaggcacatcaagcgttggccgaaaaaatggtgatgatggactcaccatggaaagagctcaaacagtttggcatcacacacccgcacgagccgggtttaatgtcgcatgctcatctagcgtatatcgcgttgcttaggcctgaattaaatgaaaaagcaaccattaagaaactatttgcctggttgaaacccgatggcaaaagtaacgcgttaatgagtggtgcttctgaggccatcaatgcgttgttgtcacattggctgtataagcaacccgacgaggggctctcacgttttctgactgaaacacttgtagctttttacgaagatccacgcctgagtcgcgggggcgtatggggcagcgtggatgaagaatgccgtaatctcatcattaactggctcacgcgtgagaacattttgttcttcctggatgtggtctcgaaagtggaagacagccatatgtgggaaccacggcgtgaattttggttagggctttataaccaaggaaaaatcactgcagcgtgggtagcgtttagcagcattgcctcccaaaaagcaaaagaaatgaaaggttctatgagggactcttcaacgctgaacttcggaattcaaacggctcttggtaatcgtgataaaacctcattgctcattttacaaattgggaaatgcatcgtaattgaaggttcacacagttataaagttcatattttcagaaatgataataaacgcagcccagaactgtaccaattaaaatacaattgcgaacaaatccgtatgctaccgaatcctgttgctattccacatttcagcggctggcaggataaagtgcgtgaacaaattgagtatctgtcatga

SEQ ID NO: 9086 - DNA, 3129 bp, Yersinia enterocolitica
atgacatttaccttcgatcataatgcagaaacgatcactctgaatattgctgaagaaaaacagagtttaatcaaccgtctatttaaacggcagcaatccgcaacattatctggtctcacgcataacgatcgcgccttagctttcgctatagccgatctgaaagccctggcggaagaatttgaagaacatttgcacataagtcatgattctatagaaatgagtcaccggttgactggcctacttgactcagaaacagcacagaatctgtgcttacctcctcttgtcgatttgacattaaaaaccgacattgaaggttcattaggtagcgatacttttcgtttacaatatgaatggctacgcaacggtgttcgccaaataccacaacgaacaggggcaattttagccacatctcagggtttacgccggttgccattatggatgatggaggccattgaagtcgcagaaaaatttacactgggcggcggtgaagcatccgactgggaatcgctggctcgtttcaggcagtctctcgatcccggcgtccagatgggcaatgagttcaatgccgttcgggtatcgatgaccgattttatgcaaggtttagaagtctgtattgcggatcgtttttctatttccaccagctcaaatggctctgatgatttcgaaatagtccctttctctggcaggaacatagaagagctagaaaataacggaaaagctgtcagcgaagctgcaggtgagctacgtgaacaaactttgcgtcgtttccagcaacgtgtcagaactcaaggggctctttccgcttatcgtgttggcgaaggcaattatctggtcattgaccgaagcgcacgccctattcttgacatcatggtacagaagcaaaagtctgcacctgaagagcgacgcgcttttatcgaaaacccacgacctgcaattaccgatgctgttgaaaaatacctgaggcaatcaggtaagctggatgggctcgatgaggtcggcgaggaagaagcaattgaagccatttcaggtcccgcttttatcgaaaccgttgagtattccgaacgcgttaaaggtattttgcattaccgaaaaggtgctgtttcagcgcacatgactggcgaaacggtctggttaccagaggtaattcccgacgctctagccaaaattattgatgcgatggatagccacgcgctggcaaatgtctgcgagcagatacgtaatgccatagatgcatcgcaacagggagttgaagtcgcttcttatccaattaaagccaccgaagacacgttaggcgcacttgaaaagcgactggctgatcttaaacagatcgaggccgcgacagaaataacagaaaagaaagataagcccacagttgataatccacatgctgctacggttatccttgataccaaagataattttgaagaaatatcttggaggccggaccttacagaacgtcctgtatttatcgacgagcaactgcctacaggcgttaaaaccgcattgcgatcgcatcaactagagagctttagcctgcaactttcttcgtggaagtcaggaatgcctggcatcttgaacgcagatgaacaaggattgggtaagacgcttcaaaccattgcatttcttcgctggttaaaagagaacaaccgcgtcaatactgccagcaataaagaatgcggaccgatattaattgtggcgcccacatccctcctggaaaattggaatgcagaggtagtacagcatactgatggcgaagggctcggccatttgctccgcctatatggttcatcattaagtcagtataaaaatttcgatgctaaaggtatcgagacaaaagatggtactcacttactgaattttcggcagctacatgaagcgatcgaggagggcaaaggccatcgcttctggatattaacaacttacacaacgctcaccaattatcagcattcccttgcgaaaattcatttctcagccgttgtctttgatgaaattcaggcaataaaaaatcctgactcgcttcgcgcccgtgcagctcgagccatcaatgctgactatcgaattggccttacaggcacacctattgagaatacaacaagtgacctatgggcggtcatggatcaactggcccccgggtctctcgatacgttacgtaatttcaatagcctgtacagcgaacctgatgaacagaatatgcttcaactgtatcagctggtttttgagcctcgcaatcagctaccgcctttagcgtttcgtcgtttaaaagaagacgttgcgaaagagctgccctctaaaacacgttttctgcatcctcgtttaatgcctgaagggcaggcaattgcctacgaaaccgcccggctcaaactttcgcaaggtggtcctggcgccgcactgaaaatactacagcatatacgtggcgtttcagttcacccggcgatggagatgagtggaaacagtcagagttttatcgatgcttctgctcgcctgaatgcatgcttcaaaattctgcatcacattaaggcaaaaggtgaacgtgttctggttttcattgagcatcgaaagatgcaattccgttttatggagttagcacgacaagaatttggccttgagaaaattgatcacattaatggcgatacgcctatccaaaagcgtcagactattgtacgtcgattccagtgtcatcttgaacaggatggtggctttgacttattagttctcggtcccaaagcggcaggaacaggcctgacattaactgccgccactcacgttattcacttgtctcgctggtggaatccggctgttgaagagcaatgtaatgaccgcgttcaccgcatcggacaaaagtatccagttcaaatccatatgcctatggccatccatgcaggttatcaggagcattcttttgactgtttgcttcaaggactaatgtcacgaaagagaaacttagcacgtgctgcactctggccaatgggcgacagcgcaggtgacatctcgcaactgcaagtggccttgaaaaaggaacaaagtaaggcaaatggagatgttctggaaattagtattcgaatgatgtttgaaagagatgctgaaactgatggtgcgcagatgcatgatggctcctatcggataagctaa

SEQ ID NO: 9087 - DNA, 2037 bp, Yersinia pseudotuberculosis
atggacatcttgctggcccctggcgtgctggtgcgtaatggcattttgcatattgcttcaatattgaaaaatgatgcggctcccggctatgtgactattctattagtcatcgctctttgtattatcgtagtacgctggcgaaagctggttaagcgccgtcttactgcacttggcagcatccatgccattattgccaaaaccccggaagatgaatttagccagcatgtaactaacgtcgatgccagtatcgctgccttaaatatgacagaagaacagcaaaatgtggccgaggcatggaaggaatatcgggaaacccatattgtcgacgatcaggacggtaagcttgtcgttcgcaatgctgttcgccctagtcagttttttaatttggatgatttgcatttcacacagggattctggcgcatcgttccgggattgtttgtaactattggtctttctctgaccttcctcggcttgatttctgcgcttaattcgatgagtacctctctggacgatggcggtagcgcggcattagaaggtttacttaccatcgcctcagcgaagttcatcatgtcgctcacgggcctttgctgctcaatagtttttaccataggcttgcgtagcggtacctcacagctggaaaaaacagttcatagcctcaatagtttgattgaaaaacgcctgacatttatcagtctggaagatttatccattcgtcagctaaaggctacgattgaaagtcgagaacatttccgaaagctgggacttgagatggtggcagaaattggtcgcccacttcgcgaagatctgccaagagcgatttcggaatccatcagttcagcaattaccccagtcatagaacaagttagccgcttaggtaatgatggtgtcggcgaaatggtacaaagtctctcctcgcgtttttctgaagatgttggccgggccttaacacaagccagtgagcgtatttcgctggcaggcgatcaaatcaaattgctcgcggaaagaatggatcaaagctcagggaaaatgggcaacgaaatggaaagcgctattgggcgcttaggtctggcggttgaaacactgcgggaaggtatgtcacaaacagctgaaacggcaacgtctgcatttaatcaaggtgccgaaaacctgctggcaaccatgaattcaacgctacaaggcattaaagacaatacgggtgatggcgcaagagcaatgggcgaagcagctgcagatatgaaagctgccgccctggggatccgaacagaaatggagaccgcagcaaaacagggcgcagaagccgcacaagctcgcatgtcagaatctgcctcacaagcgagtgatgctatcggccaggctgcgacaaacatactgagcgcatttgataataccgccggagagatcaccaaagcgacagaaacgatgactcagaacgccagcagccaacttctttcccctctttctaccattgcggaaaaactggaaggcgtcatgggtatgcttgacgaaacaagtaccgctttacgtcgtgcttcagatggtattaaagagggagccattgcctctgaaaatgcatcaggtagcttccgctcgtcggctcaatcactcactgacgcagccaacccgatccgctcggtgatggagcgtattgaaatcagcacgcgtcaactacgtgaaagcagcgagaatagcctttcagctattgccaacgcagcgaaaacgaatgctgagcaatccgctatgacactgtcggcagcgcaagagacattgggtggacagcagcgtgcggttgaatccactctgactaaccttcagtctctgatcactgcattacgtggtcagggtgaacggctggatagtattgatgagaagctcggcaaggcgttcgactcttatcaggagcaagttgcaacgtctgtagaaacactgtttgatcacgttaaaactatgcagtccgcgttaatgccagcactggatacaatgcagggtattgtccaccaggccgaaaactttgcgcctaaacagggacgcatgtcgtga

SEQ ID NO: 9088 - DNA, 864 bp, Yersinia pseudotuberculosis
gtgagagggaacgccaatcgcaagcgttcaaatgaagaggaagaagaatccgtctttgtttcaatgacggacatgacggtgagcttcctgtttatcgttatggtgctgctcgcattctttgccagccggtataacgataaaaatactgttccccgcgacgaatatgaacaagctgttcaatcacgcgataaaacgattgaagatctccgctctgaaatagcagcattgaagcgagttgatcctttggaacagtatatgtctcgcgcagcaacagctcgccttaacctactttatcagctacgcgataatctcaaacagtcttttccattgttgccagttgatgtgattcctgaggaaggaactctgcgtttccaaggcgaagggctatttatcagcaatagttttgccttaaacgatgacaagcgaaagattgtcgaagcgctggcaaaaaccctcgactcactcctgccctgctatacctttaaccagaatacgggttggaacaaaagctgtaatccttcattcgccatcattgaggctgttcagattgaaggccatactgactcgaaaggtgatgatgtttataacctgaatctttcgactaaccgtgcaataacgacatttaccagcatgcttgcggctgcaccagatttggtcgcacatttcaatatgcggcatcagccggttctttcggttgcgggctacggtaaaatgcgtcctgttcgccctaatgacacacaacagaatatggcaatgaatcgccgcatcgatcttcgcattattatgcatacaccagccaatgctgcagaaattgaagacattcgccagcgtctgattgaaccgttgaagaagagcatgccatga

SEQ ID NO: 9089 - DNA, 1329 bp, Yersinia pseudotuberculosis
atgaaattgagcgatatctttctgaagccagtcgcacttttcaagccagcaatagcggtatcaaaaggtttatcggccaagattcaagccattcatgagcgctggccagatgtagttagagagattgccgaacgcgatcgtgaaaaggttttacgcaagctgctcgggtatgtagaaagctggcaatgggatgaggtgaaaatgtcattcatctgctctggggcaccgattgtttttgataaagaattcagaactcaggacgactttgccgcgctgcaagagttttatctgcgggaaaccattgttacggactcatcatcctttatttccgcaatgatttcggcatacattcgcagttacgaacctggttcagcgcacacaaccaaaattaaaaactgtcttgatatctccagcgagcacatgagcgataaatggaaagatgttatcgatcaattgcctgaattctttgacgcgaatcaggcgcatcaagcgttggccgaaaaaatggtgataatggactcaccatggaaagagctcaaacagtttggcatcacacacccgcacgagccgggtttaatgtcgcatgctcatctggcgtatatcgcgttgcttaggcctaaattaaatgaaaaagcaaccattaagaaactatttgcctggttgaaacccgatggcaaaagtaacgcgttaatgagtggtgcttctgaggccatcaatgcgttgttgtcacattggctgtataagcaacccgacgaggggctctcacgttttctgactgaaacacttgtagctttttacgaagatccacgcctgagtcgcgggggcgtatggggcagcgtggatgaaaaatgccgtaatctcatcattaactggcttacgcgtgagaacattttgttcttcctggatgtggtctcgaaagtggaagacagccatatgtgggaaccacggcgtgaattttggttagggctttataaccaaggaaaaatcactgcagcgtgggtagcgtttagcagcattgcctcccaaaaagcaaaagaaatgaaaggttctatgagggactcttcaacgctgaacttcggaattcaaacggctcttggtaatcgtgataaaacctcattgctcattttacaaattgggaaatgcatcgtaattgaaggttcacacagttataaagttcatattttcagaaatgataataaacgcagcccagaactgtaccaattaaaatacaattgcgaacaaatccgtatgctaccgaatcctgttgctattccacatttcagcggctggcaggataaagtgcgtgtacaaattgagtatctgtcatga

SEQ ID NO: 9090 - DNA, 3129 bp, Yersinia pseudotuberculosis
atgacatttaccttcgatcataatgcagaaacgatcactctaaatattgctgaagaaaaacagagtttaatcaaccgtctgtttaaacggcagcaatccgcaacattatctggtctcacgcataacgatcgcgccttagctttcgctatagccgatctgaaagccctggcggaagaatttgaagaacatttgcacataagtcatgattctatagaaatgagtcaccggttgactggcctacttgactcagaaacagcacagaatctgtgcttacctcctcttgtcgatttgacattaaaaaccgacattgaaggttcattaggtagcgatacttttcgtttacaacatgaatggctacgcaacggtgttcgccaaataccacaacgaacaggggcaattttagccacatctcagggtttacgccggttgccattatggatgatggaggccattgaagtcgcagaaaaatttacaccgggcggcggtgaagcatccgactgggaatcgctggctcgtttcaggcagtctctcgatcccggcgtccagatgggcaatgagctcaatgccgttcgggtatcgatgaccgattttatgcaaggtttagaagtctgtattgcggatcgtttttctatttccaccagctcaaatggctctgatgatttcgaaatagtccctttctctggcaggaacatagaagagctagaaaataacggaaaagctgtcagcgaagctgcaggtgagctacgtgaacaaactttacgtcgtttccagcagcgtgtcagaactcaagggactctttccgcttatcgtgttggcgaaggcaattatctggtcattgaccgaagcgcacgccctattcttgacatcatggtacagaagcaaaagtctgcacctgaagagcgacgcgcttttatcgaaaatccacgacctgcaattaccgatgctgttgaaaaatacctgagacaatcaggtaagctggatgggctcgatgaggccggcgaggaagaagcaattgaagccatttcaggtcccgcttttatcgaaaccgttgagtattccgaacgcgttaaaggtattttgcattaccgaaaaggtgctgtttcagcgcacatgactggcgaaacggtctggttaccagaggtaattcccgacgctctagccaaaattattgatgcgatggatagccacgcgctggcaaatgtctgcgagcagatacgtaatgccatagatgcatcgcaacaggaagttgaagtcgctgcttatccaattaaagccaccgaagacacgttaggcgcacttgaaaagcgactggctgatcttaaacagatcgaggccgcgacagaaataacagaaaagaaagataagcccacagttgataacccacatgctgctacggttatccttgataccaaagataattttgaagaaatatcttggaggccggaccttacagaacgtcctgtatttatcgacgagcaactgcctacaggcgttaaaaccgcattgcgatcgcatcaactagagagctttagcctgcaactttcttcgtggaagtcaggaatgcctggcatcttgaacgcagatgaacaaggattgggtaagacgcttcaaaccattgcatttcttcgctggttaaaagagaacaaccgcgtcaatactgccagcaataaagaatgcggaccgatattaattgtggcgcccacatccctcctggaaaattggaatgcagaggtagtacagcatactgatggcgaagggctcggccatttgctccgcctatatggttcatcattaagtcagtataaaaatttcgatgctaaaggtgtcgagacaaaatatggtactcacttactgaattttcggcagctacatgaagcgatcgaggagggcaaaggccatcgcttctggatattaacaacttacacaacgctcaccaattatcagcattcccttgcgaaaattcatttctcagccgttgtctttgatgaaattcaggcaataaaaaatcctgactcgcttcgcgcccgtgcagctcgagccatcaatgctgactatcgaattggccttacaggcacacctattgagaatacaacaagtgacctatgggcggtcatggatcaactggcccccgggtctctcgatacgttacgtaatttcaatagcctgtacagcgaacctgatgaacagaatatgcttcaactgtatcagctggtttttgagcctcgcaatcagctaccgcctttagcgtttcgtcgtttaaaagaagacgttgcgaaagagctgccctctaaaacacgttttctgcatcctcgtttaatgcctgaagggcaggcaattgcctacgaaaccgcccggctcaaactttcgcaaggtggtcctggcgccgcactgaaaatgctacagcatatacgtggcgtttcagttcacccggcgatggagatgagtggaaacagtcagagttttatcgatgcttctgctcgcctgaatgcatgcttcaaaattctgcatcatattaaggcaaaaggtgaacgtgttctggttttcattgagcatcgaaagatgcaattccgttttatggagttagcacgacaagaatttggccttgagaaaattgatcacattaatggcgatacgcctatccaaaagcgtcagactattgtacgtcgattccagtgtcatcttgaacaggatggtggctttgacttattagttctcggtcccaaagcggcaggaacaggcctgacattaactgccgccactcacgttattcacttgtctcgctggtggaatccggctgttgaagagcaatgtaatgaccgcgttcaccgcatcggacaaaagtatccagttcaaatccatatgcctatggccatccatgcaggttatcaggagcattcttttgactgtttgcttcaaggactaatgtcacgaaagagaaacttagcacgtgctgcactctggccaatgggcgacagcgcaggtgacatctcgcaactgcaagtggccttgaaaaaggaacaaagtaaggcaaatggagatgttctggaaattagtattcgaatgatgtttgaaagagatgctgaaactgatggtgcgcagatgcatgatggctcctatcggataagctaa

SEQ ID NO: 9091 - DNA, 2037 bp, Yersinia bercovieri
atggacatcttgctggcccctggcgtgctggtgcgtaatggcattttgcatattgcttcaatattgaaaaatgatgcggctcccggctatgtgactattctattagtcgccgctctttgtattatcgtagtacgctggcgaaagctggttaagcgccgtcttactgcacttggcagcatccatgccattattgccaaaaccccggaagatgaatttagccagcatgtaactaacgtcgatgccagtatcgctgccttaaatatgacagaagaacagcaaaatgtggccgaggcatggaaggaatatcgggaaacccatattgtcgacgatcaggacggtaagcttgtcgttcgcaatgctgttcgccctagtcagttttttaatttggatgatttgcatttcacacagggattctggcgcatcgttccgggattgtttgtaactattggtctttctctgaccttcctcggcttgatttctgcgcttaattcgatgagtacctctctggacgatggcggtagcgcggcattagaaggtttacttaccatcgcctcagcgaagttcatcatgtcgctcacgggccttttctgctcaatagtttttaccataggcttgcgtagcggcacctcacagctggaaaaaacagttcatagcctcaatagtttgattgaaaaacgcctgacatttatcagtctggaagatttatccattcgtcagctaaaagctacgattgaaagtcgagaacatttccgaaagctgggacttgagatggtggcagaaattggtcgcccacttcgcgaagatctgccaagagcgatttcggaatccatcagctcagcaattaccccagtcatagaacaagttagccgcttaggtaatgatggtgtcggcgaaatggtacaaagtctctcctcgcgtttttctgaagatgttggccgggccttaacacaagccagtgagcgtatttcgctggcaggcgatcaaatcaaattgcttgcggaaagaatggatcaaagctcagggaaaatgggcaacgaaatggaaagcgctattgggcgcttaggtctggcggttgaaacactgcgggaaggtatgtcacaaacagctgaaacggcaacgtctgcatttaatcaaggtgccgaaaatctgctggcaaccatgaactcaacgctacaaggcattaaagacaatacgggtgatggcgcaagagcaatgggcgaagcagctgcagatatgaaagccgccgccctggggatccgaacagaaatggaaaccgcagcaaaacagggcgcagaagccgcacaagctcgcatgtcagaatctgcctcacaagcgagtgatgctatcggccaggctgcgacaaacatactgagcgcatttgataataccgccggagagatcaccaaagtgacagaaacgatgactcagaacgccagcagccaacttctttcccctctttctactattgcggaaaaactggaaggcgtcatgggtatgcttgacgaaacaagtaccgctttacgtcgtgcttcagatggtattaaagagggagccattgcctctgaaaatgcatcaggtagcttccgctcgtcggctcaatcactcactgacgcagctaacccgatccgctcggtgatggagcgtattgaaatcagcacgcgtcaactacgtgaaagcagcgagaatagcctttcagctattgccaacgcagcgaaaacgaatgctgagcaatccgctatgacactgtcggcagcgcaagagacattgggtggacagcagcgtgcggttgaatccactctgactaaccttcagtctctgatcactgcattacgtggtcagggtgaacggctggatagtattgatgagaagctcggcaaggcgttcgactcttatcaggagcaagttgcaacgtctgtagaaacactgtttgatcacgttaaaactatgcagtccgcgttaatgccagcactggatacaatgcagggtattgtccaccaggccgaaaactttgcgcctaaacagggacgcatgtcgtga

SEQ ID NO: 9092 - DNA, 864 bp, Yersinia bercovieri
gtgagagggaacgccaatcgcaagcgttcaaatgaagaggaagaagaatccgtctttgtttcaatgacggacatgacggtgagcttcctgtttatcgttatggtgctgctcgcattctttgccagccggtataacgataaaaatactgttccccgtgacgaatatgaacaagctgttcaatcacgcgataaaacgattgaagatctccgctctgaaatagcagcattgaagcgagttgatcctttggaacagtatatgtctcgcgcagcaacagctcgccttaacctactttatcagctacgcgataatctcaaacagtcttttccattgttgccagttgatgtgattcctgaggaaggaactctgcgtttccaaggcgaagggctatttatcagcaatagttttgccttaaacgatgacaagcgaaagattgtcgaagcgctggcaaaaaccctcgactcactcctgccctgctatacctttaaccagaatacgggttggaacaaaagctgtaatccttcattcgccatcattgaggctgttcagattgaaggccatactgactcgaaaggtgatggtgtttataacctgaatctttcgactaaccgtgcaataacgacatttaccagcatgcttgcggctgcaccggatttggtcgcacatttcaatatgcggcatcagccggttctttcggttgcgggctacggtaaaatgcgtcctgttcgccctaatgacacacaacagaatatggcaatgaatcgccgcatcgatcttcgcattattatgcatacaccagccaatgctgcagaaattgaagacattcgccagcgtctgattgaaccgttgaagaagagcatgccatga

SEQ ID NO: 9093 - DNA, 1329 bp, Yersinia bercovieri
atgaaattgagcgatatctttctgaagccagtcgcacttttcaagccagcaatagcggtatcaaaaggtttatcggccaagattcaagccattcatgagcgctggccagatgtagttagagagattgccgaacgcgatcgtgaaaaggttttacgcaagctgctcgggtatgtagaaagctggcaatgggatgaggtgaaaatgtcattcatctgctctggggcaccgattgtttttgataaagaattcagaactcaggacgactttgccgcgctgcaagagttttatctgcgggaaaccattgttacggactcatcatcctttatttccgcaatgatttcggcatacattcgcagttacgaacctggttcagcgcacacaaccaaaattaaaaactgtcttgatatctccagcgagcacatgagcgataaatggaaagatgttatcgatcaattacctgaattctttgacgctaatcaggcacatcaagcgttggccgaaaaaatggtgatgatggactcaccatggaaagagctcaaacagtttggcatcacacacccgcacgagccgggtttaatgtcgcatgctcatctagcatatatcgcgttgcttaggcctgaattaaatgaaaaagcaaccattaagaaactatttgcctggttgaaacccgatggcaaaagtaacgcgttaatgagtggtgcttctgaggccatcaatgcgttgttgtcacattggctgtataagcaacccgacgaggggctctcacgttttctgactgaaacacttgtagctttttacgaagatccacgcctgagtcgcgggggcgtatggggcagcgtggatgaagaatgccgtaatctcatcattaactggctcacgcgtgagaacattttgttcttcctggatgtggtctcgaaagtggaagacagccatatgtgggaaccacggcgtgaattttggttagggctttataaccaaggaaaaatcactgcagcgtgggtagcgtttagcagcattgcctcccaaaaagcaaaagaaatgaaaggttctatgagggactcttcaacgctgaacttcggaattcaaacggctcttggtaatcgtgataaaacctcattgctcattttacaaattgggaaatgcatcgtaattgaaggttcacacagttataaagttcatattttcagaaatgataataaacgcagcccagaactgtaccaattaaaatacaattgcgaacaaatccgtatgctaccgaatcctgttgctattccacatttcagcggctggcaggataaagtgcgtgaacaaattgagtatctgtcatga

SEQ ID NO: 9094 - DNA, 3129 bp, Yersinia bercovieri
atgacatttaccttcgatcataatgcagaaacgatcactctgaatattgctgaagaaaaacagagtttaatcaaccgtctgtttaaacggcagcaatccgcaacattatctggtctcacgcataacgatcgcgccttagctttcgctatagccgatctgaaagccctggcggaagaatttgaagaacatttgcacataagtcatgattctatagaaatgagtcaccggttgactggcctacttgactcagaaacagcacagaatctgtgcttacctcctcttgtcgatttgacattaaaaaccgacattgaaggttcattaggtagcgatacttttcgtttacaatatgaatggctacgcaacggtgttcgccaaataccacaacgaacaggggcaattttagccacatctcagggtttacgccggttgccattatggatgatggaggccattgaagtcgcagaaaaatttacaccgggcggcggtgaagcatccgactgggaatcgctggctcgtttcaggcagtctctcgatcccggcgtccagatgggcaatgagttcaatgccgttcgggtatcgatgaccgattttatgcaaggtttagaagtctgtattgcggatcgtttttctatttccaccagctcaaatggctctgatgatttcgaaatagtccctttctctggcaggaacatagaagagctagaaaataacggaaaagctgtcagcgaagctgcaggtgagctacgtgaacaaactttgcgtcgtttccagcaacgtgtcagaactcaaggggctctttccgcttatcgtgttggcgaaggcaattatctggtcattgaccgaagcgcacgccctattcttgacatcatggtacagaagcaaaagtctgcacctgaagagcgacgcgcttttatcgaaaacccacgacctgcaattaccgatgctgttgaaaaatacctgaggcaatcaggtaagctggatgggctcgatgaggtcggcgaggaagaagcaattgaagccatttcaggtcccgcttttatcgaaaccgttgagtattccgaacgcgttaaaggtattttgcattaccgaaaaggtgctgtttcagcgcacatgactggcgaaacggtctggttaccagaggtaattcccgacgctctagccaaaattattgatgcgatggatagccacgcgctggcaaatgtctgcgagcagatacgtaatgccatagatgcatcgcaacagggagttgaagtcgcttcttatccaattaaagccaccgaagacacgttaggcgcacttgaaaagcgactggctgatcttaaacagatcgaggccgcgacagaaataacagaaaagaaagataagcccacagttgataatccacatgctgctacggttatccttgataccaaagataattttgaagaaatatcttggaggccggaccttacagaacgtcctgtatttatcgacgagcaactgcctacaggcgttaaaaccgcattgcgatcgcatcaactagagagctttagcctgcaactttcttcgtggaagtcaggaatgcctggcatcttgaacgcagatgaacaaggattgggtaagacgcttcaaaccattgcatttcttcgctggttaaaagagaacaaccgcgtcaatactgccagcaataaagaatgcggaccgatattaattgtggcgcccacatccctcctggaaaattggaatgcagaggtagtacagcatactgatggcgaagggctcggccatttgctccgcctatatggttcatcattaagtcagtataaaaatttcgatgctaaaggtgtcgagacaaaagatggtactcacttactgaattttcggcagctacatgaagcgatcgaggagggcaaaggccatcgcttctggatattaacaacttacacaacgctcaccaattatcagcattcccttgcgaaaattcatttctcagccgttgtctttgatgaaattcaggcaataaaaaatcctgactcgcttcgcgcccgtgcagctcgagccatcaatgctgactatcgaattggccttacaggcacacctattgagaatacaacaagtgacctatgggcggtcatggatcaactggcccccgggtctctcgatacgttacgtaatttcaatagcctgtacagcgaacctgatgaacagaatatgcttcaactgtatcagctggtttttgagcctcgcaatcagctaccgcctttagcgtttcgtcgtttaaaagaagacgttgcgaaagagctgccctctaaaacacgttttctgcatcctcgtttaatgcctgaagggcaggcaattgcctacgaaaccgcccggctcaaactttcgcaaggtggtcctggcgccgcactgaaaatgctacagcatatacgtggcgtttcagttcacccggcgatggagatgagtggaaacagtcagagttttatcgatgcttctgctcgcctgaatgcatgcttcaaaattctgcatcacattaaggcaaaaggtgaacgtgttctggttttcattgagcatcgaaagatgcaattccgttttatggagttagcacgacaagaatttggccttgagaaaattgatcacattaatggcgatacgcctatccaaaagcgtcagactattgtacgtcgattccagtgtcatcttgaacaggatggtggctttgacttattagttctcggtcccaaagcggcaggaacaggcctgacattaactgccgccactcacgttattcacttgtctcgctggtggaatccggctgttgaagagcaatgtaatgaccgcgttcaccgcatcggacaaaagtatccagttcaaatccatatgcctatggccatccatgcaggttatcaggagcattcttttgactgtttgcttcaaggactaatgtcacgaaagagaaacttagcacgtgctgcactctggccaatgggcgacagcgcaggtgacatctcgcaactgcaagtggccttgaaaaaggaacaaagtaaggcaaatggagatgttctggaaattagtattcgaatgatgtttgaaagagatgctgaaactgatggtgcgcagatgcatgatggctcctatcggataagctaa

SEQ ID NO: 9095 - DNA, 2061 bp, Aeromonas hydrophila YL17
atgtgggatttacttaaacacctatggcctgactttagccagatgctgaatggcactaccaatgggatcagtgcgtggttctggtcattcacatgcttcatctttttactatccctgttttttttgattaagcactacctcaatttcattgaaagaaacaaagcattgagatctttgttggatgggcaaagtagagaaacattggcttactctcgccgtgaaatacttcagagggctcaaaagctgaatgccaacaatattggtcatctctggcaggaatttgatgaaagccttgtcttatcttctgacaagaaacaacttttcaacagcattgacgcggagcattttttcaatgcaaaaaccttggcaacgggcctaaccgccagccgtttactagcagcgacccccagctttttagtggcgatcggggtgctcggaacctttgttggattaaccattggtctagaggggctagtgggcaatacggcagaaatcgagaccctcaagagtggtatcaataagctcatctctggcgcagcagttgcatttatgacctcggtctggggggttgctttcagtctcctactcaatctgtgtgaaaagctgtttgaacgcaaagcgctgaacgatatccaagacctgcaaaacaggattgatttcctctatccaagactccctgcggaacaatctctggtgcatatcgccgagtacagcaaagaaagtaaagaagcactgcaggagctgcacgagcggatcggagaccgactgcaagaaagcatcaatggcatgagcgaagctatgcaaaatgccctcactgacacacttaataatatcatggggccggccatccaaaccctagttcattccactaatcaacaatcaagccaggtgatggaaaacctggtaagcagctttatggagggtatgagctcggcaggcagagtacagggtgaacagctcgaaaaagtggccgcggatgtcaatatcgccgtcagcagcatgggcgaacgtcttgaacagctgtttagtaaattaagctctcaacagactagcagcctggatgctcaggatgagcagtccaaacgtttccaggagcagttgcaacaactggccaattcggcagatgaacgacaaggccagttggagagtcgatttggtaagatgatgggtgacttggcccagcaacatgagcaacagcaaaccacgttactggagcagcaacaaaaaatgctgggcagtctgggcaccgcgagccaacagcaaatcgaggctatgacctcggccgtacagcaacaacagaacacattgcaggatgccgttggcaaactgctggataacttaagtcaacaaggtgctcaggcggatgttcgcgaacagattcgtcaggataaattccaacagcagctgactgacgtaacacaacagcagcaagcgttgttgaccgccttagccgactcagtgcaagccggtcaacaacaaagccgccaaatggcggaacagcaccagcaattgctgactcgcttgcagcaagtgaccgattccgcagcccagagcagcaagcatatggacagcagtgccaatcagctaggcctgctctccaccaatgtccgttctgccgccgatctactggggcagcgcttggaacaagtgacacaacaaattgagcaagccggtagccaaaatgctgcacttactgatcaactcaagcaacaagccgaaatgctggccagattgcaagatggcctgctgcagggagcggagcggttcgaacaggctgccagtgaggctcgccatggctttgttgagatgaagcaaacgcagcaacaattcctgacaggggtgagaaccgaattcaatgccttaggcgagacgttgcgttcccaagttgaagccatcgaaaaacaggctgaacagtggctgcaaaaatacgccagcgaagtcagcacccaggttcatgagcgtatggatcagtggaacaaggtttctctggaatatgccaccaagatgtatcacacggccgaagccatgagcagtgtgctggatgagctggagcaacgctga

SEQ ID NO: 9096 - DNA, 768 bp, Aeromonas hydrophila YL17
atgcaatttcgtaaagctcaaaccaccaacgttgacgaagaaaacccctactggatgtccttttccgacatcatgtccgccctgctcgtcatctttattatggcctcggtgatcctgatcctgcagctgatggagatccaaaaagaactggagcataaacaagccaagtttgaagaagagattgtcgcgctaaaacaagccgagcaagtacgccgcacaattcttgacgaagcagtagagaccctgcgcaagcgcggcatcaaggtagaggtcagccagaatcacaccgtcttgagcattcccaacgaactgctcggctttgaaactggcgcctttgatataagtccgacctatcaatctcgggccagggaaataggcgaagtgcttaacatggtaatctctcgtgacaatcgagtggagttcctagataccatcttcatcgaaggacataccgacaaccgtcccctgcagggctttatgggcaagggtaactgggggctgtcaaccttccgcgccatttccctctggcagttttgggaaaaatcactcatcggtgatgaacaactatcccggctgaaaaatagagatggccatcccctcttttcggtcagtggctatggagaaacacggccagcggtgtctaatcaagtgacggagacagattttaagcgtaatcgtcgcatcgacattcgttttaccatccgcagaccagacagcgcacagtacgaacaagtgaaggaacggctgcaggaggaacttcagcaatga

SEQ ID NO: 9097 - DNA, 2061 bp, Aeromonas hydrophila YL17
atgaagttgcccgaggccaaatccatggcaacctcttggggcctacccacggtaaacgcctgggccgaactccagacgaaggcttccaagatggagggggctgcagggcacaacgacgccttcagccagatgctcacctcactgcgcaacatggccatctcaggccggtttgaggcattacctggactactgaagcgccgactcactgcacgagcccttagctggttttggcttagtggcgaccggtatgccgagcgactgctcagcccccaactcctctccgcgctgttgcatgcccaacaacccaggctgacccgcatcacactccagcagttggtgcagctctactttcgtcaattcgacctgttagaccaacatgatggatttcgtgccatgctggagctggcactgctgtcacaactggagcaactgccagaacctcgtattgccaccctgcggccgaacccgctcatcagcctaaaacaagaaggacacaaacttcttggattggacggccctcgtcaacttgcagagcagacgctacaagcaggacgcgagcttggtgtgacatttagcgaactgggcctgcaaggcctggatgatggccgttacggcgatatctgtcgtgctcacttctatctcgagaccttgcgcattttgtcactggacgaatggtcacctgtgatggatgagctacttaaaccctcggtcagcaaggctccctttgagggggaccgctgtatcggccatgccgcgctggagatcctgatcgaccgtacaggccaggagcccagcgatgcctggcaaaccttcatcctcaacctggcaggcgatccccgcatatccagcgccgccacaaattaccgtcaatggtggcaaccactgggcgaggcacggattcaaaaggtcagaggctggctatccaaagaggatcttcgcctctttttgcaggccgttgagcaatatgggatccagagtcataacgacgaattacagcggatgtttcccgccagaaagctgtttctggagggcttgttcaaactcaaactgatccgtaatacccgtctgctactcggtaaccgggcccagcaaatcgttaaagggattttgggtaaggaagtaaaaaccagcttcgctcccatggatggggctatgagcgataaagcggtgatctatctggactgtggcgatttctacctgattgaaggttcccacagtttcaaaatttgggtctatttggcgcccccaagtgacatactgaccacttatgagaaacggatattcagccatgccgcactgacatccaccattcctgctggctaccaaaaacgatatggcaatcttcctctcgccagcatcgtccacacaccacacacttggcagcacaaggtcttcaccttcttggcagacaacggcatcggtctggatatggagcaactactgagccgccaggactaccaataccagcttcgccgctttggcatccctgcagtcaatcccaaacggacaccggtgccaactcccagccagccgacagccaagtcatttgtcgacacgataactcaccagtcagctctaactagtctcagtccatcaccagtagttcaagtcagggaggcatcccatcaggccaagctttatgaagaaccccagcagctcccagcgaatgcgtcacgtgcagtgaacaagttatcagctgagcagctttcaaagctgaatggcaggttcaaatacaagaacaaacccactccagcaacaccccattcggatgaaataaccagcgctaacactgttgcggagccttcgctctccgaactctgcccccgggttagccagctcaaaccgctagagcttaaggtactgcaatattttgccagcaatgccggtgacagagctcgtcatggcgccaacgtcttgggcatgacagttcaagagatcaatcaacagctttatgggccccttggtacgctctgctggcaaaacagccaatatggctggcacctcacatccgtagcagccgcggaattaaccgcttatgaagagcatcataaaggccactaa

SEQ ID NO: 9098 - DNA, 3060 bp, Aeromonas hydrophila YL17
atgcgcttagtcgaattcttgcgatcctttattggcgacacggacaacgccatcaacaaccagttaggttttcacagccaacctgactccagcgggttgaattttttcctgccagcaagtgagctcaaatcactgcaagtaggacaggggaacacccggcaaaaggtgcaactcatctgcctcaacatgttggccgagcagggtgtggccgagaccactgctaatggttttcatattgaggcagaagacatcactggtatggatggcgaacaagccgagatcctggacctgccgccccgcttccccgggcaatttgtctccacgattcacggccgaaccggtaacagcggctttcgggtagccattaccgccagtatgcctgaaggggaaaccccctttacccgcaaagggccctttctgtacttgggtagccaagaatgctattggctgacgccagcagaattaatgggactgatggcttgggagcaacacgagaccctgacagccgagctgcgaggcgaaaccgctaacctgcgactgatggccgagctgcaaacggcggcacgaagtggtatgcgcatcgaccttagtcattttgagcgccttgacgtagtggtgccggacaacataggtatcatagccacccgcatgccggatggtagcctgcagctttgcccctgtctgggagagggatccacgccagatcaattgcagaagcgatgggcgcagatagatatgagcgctaatggcggcgtgttgcgaatagataatcgcgtagtactgctggacgaaccccggttggccgggatccgcaacgtactggccaatacacgcattcctgccgacaaggtcaatgagtttattgccacccctaccgcttttttggatgccgccttggttaatctcgaggttggtttctccattagggtcgcaggtgtaggccgactacagtacatggactttggcgggctggataccaaccaaaacaattggtttgctcttgactcccgtccatcacccccggaggtactcagcggacttattcagtcgcctgaggaattgcaacgttttgaagatctattgcaagcggcacgagcccaaggcgccagcactctgacttttggtgaacagacgatcgacatcaccaacgtcgatgtagtggaaaaacaagttaccgccatcaagcaacgtcttgccggccattctggcctcgacgatgaaccagcagatgaatcagtcacacttgagacaccagtagacgaagaaaaagtcaaagagcgcgttgccgtcattctcaaggaggcggatgccatccataccaccttgttgaacaagaccaatttcgccaccctgccagcctcacctgactggtcacgctatgcgcgcacgcccttctctcaccagcaagaaggcatcgaatggatgctaaaactgctgaatgtggccttgcatgaagatcccgaggatctctaccgactgcaaggcggcctgctggccgatgacatggggttgggcaaaacctatatgaccttggtgaccatcggtgaatacctgcatcgtcaacgcagcctgggccaggcagaaaagcccattctggtggtggcgccactgagtctgctggagaactgggaagatgaggtcgccaagacctataacagcgtgccgtttcgcgaccaggtggtgttgcaagcaggtcgtgatctagggaggtttcggatccgaggtgcagaaagagagtcggtacagttggcctcgctggcagatgaaagcggcatgctagatgaacaaagcatccgctatgccctggccataggcccagaggccgggatccatcggctggacatggatagacggctagtactcaccacttatcaaaccttgcgggactaccagttttcactctgccgcatcgactggggtatggtgatcttcgatgaagcgcaaaacatcaagaaccccaatgccttacagacccgtgcagccaaaggcctcaaggctgacttcaagctgctggcaaccggaaccccagtggagaacagcctgggagatttttggtgtttgctggataccgcccaacccgggctgctcggtagctggcaacactaccgggacagctggataaaacccattctgaatgccgaagagcaagaacgcgacctgatccgtatccaaatcggcgagcaattacgccgcaccgtaggtaccttcatgttacgccgagtcaaagaggagcagctcaagggactacccagcaagaccatatgtagtggcgtacagcaagcagatagccagctgcaacgctatcaccccgaattgagccgcgtcatgagcggcttacagttgcaggcctatgatgccgtactcgatgagtatcgcagtcgccgggctagtgacgaaaacatgcaaggagcggccctggctgcactctcccggctcagaagcatctcattgcatccaaggctggatgacgaagctgcgctctacagtcaggatgccaagcaggcccgtcagtacatgcaggaatccggcaagctcaccattgttctgcagctactggagcagatccgtagccagaacgaaaaagtcattctgtttatgatgaccaagcggttgcagcgagtactcaagctctggctggatcagatctacggcctggatatcgccatcatcaatggcgacaccaaggcggtggccagtaaagtcgaggatctgacgcgcaagaagctgatcagccagttcgaggctcaagccggtttcaatgtgataatcatgtcccctgtggctgcaggggtcggtctgaccgtggtcagtgccaaccatgtgatccacttggagcgtcactggaacccagccaaagaggcccaggcctcagaccgggtctaccgcatcggccagcaaaaaccagtgtttatccacttgccgaccctgactcacccgcgatttgatgcgttcgatgtccatctggatcgcctgttgcgcggcaagctgatgctgaaagatgcagtggtcacccccgaagccgtcagcgaaagagaaatgacaagtgccatgggtctgtag

SEQ ID NO: 9099 - DNA, 2061 bp, Aeromonas caviae
atgtgggatttacttaaacacctatggcctgactttagccagatgctgaatggcactaccaatgggatcagtgcgtggttctggtcattcacatgcttcatctttttactatccctgttttttttgattaagcactacctcaatttcattgaaagaaacaaagcattgagatctttgttggatgggcaaagtagagaaacattggcttactctcgccgtgaaatacttcagagggctcaaaagctgaatgccaacaatattggtcatctctggcaggaatttgatgaaagccttgtcttatcttctgacaagaaacaacttttcaacagcattgacgcggagcattttttcaatgcaaaaaccttggcaacgggcctaaccgccagccgtttactagcagcgacccccagctttttagtggcgatcggggtgctcggaacctttgttggattaaccattggtctagaggggctagtgggcaatacggcagaaatcgagaccctcaagagtggtatcaataagctcatctctggcgcagcagttgcatttatgacctcggtctggggggttgctttcagtctcctgctcaatctgtgtgaaaagctgtttgaacgcaaagcgctgaacgatatccaagacctgcaaaacaggattgatttcctctatccaagactccctgcggaacaatctctggtgcatatcgccgagtacagcaaagaaagtaaagaagcactgcaggagctgcacgagcggatcggagaccgactgcaagaaagcatcaatggcatgagcgaagctatgcaaaatgccctcactgacacacttaataatatcatggggccggccatccaaaccctagttcattccactaatcaacaatcaagccaggtgatggaaaacctggtaagcagctttatggagggtatgagctcggcaggcagagtacagggtgaacagctcgaaaaagtggccgcggatgtcaatatcgccgtcagcagcatgggcgaacgtcttgaacagctgtttagtaaattaagctctcaacagactagcagcctggatgctcaggatgagcagtccaaacgtttccaggagcagttgcaacaactggccaattcggcagacgaacgacaaggccagttggagagtcgatttggtaagatgatgggtgacttggcccagcaacatgagcaacagcaaaccacgttactggagcagcaacaaaaaatgctgggcagtctgggcaccgcgagccaacagcaaatcgaggctatgacctcggccgtacagcaacaacagaacacattgcaggatgccgttggcaaactgctggataacttaagtcaacaaggtgctcaggcggatgttcgcgaacagattcgtcaggataaattccaacagcagctgactgacgtaacacaacagcagcaagcgttgttgaccgccttagccgactcagtgcaagccggtcaacaacaaagccgccaaatggcggaacagcaccagcaattgctgactcgcttgcagcaagtgaccgattccgcagcccagagcagcaagcatatggacagcagtgccaatcagctaggcctgctctccaccaatgtccgttctgccgccgatctactggggcagcgcttggaacaagtgacacaacaaattgagcaagccggtagccaaaatgctgcacttactgatcaactcaagcaacaagccgaaatgctggccagattgcaagatggcttgctgatgggagcagaacgtttcgaacaggctgccagtgaggctcgccatggctttgttgagatgaagcaaacgcagcaacaattcctgacaggggtgagaaccgaattcaatgccttaggcgagacgttgcgttcccaagttgaagccatcgaaaaacaggctgaacagtggctgcaaaaatacgccagcgaagtcagcacccaggttcatgagcgtatggatcagtggaacaaggtttctctggaatatgccaccaagatgtatcacacggccgaagccatgagcagtgtgctggatgagctggagcaacgctga

SEQ ID NO: 9100 - DNA, 768 bp, Aeromonas caviae
atgcaatttcgtaaagctcaaaccaccaacgttgacgaagaaaatccctactggatgtccttttccgacatcatgtccgccctgctcgtcatctttattatggcctcggtgatcctgatcctgcagctgatggagatccaaaaagagctggagcataaacaagccaagtttgaagaagagattgtcgcgctaaaacaagccgagcaagtacgccgcacaattcttgacgaagcagtagagaccctgcgcaagcgcggcatcaaggtagaggtcagccagaatcacaccgtcttgagcattcccaacgaactgctcggctttgaaactggcgcctttgatataagtccgacctatcaatctcgggccagggaaataggcgaagtgcttaacatggtaatctctcgtgacaatcgagtggagttcctagataccatcttcatcgaaggacataccgacaaccgtcccctgcagggctttatgggcaagggtaactgggggctgtcaaccttccgcgccatttccctctggcagttttgggaaaaatcactcatcggtgatgaacaactatcccggctgaaaaatagagatggccatcccctcttttcggtcagtggctatggagaaacacggccagcggtgtctaatcaagtgacggagacagattttaagcgtaatcgtcgcatcgacattcgttttaccatccgcagaccagacagcgcacagtacgaacaagtgaaggaacggctgcaggaggaacttcagcaatga

SEQ ID NO: 9101 - DNA, 2061 bp, Aeromonas caviae
atgaagttgcccgaggccaaatccatggcaacctcttggggcctacccacggtaaacgcctggaccgaactccagacgaaggcttccaggatggaagggacagcagggcacaacgacgccttcagccagatgctgaccttgctgcgcaacatggccatatcaggccggtttgaggcattacctggattgctgaagcgccgactcactgctcgtgcactcagttggttttggcttagtggcgaccagtatgccgaacggctgctcagcccccaactcctctccgcgctgttgcatgcccaacaacccaggctgactcgaataacacttcagcaactggtacagctctactttcgccaattcgacttgctagaccaacatgatggctttcgtgctctgctggaacaggcactgctgtcacaactggagcaactgccagaacctcgtattgccaccctgcggccgaacccgctcattagcctaaaacaagaagggcacaaactccttggactgaacggcccacgtcagctcgccgaacagacgctacaagcaggacgcgagcttggtgcgacatttagcgaactaggcctgcaaggcctagatgatggccgctatggcgatatctgtcgggctcacttctatctcgagaccttgcgcactttgtcactggacgaatggtcacctgtgatggatgagctacttaaaccctcggtcagcaaggctccctttgagggggaccgctgtatcggccatgccgcgctggagatcctgatcgaccgtacaggccaggagcccagcgatgcctggcaaaccttcatcctcaacctggcaggcgatccccgcatatccagcgccgccacaaattaccgtcaatggtggcaaccactgggcgaggcacggattcaaaaggtcagaggctggctatccaaagaggatcttcgcctctttttgcaggccgttgagcaatatgggatccagagtcataacgacgaattacagcggatgtttcccgccagaaagctgtttctggagggcttgttcaaactcaaactgatccgtaatacccgtctgctactcggtaaccgggcccagcaaatcgttaaagggattttgggtaaggaagtaaaaaccagcttcgctcccatggatggggctatgagcgataaagcggtgatctatctggactgtggcgatttctacctgattgaaggttcccacagtttcaaaatttgggtctatttggcgcccccaagtgacatactgaccacttatgagaaacggatattcagccacgccgcactgacatccaccattcctgctggctaccaaaaacgatatggcaatcttcctctcgccagcatcgtccacacaccacacacttggcagcacaaggtcttcaccttcttggcagacaacggcatcggtctggatatggagcaactactgagccgccaggactaccaataccagcttcgccgctttggcatccctgcagtcaatcccaaacggacaccggtgccaactcccagccagccgacagccaagtcatttgtcgacacgataactcaccagtcagctctaactagtctcagtccatcaccagtagatcaagtcagggaggcatcccatcaggccaagctttatgaagaaccccagcagctcccagcgaatgcgtcacgtgcagtgaacaagttatcagctgagcagctttcaaagctgaatggcaggttcaaatacaagaacaaacccactccagcaacaccccattcggatgaaataaccagcgctaacactgttgcggagccttcgctctccgaactctgcccccgggttagccagctcaaaccgctagagcttaaggtactgcaatattttgccagcaatgccggtgacagagctcgtcatggcgccaacgtcttgggcatgacagttcaagagatcaatcaacagctttatgggccccttggtacgctctgctggcaaaacagccaatatggctggcacctcacatccgtagcagccgcggaattaaccgcttatgaagagcatcataaaggccactaa

SEQ ID NO: 9102 - DNA, 3060 bp, Aeromonas caviae
atgcgcttagtcgaattcttgcgatcttttattggcgacacggacagcgccatcaacaaccagttaggttttcacagccaacctgactccagcgggttgaattttttcctgccagcaagtgagctcaaatcactgcaagtaggacaggggaacacccggcaaaaggtgcaactcatctgcctcaacatgttggccgagcagggtgtggccgagaccactgctaatggttttcatattgaggcagaagacatcactggtatggatggcgaacaagccgagatcctggacctgccgccccgcttccccgggcaatttgtctccacgattcacggccgaaccggtaacagcggctttcgggtagccattaccgccagtatgcctgaaggggaaaccccctttacccgcaaagggccctttctgtacttgggtagccaagaatgctattggctgacgccagcagaattaatgggactgatggcttgggagcaacacgagaccctgacagccgagctgcgaggcgaaaccgctaacctgcgactgatggccgagctgcaaacggcggcacgaagtggtatgcgcatcgaccttagtcattttgagcgccttgacgtagtggtgccggacaacataggtatcatagccacccgcatgccggatggtagcctgcagctttgcccctgtctgggagagggatccacgccagatcaattgcagaagcgatgggcgcagatagatatgagcgctaatggcggcgtgttgcgaatagataatcgcgtagtactgctggacgaaccccggttggccgggatccgcaacgtactggccaatacacgcattcctgccgacaaggtcaatgagtttattgccacccctaccgcttttttggatgccgccttggttaatctcgaggttggtttctccattagggtcgcaggtgtaggccgactacagtacatggactttggcgggctggataccaaccaaaacaattggtttgctcttgactcccgtccatcacccccggaggtactcagcggacttattcagtcgcctgaggaattgcaacgttttgaagatctattgcaagcggcacgagcccaaggcgccagcactctgacttttggtgaacagacgatcgacatcaccaacgtcgatgtagtggaaaaacaagttaccgccatcaagcaacgtcttgccggccattctggcctcgacgatgaaccagcagatgaatcagtcacacttgagacaccagtagacgaagaaaaagtcaaagagcgcgttgccgtcattctcaaggaggcggatgccatccataccaccttgttgaacaagaccaatttcgccaccctgccagcctcacctgactggtcacgctatgcgcgcacgcccttctctcaccagcaagaaggcatcgaatggatgctaaaactgctgaatgtggccttgcatgaagatcccgaggatctctaccgactgcaaggcggcctgctggccgatgacatggggttgggcaaaacctatatgaccttggtgaccatcggtgaatacctgcatcgtcaacgcagcctgggccaggcagaaaagcccattctggtggtggcgccactgagtctgctggagaactgggaagatgaggtcgccaagacctataacagcgtgccgtttcgcgaccaggtggtgttgcaagcaggtcgtgatctagggaggtttcggatccgaggtgcagaaagagagtcggtacagttggcctcgctggcagatgaaagcggcatgctagatgaacaaagcatccgctatgccctggccataggcccagaggccgggatccatcggctggacatggacagacggctagtactcaccacttatcaaaccttgcgggactaccagttttcactctgccgcatcgactggggtatggtgatcttcgatgaagcgcaaaacatcaagaaccccaatgccttacagacccgtgcagccaaaggcctcaaggctgacttcaagctgctggcaaccggaaccccagtggagaacagcctgggagatttttggtgtttgctggataccgcccaacccgggctgctcggtagctggcaacactaccgggacagctggataaaacccattctgaatgccgaagagcaagaacgcgacctgatccgtatccaaatcggcgagcaattacgccgcaccgtaggtaccttcatgttacgccgagtcaaagaggagcagctcaagggactacccagcaagaccatatgtagtggcgtacagcaagcagatagccagctgcaacgctatcaccccgaattgagccgcgtcatgagcggcttacagttgcaggcctatgatgccgtactcgatgagtatcgcagtcgccgggctagtgacgaaaacatgcaaggagcggccctggctgcactctcccggctcagaagcatctcattgcatccaaggctggatgacgaagctgcgctctacagtcaggatgccaagcaggcccgtcagtacatgcaggaatccggcaagctcaccattgttctgcagctactggagcagatccgtagccagaacgaaaaagtcattctgtttatgatgaccaagcggttgcagcgagtactcaagctctggctggatcagatctacggcctggatatcgccatcatcaatggcgacaccaaggcggtggccagtaaagtcgaggatctgacgcgcaagaagctgatcagccagttcgaggctcaagccggtttcaatgtgataatcatgtcccctgtggctgcaggggtcggtctgaccgtggtcagtgccaaccatgtgatccacttggagcgtcactggaacccagccaaagaggcccaggcctcagaccgggtctaccgcatcggccagcaaaaaccagtgtttatccacttgccgaccctgactcacccgcgatttgatgcgttcgatgtccatctggatcgcctgttgcgcggcaagctgatgctgaaagatgcagtggtcacccccgaagccgtcagcgaaagagaaatgacaagtgccatgggtctgtag

SEQ ID NO: 9103 - DNA, 2049 bp, Aeromonas allosaccharophila
atgattgagtttgccggaatggctacccacctcttggtgactggagggttgctcggcctgctggttgtagcatttttcattttcttcttgatacctggtgtaattcactggttcaggctgcggaagatttccaacgagataggggtattcgaggcgagcgttgcgcccaacaacttcaaaaggctttttgatagtgacaagctacttgcccatctttgggctgaatttcaggacacgctacatgagcagcgggaagaacgagatggccaaatggtcattaatgcagttcgttcaacagttgctgctgaaatgtttttcaatgaacaatttgttgtcgacagtcgtctgcgcactgaatttttcaagcatttgcctggtatttttaccggtctgggcatcatcgggactttcaccggactgatcgagggattgcgtcaatttcaggtcagcgagaacgctgtaacagttcgcgccagtctcgaatcactgatgcacgcggtcggtgaggcattcctcatttctgctactgcgattgcggccgctatgctggttacttttgtcgaaaaattgctcttggcctcgctttaccggaagacggaagctattgctcatggcattgatgctcgcttcgcgtctggtgcgggcgaggaatatctgtcccgtttggtcaacgcatcagaatcgtcagccagtcagtccaagatcctcaaggatgcgctagtcaaggagctgggcgacatcttgcgagagctctctgcttctcagttggcgactggccaacagctcaacgtgcaactcgctcagcacattgaagagtcatctgcccgacaggttgcggcagctcgtgaggataaccagcttctaggcgacgtcatcgcaggcagcatcgaacgtagcttaaaggatcccttggataagattgccaattccgttgagtctgcttccggcgagcagagttctaccgccgtccagatgctgaatgacgtcatggtcagtttcagtcagcgcctgaacgacctgtttggaggacaaatcaacggtatcaatgagttgaatcagcagacctctaaggggatgcaggaagcagttgcttcgctcaacgccttggttggtaaactggaagaaagtggtcgcaagacaactgacgacatggctgcccagatggcagcctcaatcaaggcgatggaagagcgccaggccagtatcaataaccagactcaggagtttgtcgaccagattcggcagctggttcagtcctctcaggcagagacccaggagaagcttcagtccacgttggcttctatcggccagcagatgactagtatccttgggacgctcaacgagtctcaggacaaggttttcgaagacaaccgagcgcgcgaacaatcaatggcagagcgtacctctacagccgtatcagcgatgactggtagtgtcgaagcggccgtcaaagagatatctgcagcctcgcaaacgatggcacaaagtgtttccacgctcacggcggccacagcctcgaccgtggacaagatgagcgcgggtgcgaatcgcttggatctggcagctaccaactttgcagtcgccggcgaccgagtcgcggcagttatgggacaaacaactacggtcagcggaaagctagccgaattgtctggttcactcacaactagctcaagtgcgttgctggacgcccttcgagactacaaagtgcaacgtgactctgtcagtacgttgcttgcagatgtgcgttcgactatcgagttggcaaggaaggaagccagcctcactggtgatgtgctgcagcgcatcgaggcatcgaccagtaagctgagccaagctcaaaaggctgcggacgagtacttggatggtgtaagcgatgttcttgctggttccagtgaggcattccgagaatcggtggtctcgaccttggcaaaggttaaccacgattttcataccaagctcagcagtgccgtcggcctgctttctactgctgtccaagagcttgaggtctcgcttggtagtcttggccccttgccccgaggcgctaagtaa

SEQ ID NO: 9104 - DNA, 711 bp, Aeromonas allosaccharophila
atgttcagcatgcatactatgcggcgtaggggtaaccgcgacgaggcggaaaagccattctggatctcattcgctgaccttatgacagcgctgatggtgttgttcctggtcgttatgggcgttgcgctgttggctgtcaccaaaagtgtgtctgagcgtgagaggaagcaagagcagcacagcaaaaacattgagctaatcatgaagcgtttcgaacaagctgcggcgcgtcatgagggcatcaaggtcgacaaactacgccatgtcatcgatttcggccaacgtgcgcaattcgcttttggagattggcgtttgaacacccagcaggaagaggttctgcgcaagttcgttccagaaatcctcaaccttgccaatgatgacttaggcaaaagcatccttaaacgcattgtcgtcgagggctataccgataaaaagggaacctatctcgccaacctgaacctgagtctcctgcgcagccagcgggtgctttgcacgatgtttgataccagcggcccaagcttgctcaatgacgaacaaaaagagcaagttcgtggactgttttttgtgggtggatactctttcaatgcgtcaaaggagacggcggaagagagccgtcgcgttgagatgagattggaatttctcggggtcgacgaagcacgtttagcaccaccggcaggtgcgggcaactttggcgagtgtgcactgcgatga

SEQ ID NO: 9105 - DNA, 1704 bp, Aeromonas allosaccharophila
atgactgcgctcagtcgtctttcaaatcttcttggtagcctcagcgctgctgaacagccattcccgcactctgacgacttggaccccgttattgcttcgcttcgcaagcacaacaagttcggcaccggtacatacatacctgaagaccttcaacaggcagcagtccgcaagttctgggagacccaacacttcgaaaccctcaaggacgctcgcatggtgtcgttcagcatgtgcgtgcctagtcgtccctccggcccctgcatcatggaagatcgccagcgttttttggccgtcctagatgccaagactggagtggatcagtgggtcgacgagcctcgctggtaccgacggtgctaccaaggcctggtgcgaagctacttcgcatatgacgcaatgattgctcaaacgccttccatcgctaagcagaactggggcgaccttcgggactatcttaatgaccgcgcccagaacattaccgacaagcaagggaacccggactgggtcatcactgctgtcaacaatcgattggtgtttggtgaggatccctgcgcggcctacgcggagaatgtcttatcaggagacatggccaagattgaccatctgtgcgaacaactcggcgtagtcaagtcatcttggttcctgcgcgagctcgttctggcccaagtacgacaggccacccagcttggatatgagcaattcaagggactcatacctcgtctgcttgagcttctggccaacaatcaggttctacgtgaccgcggcctaatccttatgctagacaagtacgcgtcagcatcgcagccgggcatcaacgaaccattgcgcaacgcttctgtcgactggtggggcaatccttggctgccatcgaacgagactcgttggggcggggtcgtgccggcggcgcgtgatatggtctccgagtggctcaaacgcgagtttatcgaggccttcttcaccaaacttgcagaggacggcgtcggcgaccgcaggcgtgccaacttctggctgcgctacgtgaagtcgatggataacatccagtttgcacttggtccccacgcatacgactccagagatcgtgacttcattgcgttgcgtacgaaaatgaagggcctctacacaaagctctatactaatgaccgctcgaacaacgccttcatcatgaccctaggtgacttggtcgcagtggagtttggcggcatgggtaatgcgttctatggctacgatgttcgcaaagcgcttccgtttgatgcctcttgccccgtagagactgcagttaacgcacggaactctctcaaaaacgagcagcggttgctttggatggggcataaagacggcattaaagggtggagtcaatgggaagatatgttcgaagcaacgctgaagaagcacttcaacattcacccgaacgcgatagccaaatacgccccatcaagaacaattgcgtcaacgtcagctcccgtttcgcagcctccccatgtggcgtctccacctccagcatttcattccaggcccccccagattgggcaaagcttcagcagggctaatcttgatgcctacgcacggacccaccgcctgaaggtggaggataaaagcgatatgaatggcaatctctgggttagaacagataacagcatccctagtgtgagcaaagctcttctggattggggattccgttacaagcccggcaagggctggtggcgatag

SEQ ID NO: 9106 - DNA, 3765 bp, Aeromonas allosaccharophila
atggttttcggatttttcaagaaggcgttagcgacacccgatgtcacatggcgccgcagactcaccgaacagggggtgcttgttggccaagctggtgacggcacacacctttccagcgaactcctgcctgcctatctggcccaacttattgacgacggatttgcctccgaggaggactcctcagaggtacttttaccttgggcctcggtctacgaagcgctacgcagtcccggttatgacgaactcgcagcggtcctggagttgccaccattcactgtcagtgaggtgatgctgcaaagcaggaattcattgactgacgaggacttttccatcgcagtctcgggttggcgttccaagcagccgcgtgatgagcaacccgaagtcaaaggcgccatgctggtgcgcgatgggcttatggaactgatgcggcccgagcagtgggatctgtttacggagattgtccagtttgctcgaagacctgtggagctgcggggcgaacagttgcatcgacagtcatgggggcgtattcgcacgctggccttgaaggccggcgcccgactcgatgactttcttcatcgatcagtggtgcttacgccggagcgactcgatatcgggcttcggaagtccgcgcttatcgcagacgacagcgtcatagagattgagcccaccttcgagggcgcaccatcagactggctagagcgctttgacagcatgcgaaccgttcccgatcgctatgacattgtcacatcggaaggtatcgtacaggtccttgttacaccacaagttaagacggttctccaagaggtcaagcggctaccgctgcgccgggtggccggctcccgcgcgcaagcatttatccttaatccctatgccacgctgggtcccgacgccaaggatgtcatcaacgaagaacagttcgaagaggccagggaacaggccggcctgcagtacgagcgctttgtgccatccatcgagaaagacgctacaggctatccggtacgtgtggggttgctcatcgagtctgcgagtgctgcgggcaccatgacgtcggagacagagtggttggccgatgaagatcttgccaagttcatcgccaagctggaggtatctctggcaaagggattccagctactgggctggaatggatacgacctggaactacaaggtgagacaccgaactacctctccgagctgcaggatgcgctcaagcagaggctcaaacccgtagccatggtgtcatatatccaggtccatgacctgagtgcatactcggcacgcatcgaagggatcggcgttgagaagccctattactcaccctatatcgccaaaaaggaggacaacgaaggctggttccccgataacgttctaccgctgattgcgtacatccctgaaggtgacactgagcccgtggccgtaccggcaaccaaggatgctctgagtaggcttcgagaggctgtaggtaatgcagaggtgacaggtcaggacactgtagaggtctcgtggttacccaagcccatgctcctcaaagaggccaagaatatcgttgggacctttgacgaagtgcttgaagaggtcaagacaagcgcttttgaccccgagcgcaaggggcctgagcaaaaggaaaagcttagcgcgcggaaaactctcatccttcgggccaacatccagacagttgactacgaagaacaacgtcgggaggccttgcttgcactccctgttgagcccgaactgccactgtgtatgagtgcggagttctcgctgctgcctcaccaacggcagggcctggcgtggttacagcacttgcacaagtcacaggcagagcaccatgttcggggggcggttcttgcggacgacatgggtcttggcaagacgtatcagctacttacctttatggggtggctggctgagaatgacccaaacgtcgcaccgatgctagtggtggctcccgtttccctgctggaaaactggaaggaagaagcagaaaagttcatccgtccaggggtgttgccgatcctaactgcctatggcgagtctctggcgacactaagggtacctcgagaagccattgagtctcgattgcgtactgaggacggcttggtgcgttttttgaagccaggctggatcggaagtgcgaaggtggtgctgaccacctatgaaacgttgcgtgaccttgagttctcctttgctttggagcggtggtccgtaatggtctgcgacgaggcgcagcgcatcaagaatcctgcggctatggtcactcgggctgcgaaaaagcagaacgttggcttcaaggtggcgtgcacgggcactcccgtcgagaacactttggcggacctatggtgcctgttcgactttgtccagccggggctgcttggagcattgaacgactttggccagcggtaccgaaaacccatagaagctcgcaacgacgaggagcgctctcgggtagaagagcttagagcccgtatttctccacagatcctccggcgcacgaaagcagaggtggccaaagacctgccacaaaagatcattgatgaagattgtcggcgacttcgcctgtcgactactcagcgcaacctgtacgccaaggcgattgaagatttcaagaaacgaaatgacccggcagctacggtcccatttaagaatcatttgggactcttacagtacctgagattactttgcaccaaccctcagcgctatgggttgacggcgtttaaaccagagcctctgcaagactatagagctaaggcaccaaagctggactggctgcttgggcagcttgagctcatccggaaacgtggcgagggtgagaaggctattgtcttctgcgagttccgcaacattcagcgtttgttgcagtattacatcgagcagacatttaagcttagggcggacattatcaatggcgagacgagcgcggcagcgagccacatagctagtcggcagaagcgcatcaaggccttccaagaaaagcctggcttcggggtcatcatactgtccccagtggccgtaggcttcggtgtaaacatccaggccgccaatcatgttatccattacacaagaacctggaatccggccaaggaggatcaggcgacggatcgcgcatatcgcattgggcagaaaaaggatgtctatgtctactacccagtcgtgattgccgatgacttctcaaccttcgacgtaaagctagatcagttactgacccagaagcgggaattggccggcgacatactcaatggctctggcgacttgagccccggagactttgtgatagctgatgtgattcctgatggcgatgtagctgggctgcaggaacgaatcaccttggacattgccttacagatggaatggcggcacttcgaaggactagctgcagcgttatggagcaagcaaggtttcgatttcagctattgcactcctggcacgaatgatcagggtgtcgatgtcgtagctatatcagacggtcaaggtgttttgattcaaaccaagacttcgagcaattatggaacaaagctaggctgggagcttatcaaggatcttgcgggcggtgaggctttttatcagcgcaagcatcccaacgtgcacttcaagaaaattggaatgacaaatcaatttttcaatgcccaagcacttgagcaagctgaattaaacaatgtgaccttggttgaccagaaccggttgggggaactgcttgagcagttccctgtaacgatgcttgaaattgagcgggttttgtattccaactggagagatacagcggacacatag

SEQ ID NO: 9107 - DNA, 2121 bp, Vibrio cholerae O1 biovar El Tor str. N16961
atgaccgatagccttaatctttccagtttatggccagacttgagcagtctaaatgtaatgccacctcaaactcctgagcaattgagtgctttgtttgtggttattttatggggtgtcgctctatttttcttaatttggtcagttgctgcatttattcgcgcaagacaacgagtagtttggcttaacaaatctttggatgatgcggagaaatcgactctgtcaggtgttcgaaatgatttaatttctagagctgaacaaaaaaaagattcagtagggcatttatggctcgagtttgatgaaacattgcttgaagtaaaaggtgctgatgacgttgttcgattgcataacacatttgatgctgactatttttttaatagttctagtttagctggtggtagtactgaaaacagaatgattgcggtggttccaggctttttaacggctctgggtgttattggtacttttgtcggtttacagctaggactttcagatctcaatatcgcgggcaacgttgatgtcaatgaaatgaaaaatggcgttgctggagttataaatggtgcaaaaatcgcatttatgacatcggtttggggcgtgctactcagtgttgcatttaatttcattgagaagatacttgagcaaattattagaaagaaaattaagtctttgcaaaaccgtattgacaggatgttccctcgattaagtgcggaatatcaactgcaatctattgcaaataacagccagcaatctcgagaaagcctacaaggacttgctgagaaaataggcgagaaaatgcaggagtcactcattcaggcaactcagggtattcaacaaggtctcgagagtagtctggaaaaaatcatggctccggctatcaataagctcgttgacgaaacatctgacgggaatcaaaaagcactggaaagcgttcttcaatctttcatggagggttttggtcaacaaggcgaacaacaacgtgtcgcgatggactctgcgtctcaaaacgtaaataagacgctagaatcaatgagcgtttcgatggctgctttcgtcaataagttggaagttcagcaaaacgcatcttcagaaagagagaaagaactgatctcaactatttcagttcaagtttctgagctagttactcagggtaatgagcagaagcgtgttctaacagagtttgtagaaaaacaagtctcagagttaggtgagcagcttactaaaagagaattagctgcttctgaacgtgaacagaaattggcttcctcaatggaaagtacgattaaagatttagtagaaaatgtttcagcacaaagccaagtcttgaccgattttgttcagaatcaagttgtccaacttacccaaacgttctccgaacgagatggaatggcaagtcagatggaaaaagagcgtaatgatatatttgtgaatcaaacgcaggcgatgaaagctggaacggatgagcttcttgctcaagtgaaagcggcgactgaatcacaacaaatcacaactaatagtattattgagcaaggtaaacaattacaaaatagtatcgattcctctgtttcggcatctgctcgagctacggagagtatgcagcagtcggcgaatgagttacgagttgccgctgatagtatgaatgtgtttggttccaacatcaaagatgcgggcaacaaactatctggtgctgttactgaagcggttaacagcacgaaggatttagcggaacaaaaccatctaggcgcagtgaaagttcaagcgttgagggagcagttgctggaagatacaagtaagtttagcgcgattgcagatcagataaacaatatgctgattagtgcagaacagtcgtttagcacgcttcgtactacccaaaatgagttccttgcagaacaaaaaggtaatctaaacgaactcacttcagaaatgaaacgtaatgtgaaagagttgacggagcaaatggctcaactgcttgaagattacgcagagcaagccaatggacaaaccgccgagcacctcaaagtttgggccaatagtagcacacaatatgcagagagcatgaatacagcagttagagctatttctagtgttgtcgatgaaattcaagataaagtgagccaacatgcgtag

SEQ ID NO: 9108 - DNA, 735 bp, Vibrio cholerae O1 biovar El Tor str. N16961
atgcgtagaggtgttcgttcgcatacacaaaactcagtagatgaagaaaatccctactgggtttcattttccgatctaatgtctgctttgcttgttatatttatacttgcagctgttgctctgattattgaattaactcaaaagaccaatgatgtcgaagctggtattgaagagcttaagcaagctgagttagcaagaaagaatataatttatgatgttcgagacgaactggctaaaagaaacgtaattgttgaaattgctgataacgatacggtaattcggattccagaaagcacactgacgtttgcatcaggtaaatcatcaattccgaacgatgcaacaatacagcaagcagttaaggacataggtgttgttcttcattctgcaattcagaagaaagaccgatttcaatatctcgataccatttttattgaggggcataccgatagcgatagtatccattacagaggaaaagggaattgggggttatctactgatcgagcaatatctgtctggaatgtctggcaaaatgaactgagcttaacgcctaaactcggtgacttagaaaacgcttatcatgcaaagctgttctctgttagtggttatgcggcgacaagacgtgccaatctacatgaggcgaatcagcaagaaaagagccagaataggcgcattgatattcgatttacagttaagaaaccatctattgctgagctcgagaggattgttggaccgtga

SEQ ID NO: 9109 - DNA, 1452 bp, Vibrio cholerae O1 biovar El Tor str. N16961
gtgagtctaaatataaaaaagctcaaagttagtttgcctgctaatccttttggtcaagccatcaaggactttgcacatctatcgagtcagctagaagtgctttctaagagtgccggtattgaaaacaataagttccgaactgcatatggagaagtatgtaatgcgcttgcctctaagaaaagagttgaggacgttatagatagctctgtacacgttcgcgccttagctctttcgctacatacggatgcgaagaaaaatgtcagctttacgcgcagattgcttaataaaattacagaaattgtaaaaaaaccaagctctttagtcatagagtcgttttatcagcatttcttatcagagtatgaccgactggcagacttggaagctacagcagactggttgttggaggctaaaaggctgcgaggcaatgatgagcagtttgatgaaaatatattgtcaaccaatggccccaagtggcttgcggaaagggctattcaaaataatgtcgattttgatcatttaattgcggagatgaagctggaacgttatgcaaatggcagatatttaacggcggctaaaggcatctactatattgagcagttaaacactataccattaggccaagatcatcctctcctagaggaggttcaaaaaacggtggtttttgattctcgatatgactctgaaagtttgttagggcatcaaattcttagaattttgattggccgatcgataggttctcacatcagtgagccttggatgaatgtgatcttagcaattggcggtgacccacgagtaccaagttcaaatccaagatatattaagtggtggaagagtttagaaccaaatctggttcaagctgttctcggatggttatcaaaactagacttgaagttgtttctggaagcgttggaggattattcttactcttcagctaattacgagctacagagaatgtacccatctcggaaaagtttcttagaggggatgttcgatgcgggggttatttcaaatacccggctttatttgagtctggatgctgcaaggtatttgaagagaaattatgaccctaagcacttgccaaatttctctactgttaaagatggtgacaaatcgataatttatgtgcaaatgaacggcgctcacatggttgaggggagccatagttgttatttgtggttgtaccggtatcttgacccttccgtttgtgtgtttaactataacattgatagtcctacgtactcacaactcacaatcggtataaacaatcaaatgtccagattgtcatctggtgcagttgctaaaataacgcactctccgagtggttacgcatggcaacgaaaagcacttatagcactaagagagttaggagttaaattgacgccgaaagatgtgctttcgaatgaagattatattgattttaaacaacgttatggggtgcgagagtggagttaa

SEQ ID NO: 9110 - DNA, 2823 bp, Vibrio cholerae O1 biovar El Tor str. N16961
ttgaattctcaaggcgagctaatattgacgccaaacatggggcaaagtgcgagtcatgagtcgattcaaaaggttttggggcagttgcaaagcgacaacgcagttactctgaaagtgggtgatgaaatagtcttattttctgaagaaaagctaatggctgtaaaagaagttattagcaacagggtaattccccaacagcaagttaaagcgttcctggaaaaccctacagcatatattgatgcgagtttagtcgatcttgatttaggtttttctatcagagttcatggtgcgacagtttttaaacatgcttattttggagaaacggacgagtcaggtatagattggttcggagcctcccccacatctgatttgattaatccaatatccaagctgactgatagagttcgcgataaaacaactcttgaggacgtagctaagaagattgaagatgcacgacaaaccggagcaaccgtttttgattatgaaggacaatcatacgatatcagcgatcctgcagctgttgaaaaagttctaaacgaaataggtcacaagatatctagccctaatacagatctttctagctacggagaggcagaagacgccgagactgaatcagaaggctcagaaatacatgttgttgatattgatctaaatgacgaagagctgtctgaaaattctcctaaagttgaacaactgatttctgatatttcatgggatggtgagttaaattgggaaaaccacaagcggacaccattcccacaccaggatattggtgttcgttggattttaggcgttgaacaaaaaagcttatcagactcgaaagttagtggagccttgctagctgatgacatggggttaggtaagacttttatggccctctcagcaatagaacatatttatcaacgacaacaaattagtggtgaaacgaagaaacctgcgttgatagttgctcctttgagtttattggaaaactggaaggatgaggtagataaaacctttaaacactcaccattcaaagatgtagttattttgcaatcatccgctgagttaaatgagtatcgcatggggggcgtagagattcgaggccagagcgcatctgatgattgtttagaacccaaatattctttgaaagttgggaaatactttggtcctagccgtttagatctaccagagcgattggtaatcactacttatcaaactttgcgcgattaccagttctccatgtgtttgattgattgggggatcgtggttttcgatgaagcccagaacattaaaaatccaaatgcacttcaaactcgtgctgcgaaaggcctaaaagcggatttcaaactagtggctacgggtacgcctgtagaaaacagcttagccgatttttggtgtttaatggatacagcttgcccaggacatctgggtagctatcaagaatttcgtgctcgttatatctcaccaattcttaaagctgctggtgatgaagttgaagaaataagagctaggcttggaagagaacttcgtatagctgtcggggcattgatgcttaggcgcattaaagaggacaaccttaaagggttacctctaaaacatatgtatgctggtggagaatttgaaaactggaagtatttagaagaacttaagtcgacaatggttggctaccagagagatgtttacgaaggagcgattagccatcaactcgagaatgaagaaagtcacgcgcttaccactttgatgcggctaagagatagttcgttacatcctcggttaagtgatggaggtcgccttgatattcccaaaaatgcaaaatcagctagagctctatacggagaatcaggaaaattagtttccttgcttgagactttagacagagtacgaagcaaacaagaaaagtgcattatttttgcggttaacaaacgactgcaaagtttcttaagtgtgactttggggcagatctataacctaggtccgctctcagttattaatggtgatgcaaaagccgtagcaaagcgtaaatctgtcccaactcgaaaatcaatgatttcagacttcgaagcaaaagaaggctttaatctaattgtaatgtctccagtcgcggctggtgtcggtttaactgtggtcggtgcgaatcatgtggttcatttagagcggtactggaacccagctaaagaagctcaagctacggatagggtttatcgtatcggacaggaaaaagaggttcatatctacatccctctgttgcatcaccctgaatttgaatcatttgatgtaaacctacataggctacttacccaaaaaacgttgctgaaggatgctgttgttacaccagaagatgttattccacagccagcaggtgtcgggggagtagtttctggtgatttgattgataaacgtattacagcggctgaacttgataagttaagttggcagcaatttgaagcgttatgtgtagaattgcttgcaaagattacggatagtgaaagcgcttggttgacgaacaatggtgctgatcatggtgctgatggtgtactacttaataacagtggtaatattttgcttcaggctaagtttacgcaacgacaatatgatggttataaagggatacaggagattcattctgctaaacctatttatgaatcagcaatgagaagttcttttgggcgtttgatttttgttactaattcacctttgttagctaagcgaactcatgaaattgctgccacatgtggtattgaagttttgggcagaacacagctgttaacttaccttgaagaatatgacattacactgaaagacattctgtcaaggttggggaaagatcgattaagagtttaa

SEQ ID NO: 9111 - DNA, 2121 bp, Vibrio cholerae O395
atgaccgatagccttaatctttccagcttatggccagacttgagcagtctaaatgtaatgccacctcaaactcctgagcaattgagtgctttgtttgtggttattttatggggtgtcgctctatttttcttaatttggtcagttgctgcatttattcgcgcaagacaacgagtagtttggcttaacaaatctttggatgatgcggagaaatcgactctgtcaggtgttcgaaatgatttaatttctagagctgaacaaaaaaaagattcagtagggcatttatggctcgagtttgatgaaacattgcttgaagtaaaaggtgctgatgacgttgttcgattgcataacacatttgatgctgactatttttttaatagttctagtttagctggtggtagtactgaaaacagaatgattgcggtggttccaggctttttaacggctctgggtgttattggtacttttgtcggtttacagctaggactttcagatctcaatatcgcgggcaacgttgatgtcaatgaaatgaaaaatggcgttgctggagttataaatggtgcaaaaatcgcatttatgacatcggtttggggcgtgctactcagtgttgcatttaatttcattgagaagatacttgagcaaattattagaaagaaaattaagtctttgcaaaaccgtattgacaggatgttccctcgattaagtgcggaatatcaactgcaatctattgcaaataacagccagcaatctcgagaaagcctacaaggacttgctgagaaaataggcgagaaaatgcaggagtcactcattcaggcaactcagggtattcaacaaggtctcgagagtagtctggaaaaaatcatggctccggctatcaataagctcgttgacgaaacatctgacgggaatcaaaaagcactggaaagcgttcttcaatctttcatggagggttttggtcaacaaggcgaacaacaacgtgtcgcgatggactctgcgtctcaaaacgtaaataagacgctagaatcaatgagcgtttcgatggctgctttcgtcaataagttggaagttcagcaaaacgcatcttcagaaagagagaaagaactgatctcaactatttcagttcaagtttctgagctagttactcagggtaatgagcagaagcgtgttctaacagagtttgtagaaaaacaagtctcagagttaggtgagcagcttactaaaagagaattagctgcttctgaacgtgaacagaaattggcttcctcaatggaaagtacgattaaagatttagtagaaaatgtttcagcacaaagccaagtcttgaccgattttgttcagaatcaagttgtccaacttacccaaacgttctccgaacgagatggaatggcaagtcagatggaaaaagagcgtaatgatatatttgtgaatcaaacgcaggcgatgaaagctggaacggatgagcttcttgctcaagtgaaagcggcgactgaatcacaacaaatcacaactaatagtattattgagcaaggtaaacaattacaaaatagtatcgattcctctgtttcggcatctgctcgagctacggagagtatgcagcagtcggcgaatgagttacgagttgccgctgatagtatgaatgtgtttggttccaacatcaaagatgcgggcaacaaactatctggtgctgttactgaagcggttaacagcacgaaggatttagcggaacaaaaccatctaggcgcagtgaaagttcaagcgttgagggagcagttgctggaagatacaagtaagtttagcgcgattgcagatcagataaacaatatgctgattagtgcagaacagtcgtttagcacgcttcgtactacccaaaatgagttccttgcagaacaaaaaggtaatctaaacgaactcacttcagaaatgaaacgtaatgtgaaagagttgacggagcaaatggctcaactgcttgaagattacgcagagcaagccaatggacaaaccgccgagcacctcaaagtttgggccaatagtagcacacaatatgcagagagcatgaatacagcagttagagctatttctagtgttgtcgatgaaattcaagataaagtgagccaacatgcgtag

SEQ ID NO: 9112 - DNA, 735 bp, Vibrio cholerae O395; identical to SEQ ID NO: 9108

SEQ ID NO: 9113 - DNA, 1452 bp, Vibrio cholerae O395
gtgagtctaaatataaaaaagctcaaagttagtttgcctgctaatccttttggtcaagccatcaaggactttgcacatctatcgagtcagctagaagtgctttctaagagtgccggtattgaaaacaataagttccgaactgcatatggagaagtatgtaatgcgcttgcctctaagaaaagagttgaggacgttatagatagctctgtacacgttcgcgccttagctctttcgctacatacggatgcgaagaaaaatgtcagctttacgcgcagattgcttaataaaattacagaaattgtaaaaaaaccaagctctttagtcatagagtcgttttatcagcatttcttatcagagtatgaccgactggcagacttggaagctacagcagactggttgttggaggctaaaaggctgcgaggcaatgatgagcagtttgatgaaaatatattgtcaaccaatggcctcaagtggcttgcggaaagggctattcaaaataatgtcgattttgatcatttaattgcggagatgaagctggaacgttatgcaaatggcagatatttaacggcggctaaaggcatctactatattgagcagttaaacactataccattaggccaagatcatcctctcctagaggaggttcaaaaaacggtggtttttgattctcgatatgactctgaaagtttgttagggcatcaaattcttagaattttgattggccgatcgataggttctcacatcagtgagccttggatgaatgtgatcttagcaattggcggtgacccacgagtaccaagttcaaatccaagatatattaagtggtggaagagtttagaaccaaatctggttcaagctgttctcggatggttatcaaaactagacttgaagttgtttctggaagcgttggaggattattcttactcttcagctaattacgagctacagagaatgtacccatctcggaaaagtttcttagaggggatgttcgatgcgggggttatttcaaatacccggctttatttgagtctggatgctgcaaggtatttgaagagaaattatgaccctaagcacttgccaaatttctctactgttaaagatggtgacaaatcgataatttatgtgcaaatgaacggcgctcacatggttgaggggagccatagttgttatttgtggttgtaccggtatcttgacccttccgtttgtgtgtttaactataacattgatagtcctacgtactcacaactcacaatcggtataaacaatcaaatgtccagattgtcatctggtgcagttgctaaaataacgcactctccgagtggttacgcatggcaacgaaaagcacttatagcactaagagagttaggtgttaaattgacgccgaaagatgtgctttcgaatgaagattatattgattttaaacaacgttatggggtgcgagagtggagttaa

SEQ ID NO: 9114 - DNA, 3441 bp, Vibrio cholerae O395
gtggagttaacctctttaatcagcaagttcttctctagctcagataaaacgtctcagtttgaactcatttgtgatgatagtcttgattttgcaacttccagaaaaactctagagaaaattaaagctgatgagtggataacagcgcagtatgttgcacttaaaatgcttgaagagcagggggatgtaagctcatttccagatggcttcattatgcctgccgatacagctgtcagactcgattctgagttgagggatttgtttagtttgcccccggtttggaaaggagtcattgacgctgatattcaaggaaaagctagtacacccacctttaaaattgatctttcggtcacaaccaaacaaggtcgaacaacactaaattacactgtggatgggcctttcattcggtttagtcaaaatgagcagtacctgctaacacccgagcagcttatggtatttattgcgcataaaacccatgtaaggtctgataggtctgaatatgataacttactgtacttacactctttgcaagaggcccaaaagaatggttgtaagctgaatctaaagcactttgaaaggctaagaatattgacaccaaataaaatcacagtagaagcagaattgaattctcaaggcgagctaatattgacgccaaacatggggcaaagtgcgagtcatgagtcgattcaaaaggttttggggcagttgcaaagcgacaacgcagttactctgaaagtgggtgatgaaatagtcttattttctgaagaaaagctaatggctgtaaaagaagttattagcaacagggtaattccccaacagcaagttaaagcgttcctggaaaaccctacagcatatattgatgcgagtttagtcgatcttgatttaggtttttctatcagagttcatggtgcgacagtttttaaacatgcttattttggagaaacggacgagtcaggtatagattggttcggagcctcccccacatctgatttgattaatccaatatccaagctgactgatagagttcgcgataaaacaactcttgaggacgtagctaagaagattgaagatgcacgacaaaccggagcaaccgtttttgattatgaaggacaatcatacgatatcagcgatcctgcagctgttgaaaaagttctaaacgaaataggtcacaagatatctagccctaatacagatctttctagctacggagaggcagaagacgccgagactgaatcagaaggctcagaaatacatgttgttgatattgatctaaatgacgaagagctgtctgaaaattctcctaaagttgaacaactgatttctgatatttcatgggatggtgagttaaattgggaaaaccacaagcggacaccattcccacaccaggatattggtgttcgttggattttaggcgttgaacaaaaaagcttatcagactcgaaagttagtggagccttgctagctgatgacatggggttaggtaagacttttatggccctctcagcaatagaacatatttatcaacgacaacaaattagtggtgaaacgaagaaacctgcgttgatagttgctcctttgagtttattggaaaactggaaggatgaggtagataaaacctttaaacactcaccattcaaagatgtagttattttgcaatcatccgctgagttaaatgagtatcgcatggggggcgtagagattcgaggccagagcgcatctgatgattgtttagaacccaaatattctttgaaagttgggaaatactttggtcctagccgtttagatctaccagagcgattggtaatcactacttatcaaactttgcgcgattaccagttctccatgtgtttgattgattgggggatcgtggttttcgatgaagcccagaacattaaaaatccaaatgcacttcaaactcgtgctgcgaaaggcctaaaagcggatttcaaactagtggctacgggtacgcctgtagaaaacagcttagccgatttttggtgtttaatggatacagcttgcccaggacatctgggtagctatcaagaatttcgtgctcgttatatctcaccaattcttaaagctgctggtgatgaagttgaagaaataagagctaggcttggaagagaacttcgtatagctgtcggggcattgatgcttaggcgcattaaagaggacaaccttaaagggttacctctaaaacatatgtatgctggtggagaatttgaaaactggaagtatttagaagaacttaagtcgacaatggttggctaccagagagatgtttacgaaggagcgattagccatcaactcgagaatgaagaaagtcacgcgcttaccactttgatgcggctaagagatagttcgttacatcctcggttaagtgatggaggtcgccttgatattcccaaaaatgcaaaatcagctagagctctatacggagaatcaggaaaattagtttccttgcttgagactttagacagagtacgaagcaaacaagaaaagtgcattatttttgcggttaacaaacgactgcaaagtttcttaagtgtgactttggggcagatctataacctaggtccgctctcagttattaatggtgatgcaaaagccgtagcaaagcgtaaatctgtcccaactcgaaaatcaatgatttcagacttcgaagcaaaagaaggctttaatctaattgtaatgtctccagtcgcggctggtgtcggtttaactgtggtcggtgcgaatcatgtggttcatttagagcggtactggaacccagctaaagaagctcaagctacggatagggtttatcgtatcggacaggaaaaagaggttcatatctacatccctctgttgcatcaccctgaatttgaatcatttgatgtaaacctacataggctacttacccaaaaaacgttgctgaaggatgctgttgttacaccagaagatgttattccacagccagcaggtgtcgggggagtagtttctggtgatttgattgataaacgtattacagcggctgaacttgataagttaagttggcagcaatttgaagcgttatgtgtagaattgcttgcaaagattacggatagtgaaagcgcttggttgacgaacaatggtgctgatcatggtgctgatggtgtactacttaataacagtggtaatattttgcttcaggctaagtttacgcaacgacaatatgatggttataaagggatacaggagattcattctgctaaacctatttatgaatcagcaatgagaagttcttttgggcgtttgatttttgttactaattcacctttgttagctaagcgaactcatgaaattgctgccacatgtggtattgaagttttgggcagaacacagctgttaacttaccttgaagaatatgacattacactgaaagacattctgtcaaggttggggaaagatcgattaagagtttaa

SEQ ID NO: 9115 - DNA, 2121 bp, Vibrio cholerae M66-2; identical to SEQ ID NO: 9107

SEQ ID NO: 9116 - DNA, 735 bp, Vibrio cholerae M66-2; identical to SEQ ID NO: 9108

SEQ ID NO: 9117 - DNA, 1452 bp, Vibrio cholerae M66-2
gtgagtctaaatataaaaaagctcaaagttagtttgcctgctaatccttttggtcaagccatcaaggactttgcacatctatcgagtcagctagaagtgctttctaagagtgccggtattgaaaacaataagttccgaactgcatatggagaagtatgtaatgcgcttgcctctaagaaaagagttgaggacgttatagatagctctgtacacgttcgcgccttagctctttcgctacatacggatgcgaagaaaaatgtcagctttacgcgcagattgcttaataaaattacagaaattgtaaaaaaaccaagctctttagtcatagagtcgttttatcagcatttcttatcagagtatgaccgactggcagacttggaagctacagcagactggttgttggaggctaaaaggctgcgaggcaatgatgagcagtttgatgaaaatatattgtcaaccaatggccccaagtggcttgcggaaagggctattcaaaataatgtcgattttgatcatttaattgcggagatgaagctggaacgttatgcaaatggcagatatttaacggcggctaaaggcatctactatattgagcagttaaacactataccattaggccaagatcatcctctcctagaggaggttcaaaaaacggtggtttttgattctcgatatgactctgaaagtttgttagggcatcaaattcttagaattttgattggccgatcgataggttctcacatcagtgagccttggatgaatgtgatcttagcaattggcggtgacccacgagtaccaagttcaaatccaagatatattaagtggtggaagagtttagaaccaaatctggttcaagctgttctcggatggttatcaaaactagacttgaagttgtttctggaagcgttggaggattattcttactcttcagctaattacgagctacagagaatgtacccatctcggaaaagtttcttagaggggatgttcgatgcgggggttatttcaaatacccggctttatttgagtctggatgctgcaaggtatttgaagagaaattatgaccctaagcacttgccaaatttctctactgttaaagatggtgacaaatcgataatttatgtgcaaatgaacggcgctcacatggttgaggggagccatagttgttatttgtggttgtaccggtatcttgacccttccgtttgtgtgtttaactataacattgatagtcctacgtactcacaactcacaatcggtataaacaatcaaatgtccagattgtcatctggtgcagttgctaaaataacgcactctccgagtggttacgcatggcaacgaaaagcacttatagcactaagagagttaggtgttaaattgacgccgaaagatgtgctttcgaatgaagattatattgattttaaacaacgttatggggtgcgagagtggagttaa

SEQ ID NO: 9118 - DNA, 3450 bp, Vibrio cholerae M66-2
gtggagttaacctctttaatcagcaagttcttctctagctcagataaaacgtctcagtttgaactcatttgtgatgatagtcttgattttgcaacttccagaaaaactctagagaaaattaaagctggtaaagctgatgagtggataacagcgcagtatgttgcacttaaaatgcttgaagagcagggggatgtaagctcatttccagatggcttcattatgcctgccgatacagctgtcagactcgattctgagttgagggatttgtttagtttgcccccggtttggaaaggagtcattgacgctgatattcaaggaaaagctagtacacccacctttaaaattgatctttcggtcacaaccaaacaaggtcgaacaacactaaattacactgtggatgggcctttcattcggtttagtcaaaatgagcagtacctgctaacacccgagcagcttatggtatttattgcgcataaaacccatgtaaggtctgataggtctgaatatgataacttactgtacttacactctttgcaagaggcccaaaagaatggttgtaagctgaatctaaagcactttgaaaggctaagaatattgacaccaaataaaatcacagtagaagcagaattgaattctcaaggcgagctaatattgacgccaaacatggggcaaagtgcgagtcatgagtcgattcaaaaggttttggggcagttgcaaagcgacaacgcagttactctgaaagtgggtgatgaaatagtcttattttctgaagaaaagctaatggctgtaaaagaagttattagcaacagggtaattccccaacagcaagttaaagcgttcctggaaaaccctacagcatatattgatgcgagtttagtcgatcttgatttaggtttttctatcagagttcatggtgcgacagtttttaaacatgcttattttggagaaacggacgagtcaggtatagattggttcggagcctcccccacatctgatttgattaatccaatatccaagctgactgatagagttcgcgataaaacaactcttgaggacgtagctaagaagattgaagatgcacgacaaaccggagcaaccgtttttgattatgaaggacaatcatacgatatcagcgatcctgcagctgttgaaaaagttctaaacgaaataggtcacaagatatctagccctaatacagatctttctagctacggagaggcagaagacgccgagactgaatcagaaggctcagaaatacatgttgttgatattgatctaaatgacgaagagctgtctgaaaattctcctaaagttgaacaactgatttctgatatttcatgggatggtgagttaaattgggaaaaccacaagcggacaccattcccacaccaggatattggtgttcgttggattttaggcgttgaacaaaaaagcttatcagactcgaaagttagtggagccttgctagctgatgacatggggttaggtaagacttttatggccctctcagcaatagaacatatttatcaacgacaacaaattagtggtgaaacgaagaaacctgcgttgatagttgctcctttgagtttattggaaaactggaaggatgaggtagataaaacctttaaacactcaccattcaaagatgtagttattttgcaatcatccgctgagttaaatgagtatcgcatggggggcgtagagattcgaggccagagcgcatctgatgattgtttagaacccaaatattctttgaaagttgggaaatactttggtcctagccgtttagatctaccagagcgattggtaatcactacttatcaaactttgcgcgattaccagttctccatgtgtttgattgattgggggatcgtggttttcgatgaagcccagaacattaaaaatccaaatgcacttcaaactcgtgctgcgaaaggcctaaaagcggatttcaaactagtggctacgggtacgcctgtagaaaacagcttagccgatttttggtgtttaatggatacagcttgcccaggacatctgggtagctatcaagaatttcgtgctcgttatatctcaccaattcttaaagctgctggtgatgaagttgaagaaataagagctaggcttggaagagaacttcgtatagctgtcggggcattgatgcttaggcgcattaaagaggacaaccttaaagggttacctctaaaacatatgtatgctggtggagaatttgaaaactggaagtatttagaagaacttaagtcgacaatggttggctaccagagagatgtttacgaaggagcgattagccatcaactcgagaatgaagaaagtcacgcgcttaccactttgatgcggctaagagatagttcgttacatcctcggttaagtgatggaggtcgccttgatattcccaaaaatgcaaaatcagctagagctctatacggagaatcaggaaaattagtttccttgcttgagactttagacagagtacgaagcaaacaagaaaagtgcattatttttgcggttaacaaacgactgcaaagtttcttaagtgtgactttggggcagatctataacctaggtccgctctcagttattaatggtgatgcaaaagccgtagcaaagcgtaaatctgtcccaactcgaaaatcaatgatttcagacttcgaagcaaaagaaggctttaatctaattgtaatgtctccagtcgcggctggtgtcggtttaactgtggtcggtgcgaatcatgtggttcatttagagcggtactggaacccagctaaagaagctcaagctacggatagggtttatcgtatcggacaggaaaaagaggttcatatctacatccctctgttgcatcaccctgaatttgaatcatttgatgtaaacctacataggctacttacccaaaaaacgttgctgaaggatgctgttgttacaccagaagatgttattccacagccagcaggtgtcgggggagtagtttctggtgatttgattgataaacgtattacagcggctgaacttgataagttaagttggcagcaatttgaagcgttatgtgtagaattgcttgcaaagattacggatagtgaaagcgcttggttgacgaacaatggtgctgatcatggtgctgatggtgtactacttaataacagtggtaatattttgcttcaggctaagtttacgcaacgacaatatgatggttataaagggatacaggagattcattctgctaaacctatttatgaatcagcaatgagaagttcttttgggcgtttgatttttgttactaattcacctttgttagctaagcgaactcatgaaattgctgccacatgtggtattgaagttttgggcagaacacagctgttaacttaccttgaagaatatgacattacactgaaagacattctgtcaaggttggggaaagatcgattaagagtttaa

SEQ ID NO: 9119 - DNA, 2121 bp, Vibrio cholerae O395; identical to SEQ ID NO: 9111

SEQ ID NO: 9120 - DNA, 735 bp, Vibrio cholerae O395; identical to SEQ ID NO: 9108

SEQ ID NO: 9121 - DNA, 1452 bp, Vibrio cholerae O395; identical to SEQ ID NO: 9113

SEQ ID NO: 9122 - DNA, 3441 bp, Vibrio cholerae O395; identical to SEQ ID NO: 9114

SEQ ID NO: 9123 - DNA, 2121 bp, Vibrio cholerae MJ-1236; identical to SEQ ID NO: 9107

SEQ ID NO: 9124 - DNA, 735 bp, Vibrio cholerae MJ-1236; identical to SEQ ID NO: 9108

SEQ ID NO: 9125 - DNA, 1452 bp, Vibrio cholerae MJ-1236; identical to SEQ ID NO: 9109

SEQ ID NO: 9126 - DNA, 2121 bp, Vibrio cholerae MAK 757; identical to SEQ ID NO: 9107

SEQ ID NO: 9127 - DNA, 735 bp, Vibrio cholerae MAK 757; identical to SEQ ID NO: 9108

SEQ ID NO: 9128 - DNA, 1452 bp, Vibrio cholerae MAK 757; identical to SEQ ID NO: 9117

SEQ ID NO: 9129 - DNA, 3450 bp, Vibrio cholerae MAK 757; identical to SEQ ID NO: 9118

SEQ ID NO: 9130 - DNA, 735 bp, Vibrio cholerae NCTC 8457; identical to SEQ ID NO: 9108

SEQ ID NO: 9131 - DNA, 1452 bp, Vibrio cholerae NCTC 8457; identical to SEQ ID NO: 9117

SEQ ID NO: 9132 - DNA, 3450 bp, Vibrio cholerae NCTC 8457; identical to SEQ ID NO: 9118

SEQ ID NO: 9133 - DNA, 2121 bp, Vibrio cholerae B33; identical to SEQ ID NO: 9107

SEQ ID NO: 9134 - DNA, 735 bp, Vibrio cholerae B33; identical to SEQ ID NO: 9108

SEQ ID NO: 9135 - DNA, 1452 bp, Vibrio cholerae B33; identical to SEQ ID NO: 9109

SEQ ID NO: 9136 - DNA, 3450 bp, Vibrio cholerae B33; identical to SEQ ID NO: 9118

SEQ ID NO: 9137 - DNA, 2121 bp, Vibrio cholerae O1 str. 2010EL-1786
atgaccgatagccttaatctttccagtttatggccagacttgagcagtctaaatgtaatgccacctcaaactcctgatcaattgagtgctttgtttgtggttattttatggggtgtcgctctatttttcttaatttggtcagttgctgcatttattcgcgcaagacaacgagtagtttggcttaacaaatctttggatgatgcggagaaatcgactctgtcaggtgttcgaaatgatttaatttctagagctgaacaaaaaaaagattcagtagggcatttatggctcgagtttgatgaaacattgcttgaagtaaaaggtgctgatgacgttgttcgattgcataacacatttgatgctgactatttttttaatagttctagtttagctggtggtagtactgaaaacagaatgattgcggtggttccaggctttttaacggctctgggtgttattggtacttttgtcggtttacagctaggactttcagatctcaatatcgcgggcaacgttgatgtcaatgaaatgaaaaatggcgttgctggagttataaatggtgcaaaaatcgcatttatgacatcggtttggggcgtgctactcagtgttgcatttaatttcattgagaagatacttgagcaaattattagaaagaaaattaagtctttgcaaaaccgtattgacaggatgttccctcgattaagtgcggaatatcaactgcaatctattgcaaataacagccagcaatctcgagaaagcctacaaggacttgctgagaaaataggcgagaaaatgcaggagtcactcattcaggcaactcagggtattcaacaaggtctcgagagtagtctggaaaaaatcatggctccggctatcaataagctcgttgacgaaacatctgacgggaatcaaaaagcactggaaagcgttcttcaatctttcatggagggttttggtcaacaaggcgaacaacaacgtgtcgcgatggactctgcgtctcaaaacgtaaataagacgctagaatcaatgagcgtttcgatggctgctttcgtcaataagttggaagttcagcaaaacgcatcttcagaaagagagaaagaactgatctcaactatttcagttcaagtttctgagctagttactcagggtaatgagcagaagcgtgttctaacagagtttgtagaaaaacaagtctcagagttaggtgagcagcttactaaaagagaattagctgcttctgaacgtgaacagaaattggcttcctcaatggaaagtacgattaaagatttagtagaaaatgtttcagcacaaagccaagtcttgaccgattttgttcagaatcaagttgtccaacttacccaaacgttctccgaacgagatggaatggcaagtcagatggaaaaagagcgtaatgatatatttgtgaatcaaacgcaggcgatgaaagctggaacggatgagcttcttgctcaagtgaaagcggcgactgaatcacaacaaatcacaactaatagtattattgagcaaggtaaacaattacaaaatagtatcgattcctctgtttcggcatctgctcgagctacggagagtatgcagcagtcggcgaatgagttacgagttgccgctgatagtatgaatgtgtttggttccaacatcaaagatgcgggcaacaaactatctggtgctgttactgaagcggttaacagcacgaaggatttagcggaacaaaaccatctaggcgcagtgaaagttcaagcgttgagggagcagttgctggaagatacaagtaagtttagcgcgattgcagatcagataaacaatatgctgattagtgcagaacagtcgtttagcacgcttcgtactacccaaaatgagttccttgcagaacaaaaaggtaatctaaacgaactcacttcagaaatgaaacgtaatgtgaaagagttgacggagcaaatggctcaactgcttgaagattacgcagagcaagccaatggacaaaccgccgagcacctcaaagtttgggccaatagtagcacacaatatgcagagagcatgaatacagcagttagagctatttctagtgttgtcgatgaaattcaagataaagtgagccaacatgcgtag

SEQ ID NO: 9138 - DNA, 735 bp, Vibrio cholerae O1 str. 2010EL-1786; identical to SEQ ID NO: 9108

SEQ ID NO: 9139 - DNA, 1452 bp, Vibrio cholerae O1 str. 2010EL-1786; identical to SEQ ID NO: 9109

SEQ ID NO: 9140 - DNA, 3450 bp, Vibrio cholerae O1 str. 2010EL-1786; identical to SEQ ID NO: 9118

SEQ ID NO: 9141 - DNA, 2121 bp, Vibrio cholerae V52; identical to SEQ ID NO: 9107

SEQ ID NO: 9142 - DNA, 735 bp, Vibrio cholerae V52; identical to SEQ ID NO: 9108

SEQ ID NO: 9143 - DNA, 1452 bp, Vibrio cholerae V52; identical to SEQ ID NO: 9117

SEQ ID NO: 9144 - DNA, 3450 bp, Vibrio cholerae V52; identical to SEQ ID NO: 9118

SEQ ID NO: 9145 - DNA, 2121 bp, Vibrio cholerae 2740-80; identical to SEQ ID NO: 9107

SEQ ID NO: 9146 - DNA, 735 bp, Vibrio cholerae 2740-80; identical to SEQ ID NO: 9108

SEQ ID NO: 9147 - DNA, 1452 bp, Vibrio cholerae 2740-80; identical to SEQ ID NO: 9117

SEQ ID NO: 9148 - DNA, 3450 bp, Vibrio cholerae 2740-80; identical to SEQ ID NO: 9118

SEQ ID NO: 9149 - DNA, 2121 bp, Vibrio cholerae RC9; identical to SEQ ID NO: 9107

SEQ ID NO: 9150 - DNA, 735 bp, Vibrio cholerae RC9; identical to SEQ ID NO: 9108

SEQ ID NO: 9151 - DNA, 1452 bp, Vibrio cholerae RC9; identical to SEQ ID NO: 9109

SEQ ID NO: 9152 - DNA, 2799 bp, Vibrio cholerae RC9
ttgacgccaaacatggggcaaagtgcgagtcatgagtcgattcaaaaggttttggggcagttgcaaagcgacaacgcagttactctgaaagtgggtgatgaaatagtcttattttctgaagaaaagctaatggctgtaaaagaagttattagcaacagggtaattccccaacagcaagttaaagcgttcctggaaaaccctacagcatatattgatgcgagtttagtcgatcttgatttaggtttttctatcagagttcatggtgcgacagtttttaaacatgcttattttggagaaacggacgagtcaggtatagattggttcggagcctcccccacatctgatttgattaatccaatatccaagctgactgatagagttcgcgataaaacaactcttgaggacgtagctaagaagattgaagatgcacgacaaaccggagcaaccgtttttgattatgaaggacaatcatacgatatcagcgatcctgcagctgttgaaaaagttctaaacgaaataggtcacaagatatctagccctaatacagatctttctagctacggagaggcagaagacgccgagactgaatcagaaggctcagaaatacatgttgttgatattgatctaaatgacgaagagctgtctgaaaattctcctaaagttgaacaactgatttctgatatttcatgggatggtgagttaaattgggaaaaccacaagcggacaccattcccacaccaggatattggtgttcgttggattttaggcgttgaacaaaaaagcttatcagactcgaaagttagtggagccttgctagctgatgacatggggttaggtaagacttttatggccctctcagcaatagaacatatttatcaacgacaacaaattagtggtgaaacgaagaaacctgcgttgatagttgctcctttgagtttattggaaaactggaaggatgaggtagataaaacctttaaacactcaccattcaaagatgtagttattttgcaatcatccgctgagttaaatgagtatcgcatggggggcgtagagattcgaggccagagcgcatctgatgattgtttagaacccaaatattctttgaaagttgggaaatactttggtcctagccgtttagatctaccagagcgattggtaatcactacttatcaaactttgcgcgattaccagttctccatgtgtttgattgattgggggatcgtggttttcgatgaagcccagaacattaaaaatccaaatgcacttcaaactcgtgctgcgaaaggcctaaaagcggatttcaaactagtggctacgggtacgcctgtagaaaacagcttagccgatttttggtgtttaatggatacagcttgcccaggacatctgggtagctatcaagaatttcgtgctcgttatatctcaccaattcttaaagctgctggtgatgaagttgaagaaataagagctaggcttggaagagaacttcgtatagctgtcggggcattgatgcttaggcgcattaaagaggacaaccttaaagggttacctctaaaacatatgtatgctggtggagaatttgaaaactggaagtatttagaagaacttaagtcgacaatggttggctaccagagagatgtttacgaaggagcgattagccatcaactcgagaatgaagaaagtcacgcgcttaccactttgatgcggctaagagatagttcgttacatcctcggttaagtgatggaggtcgccttgatattcccaaaaatgcaaaatcagctagagctctatacggagaatcaggaaaattagtttccttgcttgagactttagacagagtacgaagcaaacaagaaaagtgcattatttttgcggttaacaaacgactgcaaagtttcttaagtgtgactttggggcagatctataacctaggtccgctctcagttattaatggtgatgcaaaagccgtagcaaagcgtaaatctgtcccaactcgaaaatcaatgatttcagacttcgaagcaaaagaaggctttaatctaattgtaatgtctccagtcgcggctggtgtcggtttaactgtggtcggtgcgaatcatgtggttcatttagagcggtactggaacccagctaaagaagctcaagctacggatagggtttatcgtatcggacaggaaaaagaggttcatatctacatccctctgttgcatcaccctgaatttgaatcatttgatgtaaacctacataggctacttacccaaaaaacgttgctgaaggatgctgttgttacaccagaagatgttattccacagccagcaggtgtcgggggagtagtttctggtgatttgattgataaacgtattacagcggctgaacttgataagttaagttggcagcaatttgaagcgttatgtgtagaattgcttgcaaagattacggatagtgaaagcgcttggttgacgaacaatggtgctgatcatggtgctgatggtgtactacttaataacagtggtaatattttgcttcaggctaagtttacgcaacgacaatatgatggttataaagggatacaggagattcattctgctaaacctatttatgaatcagcaatgagaagttcttttgggcgtttgatttttgttactaattcacctttgttagctaagcgaactcatgaaattgctgccacatgtggtattgaagttttgggcagaacacagctgttaacttaccttgaagaatatgacattacactgaaagacattctgtcaaggttggggaaagatcgattaagagtttaa

SEQ ID NO: 9153 - DNA, 2121 bp, Vibrio cholerae B33; identical to SEQ ID NO: 9107

SEQ ID NO: 9154 - DNA, 735 bp, Vibrio cholerae B33; identical to SEQ ID NO: 9108

SEQ ID NO: 9155 - DNA, 1452 bp, Vibrio cholerae B33; identical to SEQ ID NO: 9109

SEQ ID NO: 9156 - DNA, 2799 bp, Vibrio cholerae B33; identical to SEQ ID NO: 9152

SEQ ID NO: 9157 - DNA, 2121 bp, Vibrio cholerae BX 330286; identical to SEQ ID NO: 9107

SEQ ID NO: 9158 - DNA, 735 bp, Vibrio cholerae BX 330286; identical to SEQ ID NO: 9108

SEQ ID NO: 9159 - DNA, 1452 bp, Vibrio cholerae BX 330286; identical to SEQ ID NO: 9117

SEQ ID NO: 9160 - DNA, 2799 bp, Vibrio cholerae BX 330286; identical to SEQ ID NO: 9152

SEQ ID NO: 9161 - DNA, 2121 bp, Vibrio cholerae CIRS101; identical to SEQ ID NO: 9137

SEQ ID NO: 9162 - DNA, 735 bp, Vibrio cholerae CIRS101; identical to SEQ ID NO: 9108

SEQ ID NO: 9163 - DNA, 1452 bp, Vibrio cholerae CIRS101; identical to SEQ ID NO: 9109

SEQ ID NO: 9164 - DNA, 3450 bp, Vibrio cholerae CIRS101; identical to SEQ ID NO: 9118

SEQ ID NO: 9165 - DNA, 2121 bp, Vibrio cholerae RC27; identical to SEQ ID NO: 9111

SEQ ID NO: 9166 - DNA, 735 bp, Vibrio cholerae RC27; identical to SEQ ID NO: 9108

SEQ ID NO: 9167 - DNA, 1452 bp, Vibrio cholerae RC27; identical to SEQ ID NO: 9113

SEQ ID NO: 9168 - DNA, 3450 bp, Vibrio cholerae RC27; identical to SEQ ID NO: 9118

SEQ ID NO: 9169 - DNA, 2064 bp, Vibrio cholerae INDRE 91/1
atgccacctcaaactcctgagcaattgagtgctttgtttgtggttattttatggggtgtcgctctatttttcttaatttggtcagttgctgcatttattcgcgcaagacaacgagtagtttggcttaacaaatctttggatgatgcggagaaatcgactctgtcaggtgttcgaaatgatttaatttctagagctgaacaaaaaaaagattcagtagggcatttatggctcgagtttgatgaaacattgcttgaagtaaaaggtgctgatgacgttgttcgattgcataacacatttgatgctgactatttttttaatagttctagtttagctggtggtagtactgaaaacagaatgattgcggtggttccaggctttttaacggctctgggtgttattggtacttttgtcggtttacagctaggactttcagatctcaatatcgcgggcaacgttgatgtcaatgaaatgaaaaatggcgttgctggagttataaatggtgcaaaaatcgcatttatgacatcggtttggggcgtgctactcagtgttgcatttaatttcattgagaagatacttgagcaaattattagaaagaaaattaagtctttgcaaaaccgtattgacaggatgttccctcgattaagtgcggaatatcaactgcaatctattgcaaataacagccagcaatctcgagaaagcctacaaggacttgctgagaaaataggcgagaaaatgcaggagtcactcattcaggcaactcagggtattcaacaaggtctcgagagtagtctggaaaaaatcatggctccggctatcaataagctcgttgacgaaacatctgacgggaatcaaaaagcactggaaagcgttcttcaatctttcatggagggttttggtcaacaaggcgaacaacaacgtgtcgcgatggactctgcgtctcaaaacgtaaataagacgctagaatcaatgagcgtttcgatggctgctttcgtcaataagttggaagttcagcaaaacgcatcttcagaaagagagaaagaactgatctcaactatttcagttcaagtttctgagctagttactcagggtaatgagcagaagcgtgttctaacagagtttgtagaaaaacaagtctcagagttaggtgagcagcttactaaaagagaattagctgcttctgaacgtgaacagaaattggcttcctcaatggaaagtacgattaaagatttagtagaaaatgtttcagcacaaagccaagtcttgaccgattttgttcagaatcaagttgtccaacttacccaaacgttctccgaacgagatggaatggcaagtcagatggaaaaagagcgtaatgatatatttgtgaatcaaacgcaggcgatgaaagctggaacggatgagcttcttgctcaagtgaaagcggcgactgaatcacaacaaatcacaactaatagtattattgagcaaggtaaacaattacaaaatagtatcgattcctctgtttcggcatctgctcgagctacggagagtatgcagcagtcggcgaatgagttacgagttgccgctgatagtatgaatgtgtttggttccaacatcaaagatgcgggcaacaaactatctggtgctgttactgaagcggttaacagcacgaaggatttagcggaacaaaaccatctaggcgcagtgaaagttcaagcgttgagggagcagttgctggaagatacaagtaagtttagcgcgattgcagatcagataaacaatatgctgattagtgcagaacagtcgtttagcacgcttcgtactacccaaaatgagttccttgcagaacaaaaaggtaatctaaacgaactcacttcagaaatgaaacgtaatgtgaaagagttgacggagcaaatggctcaactgcttgaagattacgcagagcaagccaatggacaaaccgccgagcacctcaaagtttgggccaatagtagcacacaatatgcagagagcatgaatacagcagttagagctatttctagtgttgtcgatgaaattcaagataaagtgagccaacatgcgtag

SEQ ID NO: 9170 - DNA, 735 bp, Vibrio cholerae INDRE 91/1; identical to SEQ ID NO: 9108

SEQ ID NO: 9171 - DNA, 1452 bp, Vibrio cholerae INDRE 91/1; identical to SEQ ID NO: 9109

SEQ ID NO: 9172 - DNA, 3450 bp, Vibrio cholerae INDRE 91/1; identical to SEQ ID NO: 9118

SEQ ID NO: 9173 - DNA, 2064 bp, Vibrio cholerae HC-49A2
atgccacctcaaactcctgatcaattgagtgctttgtttgtggttattttatggggtgtcgctctatttttcttaatttggtcagttgctgcatttattcgcgcaagacaacgagtagtttggcttaacaaatctttggatgatgcggagaaatcgactctgtcaggtgttcgaaatgatttaatttctagagctgaacaaaaaaaagattcagtagggcatttatggctcgagtttgatgaaacattgcttgaagtaaaaggtgctgatgacgttgttcgattgcataacacatttgatgctgactatttttttaatagttctagtttagctggtggtagtactgaaaacagaatgattgcggtggttccaggctttttaacggctctgggtgttattggtacttttgtcggtttacagctaggactttcagatctcaatatcgcgggcaacgttgatgtcaatgaaatgaaaaatggcgttgctggagttataaatggtgcaaaaatcgcatttatgacatcggtttggggcgtgctactcagtgttgcatttaatttcattgagaagatacttgagcaaattattagaaagaaaattaagtctttgcaaaaccgtattgacaggatgttccctcgattaagtgcggaatatcaactgcaatctattgcaaataacagccagcaatctcgagaaagcctacaaggacttgctgagaaaataggcgagaaaatgcaggagtcactcattcaggcaactcagggtattcaacaaggtctcgagagtagtctggaaaaaatcatggctccggctatcaataagctcgttgacgaaacatctgacgggaatcaaaaagcactggaaagcgttcttcaatctttcatggagggttttggtcaacaaggcgaacaacaacgtgtcgcgatggactctgcgtctcaaaacgtaaataagacgctagaatcaatgagcgtttcgatggctgctttcgtcaataagttggaagttcagcaaaacgcatcttcagaaagagagaaagaactgatctcaactatttcagttcaagtttctgagctagttactcagggtaatgagcagaagcgtgttctaacagagtttgtagaaaaacaagtctcagagttaggtgagcagcttactaaaagagaattagctgcttctgaacgtgaacagaaattggcttcctcaatggaaagtacgattaaagatttagtagaaaatgtttcagcacaaagccaagtcttgaccgattttgttcagaatcaagttgtccaacttacccaaacgttctccgaacgagatggaatggcaagtcagatggaaaaagagcgtaatgatatatttgtgaatcaaacgcaggcgatgaaagctggaacggatgagcttcttgctcaagtgaaagcggcgactgaatcacaacaaatcacaactaatagtattattgagcaaggtaaacaattacaaaatagtatcgattcctctgtttcggcatctgctcgagctacggagagtatgcagcagtcggcgaatgagttacgagttgccgctgatagtatgaatgtgtttggttccaacatcaaagatgcgggcaacaaactatctggtgctgttactgaagcggttaacagcacgaaggatttagcggaacaaaaccatctaggcgcagtgaaagttcaagcgttgagggagcagttgctggaagatacaagtaagtttagcgcgattgcagatcagataaacaatatgctgattagtgcagaacagtcgtttagcacgcttcgtactacccaaaatgagttccttgcagaacaaaaaggtaatctaaacgaactcacttcagaaatgaaacgtaatgtgaaagagttgacggagcaaatggctcaactgcttgaagattacgcagagcaagccaatggacaaaccgccgagcacctcaaagtttgggccaatagtagcacacaatatgcagagagcatgaatacagcagttagagctatttctagtgttgtcgatgaaattcaagataaagtgagccaacatgcgtag

SEQ ID NO: 9174 - DNA, 735 bp, Vibrio cholerae HC-49A2; identical to SEQ ID NO: 9108

SEQ ID NO: 9175 - DNA, 1452 bp, Vibrio cholerae HC-49A2; identical to SEQ ID NO: 9109

SEQ ID NO: 9176 - DNA, 3450 bp, Vibrio cholerae HC-49A2; identical to SEQ ID NO: 9118

SEQ ID NO: 9177 - DNA, 2121 bp, Vibrio cholerae HCUF01; identical to SEQ ID NO: 9137

SEQ ID NO: 9178 - DNA, 735 bp, Vibrio cholerae HCUF01; identical to SEQ ID NO: 9108

SEQ ID NO: 9179 - DNA, 1452 bp, Vibrio cholerae HCUF01; identical to SEQ ID NO: 9109

SEQ ID NO: 9180 - DNA, 3450 bp, Vibrio cholerae HCUF01; identical to SEQ ID NO: 9118

SEQ ID NO: 9181 - DNA, 2121 bp, Vibrio cholerae HC-40A1; identical to SEQ ID NO: 9137

SEQ ID NO: 9182 - DNA, 735 bp, Vibrio cholerae HC-40A1; identical to SEQ ID NO: 9108

SEQ ID NO: 9183 - DNA, 1452 bp, Vibrio cholerae HC-40A1; identical to SEQ ID NO: 9109

SEQ ID NO: 9184 - DNA, 3450 bp, Vibrio cholerae HC-40A1; identical to SEQ ID NO: 9118

SEQ ID NO: 9185 - DNA, 2121 bp, Vibrio cholerae HC-48A1; identical to SEQ ID NO: 9137

SEQ ID NO: 9186 - DNA, 735 bp, Vibrio cholerae HC-48A1; identical to SEQ ID NO: 9108

SEQ ID NO: 9187 - DNA, 1452 bp, Vibrio cholerae HC-48A1; identical to SEQ ID NO: 9109

SEQ ID NO: 9188 - DNA, 3450 bp, Vibrio cholerae HC-48A1; identical to SEQ ID NO: 9118

SEQ ID NO: 9189 - DNA, 2121 bp, Vibrio cholerae HC-70A1; identical to SEQ ID NO: 9137

SEQ ID NO: 9190 - DNA, 735 bp, Vibrio cholerae HC-70A1; identical to SEQ ID NO: 9108

SEQ ID NO: 9191 - DNA, 1452 bp, Vibrio cholerae HC-70A1; identical to SEQ ID NO: 9109

SEQ ID NO: 9192 - DNA, 3450 bp, Vibrio cholerae HC-70A1; identical to SEQ ID NO: 9118

SEQ ID NO: 9193 - DNA, 2064 bp, Vibrio cholerae HFU-02; identical to SEQ ID NO: 9173

SEQ ID NO: 9194 - DNA, 735 bp, Vibrio cholerae HFU-02; identical to SEQ ID NO: 9108

SEQ ID NO: 9195 - DNA, 1452 bp, Vibrio cholerae HFU-02; identical to SEQ ID NO: 9109

SEQ ID NO: 9196 - DNA, 3450 bp, Vibrio cholerae HFU-02; identical to SEQ ID NO: 9118

SEQ ID NO: 9197 - DNA, 2121 bp, Vibrio cholerae HC-38A1; identical to SEQ ID NO: 9137

SEQ ID NO: 9198 - DNA, 735 bp, Vibrio cholerae HC-38A1; identical to SEQ ID NO: 9108

SEQ ID NO: 9199 - DNA, 1452 bp, Vibrio cholerae HC-38A1; identical to SEQ ID NO: 9109

SEQ ID NO: 9200 - DNA, 3450 bp, Vibrio cholerae HC-38A1; identical to SEQ ID NO: 9118

SEQ ID NO: 9201 - DNA, 2121 bp, Vibrio cholerae HC-06A1; identical to SEQ ID NO: 9137

SEQ ID NO: 9202 - DNA, 735 bp, Vibrio cholerae HC-06A1; identical to SEQ ID NO: 9108

SEQ ID NO: 9203 - DNA, 1452 bp, Vibrio cholerae HC-06A1; identical to SEQ ID NO: 9109

SEQ ID NO: 9204 - DNA, 3450 bp, Vibrio cholerae HC-06A1; identical to SEQ ID NO: 9118

SEQ ID NO: 9205 - DNA, 2121 bp, Vibrio cholerae HC-23A1; identical to SEQ ID NO: 9137

SEQ ID NO: 9206 - DNA, 735 bp, Vibrio cholerae HC-23A1; identical to SEQ ID NO: 9108

SEQ ID NO: 9207 - DNA, 1452 bp, Vibrio cholerae HC-23A1; identical to SEQ ID NO: 9109

SEQ ID NO: 9208 - DNA, 3450 bp, Vibrio cholerae HC-23A1; identical to SEQ ID NO: 9118

SEQ ID NO: 9209 - DNA, 2121 bp, Vibrio cholerae HC-28A1; identical to SEQ ID NO: 9137

SEQ ID NO: 9210 - DNA, 735 bp, Vibrio cholerae HC-28A1; identical to SEQ ID NO: 9108

SEQ ID NO: 9211 - DNA, 1452 bp, Vibrio cholerae HC-28A1; identical to SEQ ID NO: 9109

SEQ ID NO: 9212 - DNA, 3450 bp, Vibrio cholerae HC-28A1; identical to SEQ ID NO: 9118

SEQ ID NO: 9213 - DNA, 2121 bp, Vibrio cholerae HC-43A1; identical to SEQ ID NO: 9137

SEQ ID NO: 9214 - DNA, 735 bp, Vibrio cholerae HC-43A1; identical to SEQ ID NO: 9108

SEQ ID NO: 9215 - DNA, 1452 bp, Vibrio cholerae HC-43A1; identical to SEQ ID NO: 9109

SEQ ID NO: 9216 - DNA, 3450 bp, Vibrio cholerae HC-43A1; identical to SEQ ID NO: 9118

SEQ ID NO: 9217 - DNA, 2121 bp, Vibrio cholerae HC-61A1; identical to SEQ ID NO: 9137

SEQ ID NO: 9218 - DNA, 657 bp, Vibrio cholerae HC-61A1
atgtctgctttgcttgttatatttatacttgcagctgttgctctgattattgaattaactcaaaagaccaatgatgtcgaagctggtattgaagagcttaagcaagctgagttagcaagaaagaatataatttatgatgttcgagacgaactggctaaaagaaacgtaattgttgaaattgctgataacgatacggtaattcggattccagaaagcacactgacgtttgcatcaggtaaatcatcaattccgaacgatgcaacaatacagcaagcagttaaggacataggtgttgttcttcattctgcaattcagaagaaagaccgatttcaatatctcgataccatttttattgaggggcataccgatagcgatagtatccattacagaggaaaagggaattgggggttatctactgatcgagcaatatctgtctggaatgtctggcaaaatgaactgagcttaacgcctaaactcggtgacttagaaaacgcttatcatgcaaagctgttctctgttagtggttatgcggcgacaagacgtgccaatctacatgaggcgaatcagcaagaaaagagccagaataggcgcattgatattcgatttacagttaagaaaccatctattgctgagctcgagaggattgttggaccgtga

SEQ ID NO: 9219 - DNA, 1452 bp, Vibrio cholerae HC-61A1; identical to SEQ ID NO: 9109

SEQ ID NO: 9220 - DNA, 3450 bp, Vibrio cholerae HC-61A1; identical to SEQ ID NO: 9118

SEQ ID NO: 9221 - DNA, 2121 bp, Vibrio cholerae HC-48B2; identical to SEQ ID NO: 9137

SEQ ID NO: 9222 - DNA, 735 bp, Vibrio cholerae HC-48B2; identical to SEQ ID NO: 9108

SEQ ID NO: 9223 - DNA, 643 bp, Vibrio cholerae HC-48B2
gtgagtctaaatataaaaaagctcaaagttagtttgcctgctaatccttttggtcaagccatcaaggactttgcacatctatcgagtcagctagaagtgctttctaagagtgccggtattgaaaacaataagttccgaactgcatatggagaagtatgtaatgcgcttgcctctaagaaaagagttgaggacgttatagatagctctgtacacgttcgcgccttagctctttcgctacatacggatgcgaagaaaaatgtcagctttacgcgcagattgcttaataaaattacagaaattgtaaaaaaaccaagctctttagtcatagagtcgttttatcagcatttcttatcagagtatgaccgactggcagacttggaagctacagcagactggttgttggaggctaaaaggctgcgaggcaatgatgagcagtttgatgaaaatatattgtcaaccaatggccccaagtggcttgcggaaagggctattcaaaataatgtcgattttgatcatttaattgcggagatgaagctggaacgttatgcaaatggcagatatttaacggcggctaaaggcatctactatattgagcagttaaacactataccattaggccaagatcatcctctcctagaggagg

SEQ ID NO: 9224 - DNA, 3450 bp, Vibrio cholerae HC-48B2; identical to SEQ ID NO: 9118

SEQ ID NO: 9225 - DNA, 2121 bp, Vibrio cholerae HC-33A2; identical to SEQ ID NO: 9137

SEQ ID NO: 9226 - DNA, 735 bp, Vibrio cholerae HC-33A2; identical to SEQ ID NO: 9108

SEQ ID NO: 9227 - DNA, 1419 bp, Vibrio cholerae HC-33A2
ttgcctgctaatccttttggtcaagccatcaaggactttgcacatctatcgagtcagctagaagtgctttctaagagtgccggtattgaaaacaataagttccgaactgcatatggagaagtatgtaatgcgcttgcctctaagaaaagagttgaggacgttatagatagctctgtacacgttcgcgccttagctctttcgctacatacggatgcgaagaaaaatgtcagctttacgcgcagattgcttaataaaattacagaaattgtaaaaaaaccaagctctttagtcatagagtcgttttatcagcatttcttatcagagtatgaccgactggcagacttggaagctacagcagactggttgttggaggctaaaaggctgcgaggcaatgatgagcagtttgatgaaaatatattgtcaaccaatggccccaagtggcttgcggaaagggctattcaaaataatgtcgattttgatcatttaattgcggagatgaagctggaacgttatgcaaatggcagatatttaacggcggctaaaggcatctactatattgagcagttaaacactataccattaggccaagatcatcctctcctagaggaggttcaaaaaacggtggtttttgattctcgatatgactctgaaagtttgttagggcatcaaattcttagaattttgattggccgatcgataggttctcacatcagtgagccttggatgaatgtgatcttagcaattggcggtgacccacgagtaccaagttcaaatccaagatatattaagtggtggaagagtttagaaccaaatctggttcaagctgttctcggatggttatcaaaactagacttgaagttgtttctggaagcgttggaggattattcttactcttcagctaattacgagctacagagaatgtacccatctcggaaaagtttcttagaggggatgttcgatgcgggggttatttcaaatacccggctttatttgagtctggatgctgcaaggtatttgaagagaaattatgaccctaagcacttgccaaatttctctactgttaaagatggtgacaaatcgataatttatgtgcaaatgaacggcgctcacatggttgaggggagccatagttgttatttgtggttgtaccggtatcttgacccttccgtttgtgtgtttaactataacattgatagtcctacgtactcacaactcacaatcggtataaacaatcaaatgtccagattgtcatctggtgcagttgctaaaataacgcactctccgagtggttacgcatggcaacgaaaagcacttatagcactaagagagttaggagttaaattgacgccgaaagatgtgctttcgaatgaagattatattgattttaaacaacgttatggggtgcgagagtggagttaa

SEQ ID NO: 9228 - DNA, 3450 bp, Vibrio cholerae HC-33A2; identical to SEQ ID NO: 9118

SEQ ID NO: 9229 - DNA, 2121 bp, Vibrio cholerae HC-32A1; identical to SEQ ID NO: 9137

SEQ ID NO: 9230 - DNA, 735 bp, Vibrio cholerae HC-32A1; identical to SEQ ID NO: 9108

SEQ ID NO: 9231 - DNA, 1452 bp, Vibrio cholerae HC-32A1; identical to SEQ ID NO: 9109

SEQ ID NO: 9232 - DNA, 3450 bp, Vibrio cholerae HC-32A1; identical to SEQ ID NO: 9118

SEQ ID NO: 9233 - DNA, 2121 bp, Vibrio cholerae HC-22A1; identical to SEQ ID NO: 9137

SEQ ID NO: 9234 - DNA, 735 bp, Vibrio cholerae HC-22A1; identical to SEQ ID NO: 9108

SEQ ID NO: 9235 - DNA, 1452 bp, Vibrio cholerae HC-22A1; identical to SEQ ID NO: 9109

SEQ ID NO: 9236 - DNA, 3450 bp, Vibrio cholerae HC-22A1; identical to SEQ ID NO: 9118

SEQ ID NO: 9237 - DNA, 2121 bp, Vibrio cholerae HC-21A1; identical to SEQ ID NO: 9137

SEQ ID NO: 9238 - DNA, 735 bp, Vibrio cholerae HC-21A1; identical to SEQ ID NO: 9108

SEQ ID NO: 9239 - DNA, 1452 bp, Vibrio cholerae HC-21A1; identical to SEQ ID NO: 9109

SEQ ID NO: 9240 - DNA, 3450 bp, Vibrio cholerae HC-21A1; identical to SEQ ID NO: 9118

SEQ ID NO: 9241 - DNA, 2121 bp, Vibrio cholerae HC-19A1; identical to SEQ ID NO: 9137

SEQ ID NO: 9242 - DNA, 735 bp, Vibrio cholerae HC-19A1; identical to SEQ ID NO: 9108

SEQ ID NO: 9243 - DNA, 1452 bp, Vibrio cholerae HC-19A1; identical to SEQ ID NO: 9109

SEQ ID NO: 9244 - DNA, 3450 bp, Vibrio cholerae HC-19A1; identical to SEQ ID NO: 9118

SEQ ID NO: 9245 - DNA, 2121 bp, Vibrio cholerae IEC224; identical to SEQ ID NO: 9107

SEQ ID NO: 9246 - DNA, 735 bp, Vibrio cholerae IEC224; identical to SEQ ID NO: 9108

SEQ ID NO: 9247 - DNA, 1452 bp, Vibrio cholerae IEC224; identical to SEQ ID NO: 9109

SEQ ID NO: 9248 - DNA, 3450 bp, Vibrio cholerae IEC224; identical to SEQ ID NO: 9118

SEQ ID NO: 9249 - DNA, 2121 bp, Vibrio cholerae HC-42A1; identical to SEQ ID NO: 9137

SEQ ID NO: 9250 - DNA, 735 bp, Vibrio cholerae HC-42A1; identical to SEQ ID NO: 9108

SEQ ID NO: 9251 - DNA, 1452 bp, Vibrio cholerae HC-42A1; identical to SEQ ID NO: 9109

SEQ ID NO: 9252 - DNA, 3450 bp, Vibrio cholerae HC-42A1; identical to SEQ ID NO: 9118

SEQ ID NO: 9253 - DNA, 2121 bp, Vibrio cholerae HC-56A2; identical to SEQ ID NO: 9137

SEQ ID NO: 9254 - DNA, 735 bp, Vibrio cholerae HC-56A2; identical to SEQ ID NO: 9108

SEQ ID NO: 9255 - DNA, 1452 bp, Vibrio cholerae HC-56A2; identical to SEQ ID NO: 9109

SEQ ID NO: 9256 - DNA, 3450 bp, Vibrio cholerae HC-56A2; identical to SEQ ID NO: 9118

SEQ ID NO: 9257 - DNA, 2121 bp, Vibrio cholerae CP1041(14)
atgaccgatagccttaatctttccagtttatggccagacttgagcagtctaaatgtaatgccacctcaaactcctgagcaattgagtgctttgtttgtggttattttatggggtgtcgctctatttttcttaatttggtcagttgctgcatttattcgcgcaagacaacgagtagtttggcttaacaaatctttggatgatgcggagaaatcgactctgtcaggtgttcgaaatgatttaatttctagagctgaacaaaaaaaagattcagtagggcatttatggctcgagtttgatgaaacattgcttgaagtaaaaggtgctgatgacgttgttcgattgcataacacatttgatgctgactatttttttaatagttctagtttagctggtggtagtactgaaaacagaatgattgcggtggttccaggctttttaacggctctgggtgttattggtacttttgtcggtttacagctaggactttcagatctcaatatcgcgggcaacgttgatgtcaatgaaatgaaaaatggcgttgctggagttataaatggtgcaaaaatcgcatttatgacatcggtttggggcgtgctactcagtgttgcatttaatttcattgagaagatacttgagcaaattattagaaagaaaattaagtctttgcaaaaccgtattgacaggatgttccctcgattaagtgcggaatatcaactgcaatctattgcaaataacagccagcaatctcgagaaagcctacaaggacttgctgagaaaataggcgagaaaatgcaggagtcactcattcaggcaactcagggtattcaacaaggtctcgagagtagtctggaaaaaatcatggctccggctatcaataagctcgttgacgaaacatctgacgggaatcaaaaagcactggaaagcgttcttcaatctttcatggagggttttggtcaacaaggcgaacagcaacgtgtcgcgatggactctgcgtctcaaaacgtaaataagacgctagaatcaatgagcgttttgatggctgctttcgtcaataagttggaagttcagcaaaacgcatcttcagaaagagagaaagaactgatctcaactatttcagttcaagtttctgagctagttactcagggtaatgagcagaagcgtgttctaacagagtttgtagaaaaacaagtctcagagttaggtgagcagcttactaaaagagaattagctgcttctgaacgtgaacagaaattggcttcctcaatggaaagtacgattaaagatttagtagaaaatgtttcagcacaaagccaagtcttgaccgattttgttcagaatcaagttgtccaacttacccaaacgttctccgaacgagatggaatggcaagtcagatggaaaaagagcgtaatgatatatttgtgaatcaaacgcaggcgatgaaagctggaacggatgagcttcttgctcaagtgaaagcggcgactgaatcacaacaaatcacaactaatagtattattgagcaaggtaaacaattacaaaatagtatcgattcctctgtttcggcatctgctcgagctacggagagtatgcagcagtcggcgaatgagttacgagttgccgctgatagtatgaatgtgtttggttccaacatcaaagatgcgggcaacaaactatctggtgctgttactgaagcggttaacagcacgaaggatttagcggaacaaaaccatctaggcgcagtgaaagttcaagcgttgagggagcagttgctggaagatacaagtaagtttagcgcgattgcagatcagataaacaatatgctgattagtgcagaacagtcgtttagcacgcttcgtactacccaaaatgagttccttgcagaacaaaaaggtaatctaaacgaactcacttcagaaatgaaacgtaatgtgaaagagttgacggagcaaatggctcaactgcttgaagattacgcagagcaagccaatggacaaaccgccgagcacctcaaagtttgggccaatagtagcacacaatatgcagagagcatgaatacagcagttagagctatttctagtgttgtcgatgaaattcaagataaagtgagccaacatgcgtag

SEQ ID NO: 9258 - DNA, 657 bp, Vibrio cholerae CP1041(14); identical to SEQ ID NO: 9218

SEQ ID NO: 9259 - DNA, 1452 bp, Vibrio cholerae CP1041(14); identical to SEQ ID NO: 9109

SEQ ID NO: 9260 - DNA, 3450 bp, Vibrio cholerae CP1041(14); identical to SEQ ID NO: 9118

SEQ ID NO: 9261 - DNA, 2121 bp, Vibrio cholerae CP1032(5); identical to SEQ ID NO: 9107

SEQ ID NO: 9262 - DNA, 735 bp, Vibrio cholerae CP1032(5); identical to SEQ ID NO: 9108

SEQ ID NO: 9263 - DNA, 1452 bp, Vibrio cholerae CP1032(5); identical to SEQ ID NO: 9109

SEQ ID NO: 9264 - DNA, 3450 bp, Vibrio cholerae CP1032(5); identical to SEQ ID NO: 9118

SEQ ID NO: 9265 - DNA, 2121 bp, Vibrio cholerae CP1038(11); identical to SEQ ID NO: 9137

SEQ ID NO: 9266 - DNA, 657 bp, Vibrio cholerae CP1038(11); identical to SEQ ID NO: 9218

SEQ ID NO: 9267 - DNA, 1356 bp, Vibrio cholerae CP1038(11)
gtgctttctaagagtgccggtattgaaaacaataagttccgaactgcatatggagaagtatgtaatgcgcttgcctctaagaaaagagttgaggacgttatagatagctctgtacacgttcgcgccttagctctttcgctacatacggatgcgaagaaaaatgtcagctttacgcgcagattgcttaataaaattacagaaattgtaaaaaaaccaagctctttagtcatagagtcgttttatcagcatttcttatcagagtatgaccgactggcagacttggaagctacagcagactggttgttggaggctaaaaggctgcgaggcaatgatgagcagtttgatgaaaatatattgtcaaccaatggccccaagtggcttgcggaaagggctattcaaaataatgtcgattttgatcatttaattgcggagatgaagctggaacgttatgcaaatggcagatatttaacggcggctaaaggcatctactatattgagcagttaaacactataccattaggccaagatcatcctctcctagaggaggttcaaaaaacggtggtttttgattctcgatatgactctgaaagtttgttagggcatcaaattcttagaattttgattggccgatcgataggttctcacatcagtgagccttggatgaatgtgatcttagcaattggcggtgacccacgagtaccaagttcaaatccaagatatattaagtggtggaagagtttagaaccaaatctggttcaagctgttctcggatggttatcaaaactagacttgaagttgtttctggaagcgttggaggattattcttactcttcagctaattacgagctacagagaatgtacccatctcggaaaagtttcttagaggggatgttcgatgcgggggttatttcaaatacccggctttatttgagtctggatgctgcaaggtatttgaagagaaattatgaccctaagcacttgccaaatttctctactgttaaagatggtgacaaatcgataatttatgtgcaaatgaacggcgctcacatggttgaggggagccatagttgttatttgtggttgtaccggtatcttgacccttccgtttgtgtgtttaactataacattgatagtcctacgtactcacaactcacaatcggtataaacaatcaaatgtccagattgtcatctggtgcagttgctaaaataacgcactctccgagtggttacgcatggcaacgaaaagcacttatagcactaagagagttaggagttaaattgacgccgaaagatgtgctttcgaatgaagattatattgattttaaacaacgttatggggtgcgagagtggagttaa

SEQ ID NO: 9268 - DNA, 3450 bp, Vibrio cholerae CP1038(11); identical to SEQ ID NO: 9118

SEQ ID NO: 9269 - DNA, 2121 bp, Vibrio cholerae CP1042(15); identical to SEQ ID NO: 9107

SEQ ID NO: 9270 - DNA, 735 bp, Vibrio cholerae CP1042(15); identical to SEQ ID NO: 9108

SEQ ID NO: 9271 - DNA, 1452 bp, Vibrio cholerae CP1042(15); identical to SEQ ID NO: 9109

SEQ ID NO: 9272 - DNA, 3450 bp, Vibrio cholerae CP1042(15); identical to SEQ ID NO: 9118

SEQ ID NO: 9273 - DNA, 2121 bp, Vibrio cholerae HC-57A2; identical to SEQ ID NO: 9137

SEQ ID NO: 9274 - DNA, 735 bp, Vibrio cholerae HC-57A2; identical to SEQ ID NO: 9108

SEQ ID NO: 9275 - DNA, 1452 bp, Vibrio cholerae HC-57A2; identical to SEQ ID NO: 9109

SEQ ID NO: 9276 - DNA, 3450 bp, Vibrio cholerae HC-57A2; identical to SEQ ID NO: 9118

SEQ ID NO: 9277 - DNA, 2121 bp, Vibrio cholerae CP1048(21); identical to SEQ ID NO: 9137

SEQ ID NO: 9278 - DNA, 657 bp, Vibrio cholerae CP1048(21); identical to SEQ ID NO: 9218

SEQ ID NO: 9279 - DNA, 1452 bp, Vibrio cholerae CP1048(21); identical to SEQ ID NO: 9109

SEQ ID NO: 9280 - DNA, 3450 bp, Vibrio cholerae CP1048(21); identical to SEQ ID NO: 9118

SEQ ID NO: 9281 - DNA, 2121 bp, Vibrio cholerae HC-20A2; identical to SEQ ID NO: 9137

SEQ ID NO: 9282 - DNA, 735 bp, Vibrio cholerae HC-20A2; identical to SEQ ID NO: 9108

SEQ ID NO: 9283 - DNA, 1452 bp, Vibrio cholerae HC-20A2; identical to SEQ ID NO: 9109

SEQ ID NO: 9284 - DNA, 3450 bp, Vibrio cholerae HC-20A2; identical to SEQ ID NO: 9118

SEQ ID NO: 9285 - DNA, 2121 bp, Vibrio cholerae HC-46A1; identical to SEQ ID NO: 9137

SEQ ID NO: 9286 - DNA, 657 bp, Vibrio cholerae HC-46A1; identical to SEQ ID NO: 9218

SEQ ID NO: 9287 - DNA, 1452 bp, Vibrio cholerae HC-46A1; identical to SEQ ID NO: 9109

SEQ ID NO: 9288 - DNA, 3450 bp, Vibrio cholerae HC-46A1; identical to SEQ ID NO: 9118

SEQ ID NO: 9289 - DNA, 2121 bp, Vibrio cholerae CP1030(3); identical to SEQ ID NO: 9107

SEQ ID NO: 9290 - DNA, 735 bp, Vibrio cholerae CP1030(3); identical to SEQ ID NO: 9108

SEQ ID NO: 9291 - DNA, 1452 bp, Vibrio cholerae CP1030(3); identical to SEQ ID NO: 9109

SEQ ID NO: 9292 - DNA, 3450 bp, Vibrio cholerae CP1030(3); identical to SEQ ID NO: 9118

SEQ ID NO: 9293 - DNA, 2121 bp, Vibrio cholerae CP1047(20); identical to SEQ ID NO: 9107

SEQ ID NO: 9294 - DNA, 735 bp, Vibrio cholerae CP1047(20); identical to SEQ ID NO: 9108

SEQ ID NO: 9295 - DNA, 1452 bp, Vibrio cholerae CP1047(20); identical to SEQ ID NO: 9109

SEQ ID NO: 9296 - DNA, 3450 bp, Vibrio cholerae CP1047(20); identical to SEQ ID NO: 9118

SEQ ID NO: 9297 - DNA, 2121 bp, Vibrio cholerae HC-47A1; identical to SEQ ID NO: 9137

SEQ ID NO: 9298 - DNA, 735 bp, Vibrio cholerae HC-47A1; identical to SEQ ID NO: 9108

SEQ ID NO: 9299 - DNA, 1452 bp, Vibrio cholerae HC-47A1; identical to SEQ ID NO: 9109

SEQ ID NO: 9300 - DNA, 3450 bp, Vibrio cholerae HC-47A1; identical to SEQ ID NO: 9118

SEQ ID NO: 9301 - DNA, 2121 bp, Vibrio cholerae CP1046(19); identical to SEQ ID NO: 9107

SEQ ID NO: 9302 - DNA, 735 bp, Vibrio cholerae CP1046(19); identical to SEQ ID NO: 9108

SEQ ID NO: 9303 - DNA, 1452 bp, Vibrio cholerae CP1046(19); identical to SEQ ID NO: 9109

SEQ ID NO: 9304 - DNA, 3450 bp, Vibrio cholerae CP1046(19); identical to SEQ ID NO: 9118

SEQ ID NO: 9305 - DNA, 2121 bp, Vibrio cholerae HC-41A1; identical to SEQ ID NO: 9137

SEQ ID NO: 9306 - DNA, 735 bp, Vibrio cholerae HC-41A1; identical to SEQ ID NO: 9108

SEQ ID NO: 9307 - DNA, 1452 bp, Vibrio cholerae HC-41A1; identical to SEQ ID NO: 9109

SEQ ID NO: 9308 - DNA, 3450 bp, Vibrio cholerae HC-41A1; identical to SEQ ID NO: 9118

SEQ ID NO: 9309 - DNA, 2121 bp, Vibrio cholerae HC-39A1; identical to SEQ ID NO: 9137

SEQ ID NO: 9310 - DNA, 735 bp, Vibrio cholerae HC-39A1; identical to SEQ ID NO: 9108

SEQ ID NO: 9311 - DNA, 1452 bp, Vibrio cholerae HC-39A1; identical to SEQ ID NO: 9109

SEQ ID NO: 9312 - DNA, 3450 bp, Vibrio cholerae HC-39A1; identical to SEQ ID NO: 9118

SEQ ID NO: 9313 - DNA, 2121 bp, Vibrio cholerae CP1040(13); identical to SEQ ID NO: 9257

SEQ ID NO: 9314 - DNA, 735 bp, Vibrio cholerae CP1040(13); identical to SEQ ID NO: 9108

SEQ ID NO: 9315 - DNA, 1452 bp, Vibrio cholerae CP1040(13); identical to SEQ ID NO: 9109

SEQ ID NO: 9316 - DNA, 3450 bp, Vibrio cholerae CP1040(13); identical to SEQ ID NO: 9118

SEQ ID NO: 9317 - DNA, 2121 bp, Vibrio cholerae CP1044(17); identical to SEQ ID NO: 9107

SEQ ID NO: 9318 - DNA, 735 bp, Vibrio cholerae CP1044(17); identical to SEQ ID NO: 9108

SEQ ID NO: 9319 - DNA, 1452 bp, Vibrio cholerae CP1044(17); identical to SEQ ID NO: 9109

SEQ ID NO: 9320 - DNA, 3450 bp, Vibrio cholerae CP1044(17); identical to SEQ ID NO: 9118

SEQ ID NO: 9321 - DNA, 2064 bp, Vibrio cholerae CP1050(23); identical to SEQ ID NO: 9173

SEQ ID NO: 9322 - DNA, 735 bp, Vibrio cholerae CP1050(23); identical to SEQ ID NO: 9108

SEQ ID NO: 9323 - DNA, 1452 bp, Vibrio cholerae CP1050(23); identical to SEQ ID NO: 9109

SEQ ID NO: 9324 - DNA, 3450 bp, Vibrio cholerae CP1050(23); identical to SEQ ID NO: 9118

SEQ ID NO: 9325 - DNA, 2064 bp, Vibrio cholerae HC-81A2; identical to SEQ ID NO: 9173

SEQ ID NO: 9326 - DNA, 657 bp, Vibrio cholerae HC-81A2; identical to SEQ ID NO: 9218

SEQ ID NO: 9327 - DNA, 1452 bp, Vibrio cholerae HC-81A2; identical to SEQ ID NO: 9109

SEQ ID NO: 9328 - DNA, 3450 bp, Vibrio cholerae HC-81A2; identical to SEQ ID NO: 9118

SEQ ID NO: 9329 - DNA, 2121 bp, Vibrio cholerae CP1033(6); identical to SEQ ID NO: 9107

SEQ ID NO: 9330 - DNA, 735 bp, Vibrio cholerae CP1033(6); identical to SEQ ID NO: 9108

SEQ ID NO: 9331 - DNA, 1452 bp, Vibrio cholerae CP1033(6); identical to SEQ ID NO: 9109

SEQ ID NO: 9332 - DNA, 3450 bp, Vibrio cholerae CP1033(6); identical to SEQ ID NO: 9118

SEQ ID NO: 9333 - DNA, 2064 bp, Vibrio cholerae HC-17A1; identical to SEQ ID NO: 9173

SEQ ID NO: 9334 - DNA, 735 bp, Vibrio cholerae HC-17A1; identical to SEQ ID NO: 9108

SEQ ID NO: 9335 - DNA, 1452 bp, Vibrio cholerae HC-17A1; identical to SEQ ID NO: 9109

SEQ ID NO: 9336 - DNA, 3450 bp, Vibrio cholerae HC-17A1; identical to SEQ ID NO: 9118

SEQ ID NO: 9337 - DNA, 957 bp, Vibrio cholerae HC-50A2
ctaacagagtttgtagaaaaacaagtctcagagttaggtgagcagcttactaaaagagaattagctgcttctgaacgtgaacagaaattggcttcctcaatggaaagtacgattaaagatttagtagaaaatgtttcagcacaaagccaagtcttgaccgattttgttcagaatcaagttgtccaacttacccaaacgttctccgaacgagatggaatggcaagtcagatggaaaaagagcgtaatgatatatttgtgaatcaaacgcaggcgatgaaagctggaacggatgagcttcttgctcaagtgaaagcggcgactgaatcacaacaaatcacaactaatagtattattgagcaaggtaaacaattacaaaatagtatcgattcctctgtttcggcatctgctcgagctacggagagtatgcagcagtcggcgaatgagttacgagttgccgctgatagtatgaatgtgtttggttccaacatcaaagatgcgggcaacaaactatctggtgctgttactgaagcggttaacagcacgaaggatttagcggaacaaaaccatctaggcgcagtgaaagttcaagcgttgagggagcagttgctggaagatacaagtaagtttagcgcgattgcagatcagataaacaatatgctgattagtgcagaacagtcgtttagcacgcttcgtactacccaaaatgagttccttgcagaacaaaaaggtaatctaaacgaactcacttcagaaatgaaacgtaatgtgaaagagttgacggagcaaatggctcaactgcttgaagattacgcagagcaagccaatggacaaaccgccgagcacctcaaagtttgggccaatagtagcacacaatatgcagagagcatgaatacagcagttagagctatttctagtgttgtcgatgaaattcaagataaagtgagccaacatgcgtag

SEQ ID NO: 9338 - DNA, 735 bp, Vibrio cholerae HC-50A2; identical to SEQ ID NO: 9108

SEQ ID NO: 9339 - DNA, 798 bp, Vibrio cholerae HC-50A2
gtggtttttgattctcgatatgactctgaaagtttgttagggcatcaaattcttagaattttgattggccgatcgataggttctcacatcagtgagccttggatgaatgtgatcttagcaattggcggtgacccacgagtaccaagttcaaatccaagatatattaagtggtggaagagtttagaaccaaatctggttcaagctgttctcggatggttatcaaaactagacttgaagttgtttctggaagcgttggaggattattcttactcttcagctaattacgagctacagagaatgtacccatctcggaaaagtttcttagaggggatgttcgatgcgggggttatttcaaatacccggctttatttgagtctggatgctgcaaggtatttgaagagaaattatgaccctaagcacttgccaaatttctctactgttaaagatggtgacaaatcgataatttatgtgcaaatgaacggcgctcacatggttgaggggagccatagttgttatttgtggttgtaccggtatcttgacccttccgtttgtgtgtttaactataacattgatagtcctacgtactcacaactcacaatcggtataaacaatcaaatgtccagattgtcatctggtgcagttgctaaaataacgcactctccgagtggttacgcatggcaacgaaaagcacttatagcactaagagagttaggagttaaattgacgccgaaagatgtgctttcgaatgaagattatattgattttaaacaacgttatggggtgcgagagtggagttaa

SEQ ID NO: 9340 - DNA, 2796 bp, Vibrio cholerae HC-50A2
gtggagttaacctctttaatcagcaagttcttctctagctcagataaaacgtctcagtttgaactcatttgtgatgatagtcttgattttgcaacttccagaaaaactctagagaaaattaaagctggtaaagctgatgagtggataacagcgcagtatgttgcacttaaaatgcttgaagagcagggggatgtaagctcatttccagatggcttcattatgcctgccgatacagctgtcagactcgattctgagttgagggatttgtttagtttgcccccggtttggaaaggagtcattgacgctgatattcaaggaaaagctagtacacccacctttaaaattgatctttcggtcacaaccaaacaaggtcgaacaacactaaattacactgtggatgggcctttcattcggtttagtcaaaatgagcagtacctgctaacacccgagcagcttatggtatttattgcgcataaaacccatgtaaggtctgataggtctgaatatgataacttactgtacttacactctttgcaagaggcccaaaagaatggttgtaagctgaatctaaagcactttgaaaggctaagaatattgacaccaaataaaatcacagtagaagcagaattgaattctcaaggcgagctaatattgacgccaaacatggggcaaagtgcgagtcatgagtcgattcaaaaggttttggggcagttgcaaagcgacaacgcagttactctgaaagtgggtgatgaaatagtcttattttctgaagaaaagctaatggctgtaaaagaagttattagcaacagggtaattccccaacagcaagttaaagcgttcctggaaaaccctacagcatatattgatgcgagtttagtcgatcttgatttaggtttttctatcagagttcatggtgcgacagtttttaaacatgcttattttggagaaacggacgagtcaggtatagattggttcggagcctcccccacatctgatttgattaatccaatatccaagctgactgatagagttcgcgataaaacaactcttgaggacgtagctaagaagattgaagatgcacgacaaaccggagcaaccgtttttgattatgaaggacaatcatacgatatcagcgatcctgcagctgttgaaaaagttctaaacgaaataggtcacaagatatctagccctaatacagatctttctagctacggagaggcagaagacgccgagactgaatcagaaggctcagaaatacatgttgttgatattgatctaaatgacgaagagctgtctgaaaattctcctaaagttgaacaactgatttctgatatttcatgggatggtgagttaaattgggaaaaccacaagcggacaccattcccacaccaggatattggtgttcgttggattttaggcgttgaacaaaaaagcttatcagactcgaaagttagtggagccttgctagctgatgacatggggttaggtaagacttttatggccctctcagcaatagaacatatttatcaacgacaacaaattagtggtgaaacgaagaaacctgcgttgatagttgctcctttgagtttattggaaaactggaaggatgaggtagataaaacctttaaacactcaccattcaaagatgtagttattttgcaatcatccgctgagttaaatgagtatcgcatggggggcgtagagattcgaggccagagcgcatctgatgattgtttagaacccaaatattctttgaaagttgggaaatactttggtcctagccgtttagatctaccagagcgattggtaatcactacttatcaaactttgcgcgattaccagttctccatgtgtttgattgattgggggatcgtggttttcgatgaagcccagaacattaaaaatccaaatgcacttcaaactcgtgctgcgaaaggcctaaaagcggatttcaaactagtggctacgggtacgcctgtagaaaacagcttagccgatttttggtgtttaatggatacagcttgcccaggacatctgggtagctatcaagaatttcgtgctcgttatatctcaccaattcttaaagctgctggtgatgaagttgaagaaataagagctaggcttggaagagaacttcgtatagctgtcggggcattgatgcttaggcgcattaaagaggacaaccttaaagggttacctctaaaacatatgtatgctggtggagaatttgaaaactggaagtatttagaagaacttaagtcgacaatggttggctaccagagagatgtttacgaaggagcgattagccatcaactcgagaatgaagaaagtcacgcgcttaccactttgatgcggctaagagatagttcgttacatcctcggttaagtgatggaggtcgccttgatattcccaaaaatgcaaaatcagctagagctctatacggagaatcaggaaaattagtttccttgcttgagactttagacagagtacgaagcaaacaagaaaagtgcattatttttgcggttaacaaacgactgcaaagtttcttaagtgtgactttggggcagatctataacctaggtccgctctcagttattaatggtgatgcaaaagccgtagcaaagcgtaaatctgtcccaactcgaaaatcaatgatttcagacttcgaagcaaaagaaggctttaatctaattgtaatgtctccagtcgcggctggtgtcggtttaactgtggtcggtgcgaatcatgtggttcatttagagcggtactggaacccagctaaagaagctcaagct

SEQ ID NO: 9341 - DNA, 2121 bp, Vibrio cholerae HC-62A1; identical to SEQ ID NO: 9137

SEQ ID NO: 9342 - DNA, 735 bp, Vibrio cholerae HC-62A1; identical to SEQ ID NO: 9108

SEQ ID NO: 9343 - DNA, 1452 bp, Vibrio cholerae HC-62A1; identical to SEQ ID NO: 9109

SEQ ID NO: 9344 - DNA, 3450 bp, Vibrio cholerae HC-62A1; identical to SEQ ID NO: 9118

SEQ ID NO: 9345 - DNA, 2121 bp, Vibrio cholerae HC-77A1; identical to SEQ ID NO: 9137

SEQ ID NO: 9346 - DNA, 735 bp, Vibrio cholerae HC-77A1; identical to SEQ ID NO: 9108

SEQ ID NO: 9347 - DNA, 1452 bp, Vibrio cholerae HC-77A1; identical to SEQ ID NO: 9109

SEQ ID NO: 9348 - DNA, 3450 bp, Vibrio cholerae HC-77A1; identical to SEQ ID NO: 9118

SEQ ID NO: 9349 - DNA, 2121 bp, Vibrio cholerae HC-37A1; identical to SEQ ID NO: 9137

SEQ ID NO: 9350 - DNA, 735 bp, Vibrio cholerae HC-37A1; identical to SEQ ID NO: 9108

SEQ ID NO: 9351 - DNA, 1452 bp, Vibrio cholerae HC-37A1; identical to SEQ ID NO: 9109

SEQ ID NO: 9352 - DNA, 3450 bp, Vibrio cholerae HC-37A1; identical to SEQ ID NO: 9118

SEQ ID NO: 9353 - DNA, 2121 bp, Vibrio cholerae HC-62B1; identical to SEQ ID NO: 9137

SEQ ID NO: 9354 - DNA, 735 bp, Vibrio cholerae HC-62B1; identical to SEQ ID NO: 9108

SEQ ID NO: 9355 - DNA, 1452 bp, Vibrio cholerae HC-62B1; identical to SEQ ID NO: 9109

SEQ ID NO: 9356 - DNA, 3450 bp, Vibrio cholerae HC-62B1; identical to SEQ ID NO: 9118

SEQ ID NO: 9357 - DNA, 2064 bp, Vibrio cholerae HC-17A2; identical to SEQ ID NO: 9173

SEQ ID NO: 9358 - DNA, 735 bp, Vibrio cholerae HC-17A2; identical to SEQ ID NO: 9108

SEQ ID NO: 9359 - DNA, 1452 bp, Vibrio cholerae HC-17A2; identical to SEQ ID NO: 9109

SEQ ID NO: 9360 - DNA, 3450 bp, Vibrio cholerae HC-17A2; identical to SEQ ID NO: 9118

SEQ ID NO: 9361 - DNA, 2064 bp, Vibrio cholerae HC-69A1; identical to SEQ ID NO: 9173

SEQ ID NO: 9362 - DNA, 735 bp, Vibrio cholerae HC-69A1; identical to SEQ ID NO: 9108

SEQ ID NO: 9363 - DNA, 1452 bp, Vibrio cholerae HC-69A1; identical to SEQ ID NO: 9109

SEQ ID NO: 9364 - DNA, 3450 bp, Vibrio cholerae HC-69A1; identical to SEQ ID NO: 9118

SEQ ID NO: 9365 - DNA, 2064 bp, Vibrio cholerae HC-7A1; identical to SEQ ID NO: 9173

SEQ ID NO: 9366 - DNA, 657 bp, Vibrio cholerae HC-7A1; identical to SEQ ID NO: 9218

SEQ ID NO: 9367 - DNA, 1356 bp, Vibrio cholerae HC-7A1; identical to SEQ ID NO: 9267

SEQ ID NO: 9368 - DNA, 3450 bp, Vibrio cholerae HC-7A1; identical to SEQ ID NO: 9118

SEQ ID NO: 9369 - DNA, 2121 bp, Vibrio cholerae HC-81A1; identical to SEQ ID NO: 9137

SEQ ID NO: 9370 - DNA, 735 bp, Vibrio cholerae HC-81A1; identical to SEQ ID NO: 9108

SEQ ID NO: 9371 - DNA, 1452 bp, Vibrio cholerae HC-81A1; identical to SEQ ID NO: 9109

SEQ ID NO: 9372 - DNA, 3450 bp, Vibrio cholerae HC-81A1; identical to SEQ ID NO: 9118

SEQ ID NO: 9373 - DNA, 2121 bp, Vibrio cholerae HC-64A1; identical to SEQ ID NO: 9137

SEQ ID NO: 9374 - DNA, 735 bp, Vibrio cholerae HC-64A1; identical to SEQ ID NO: 9108

SEQ ID NO: 9375 - DNA, 1452 bp, Vibrio cholerae HC-64A1; identical to SEQ ID NO: 9109

SEQ ID NO: 9376 - DNA, 3450 bp, Vibrio cholerae HC-64A1; identical to SEQ ID NO: 9118

SEQ ID NO: 9377 - DNA, 2064 bp, Vibrio cholerae HC-65A1; identical to SEQ ID NO: 9173

SEQ ID NO: 9378 - DNA, 735 bp, Vibrio cholerae HC-65A1; identical to SEQ ID NO: 9108

SEQ ID NO: 9379 - DNA, 1452 bp, Vibrio cholerae HC-65A1; identical to SEQ ID NO: 9109

SEQ ID NO: 9380 - DNA, 3450 bp, Vibrio cholerae HC-65A1; identical to SEQ ID NO: 9118

SEQ ID NO: 9381 - DNA, 2121 bp, Vibrio cholerae HC-67A1; identical to SEQ ID NO: 9137

SEQ ID NO: 9382 - DNA, 735 bp, Vibrio cholerae HC-67A1; identical to SEQ ID NO: 9108

SEQ ID NO: 9383 - DNA, 1452 bp, Vibrio cholerae HC-67A1; identical to SEQ ID NO: 9109

SEQ ID NO: 9384 - DNA, 3450 bp, Vibrio cholerae HC-67A1; identical to SEQ ID NO: 9118

SEQ ID NO: 9385 - DNA, 2121 bp, Vibrio cholerae HC-68A1; identical to SEQ ID NO: 9137

SEQ ID NO: 9386 - DNA, 735 bp, Vibrio cholerae HC-68A1; identical to SEQ ID NO: 9108

SEQ ID NO: 9387 - DNA, 1452 bp, Vibrio cholerae HC-68A1; identical to SEQ ID NO: 9109

SEQ ID NO: 9388 - DNA, 3450 bp, Vibrio cholerae HC-68A1; identical to SEQ ID NO: 9118

SEQ ID NO: 9389 - DNA, 2121 bp, Vibrio cholerae HC-71A1; identical to SEQ ID NO: 9137

SEQ ID NO: 9390 - DNA, 735 bp, Vibrio cholerae HC-71A1; identical to SEQ ID NO: 9108

SEQ ID NO: 9391 - DNA, 1452 bp, Vibrio cholerae HC-71A1; identical to SEQ ID NO: 9109

SEQ ID NO: 9392 - DNA, 3450 bp, Vibrio cholerae HC-71A1; identical to SEQ ID NO: 9118

SEQ ID NO: 9393 - DNA, 2064 bp, Vibrio cholerae HC-72A2; identical to SEQ ID NO: 9173

SEQ ID NO: 9394 - DNA, 735 bp, Vibrio cholerae HC-72A2; identical to SEQ ID NO: 9108

SEQ ID NO: 9395 - DNA, 1452 bp, Vibrio cholerae HC-72A2; identical to SEQ ID NO: 9109

SEQ ID NO: 9396 - DNA, 3450 bp, Vibrio cholerae HC-72A2; identical to SEQ ID NO: 9118

SEQ ID NO: 9397 - DNA, 2121 bp, Vibrio cholerae HC-80A1; identical to SEQ ID NO: 9137

SEQ ID NO: 9398 - DNA, 735 bp, Vibrio cholerae HC-80A1; identical to SEQ ID NO: 9108

SEQ ID NO: 9399 - DNA, 1452 bp, Vibrio cholerae HC-80A1; identical to SEQ ID NO: 9109

SEQ ID NO: 9400 - DNA, 3450 bp, Vibrio cholerae HC-80A1; identical to SEQ ID NO: 9118

SEQ ID NO: 9401 - DNA, 2121 bp, Vibrio cholerae O1 str. Inaba G4222; identical to SEQ ID NO: 9107

SEQ ID NO: 9402 - DNA, 735 bp, Vibrio cholerae O1 str. Inaba G4222; identical to SEQ ID NO: 9108

SEQ ID NO: 9403 - DNA, 1452 bp, Vibrio cholerae O1 str. Inaba G4222; identical to SEQ ID NO: 9109

SEQ ID NO: 9404 - DNA, 3450 bp, Vibrio cholerae O1 str. Inaba G4222; identical to SEQ ID NO: 9118

SEQ ID NO: 9405 - DNA, 2121 bp, Vibrio cholerae O1 str. 116059; identical to SEQ ID NO: 9107

SEQ ID NO: 9406 - DNA, 735 bp, Vibrio cholerae O1 str. 116059; identical to SEQ ID NO: 9108

SEQ ID NO: 9407 - DNA, 1452 bp, Vibrio cholerae O1 str. 116059; identical to SEQ ID NO: 9109

SEQ ID NO: 9408 - DNA, 3450 bp, Vibrio cholerae O1 str. 116059; identical to SEQ ID NO: 9118

SEQ ID NO: 9409 - DNA, 2064 bp, Vibrio cholerae O1 str. 95412; identical to SEQ ID NO: 9169

SEQ ID NO: 9410 - DNA, 735 bp, Vibrio cholerae O1 str. 95412; identical to SEQ ID NO: 9108

SEQ ID NO: 9411 - DNA, 1452 bp, Vibrio cholerae O1 str. 95412; identical to SEQ ID NO: 9113

SEQ ID NO: 9412 - DNA, 3441 bp, Vibrio cholerae O1 str. 95412; identical to SEQ ID NO: 9114

SEQ ID NO: 9413 - DNA, 2121 bp, Vibrio cholerae O1 str. AG-7404; identical to SEQ ID NO: 9107

SEQ ID NO: 9414 - DNA, 735 bp, Vibrio cholerae O1 str. AG-7404; identical to SEQ ID NO: 9108

SEQ ID NO: 9415 - DNA, 1452 bp, Vibrio cholerae O1 str. AG-7404; identical to SEQ ID NO: 9109

SEQ ID NO: 9416 - DNA, 3450 bp, Vibrio cholerae O1 str. AG-7404; identical to SEQ ID NO: 9118

SEQ ID NO: 9417 - DNA, 2121 bp, Vibrio cholerae O1 str. AG-8040; identical to SEQ ID NO: 9107

SEQ ID NO: 9418 - DNA, 735 bp, Vibrio cholerae O1 str. AG-8040; identical to SEQ ID NO: 9108

SEQ ID NO: 9419 - DNA, 1452 bp, Vibrio cholerae O1 str. AG-8040; identical to SEQ ID NO: 9109

SEQ ID NO: 9420 - DNA, 3450 bp, Vibrio cholerae O1 str. AG-8040; identical to SEQ ID NO: 9118

SEQ ID NO: 9421 - DNA, 2064 bp, Vibrio cholerae O1 str. EC-0009; identical to SEQ ID NO: 9173

SEQ ID NO: 9422 - DNA, 735 bp, Vibrio cholerae O1 str. EC-0009; identical to SEQ ID NO: 9108

SEQ ID NO: 9423 - DNA, 1452 bp, Vibrio cholerae O1 str. EC-0009; identical to SEQ ID NO: 9109

SEQ ID NO: 9424 - DNA, 3450 bp, Vibrio cholerae O1 str. EC-0009; identical to SEQ ID NO: 9118

SEQ ID NO: 9425 - DNA, 2064 bp, Vibrio cholerae O1 str. EC-0012; identical to SEQ ID NO: 9173

SEQ ID NO: 9426 - DNA, 735 bp, Vibrio cholerae O1 str. EC-0012; identical to SEQ ID NO: 9108

SEQ ID NO: 9427 - DNA, 1452 bp, Vibrio cholerae O1 str. EC-0012; identical to SEQ ID NO: 9109

SEQ ID NO: 9428 - DNA, 3450 bp, Vibrio cholerae O1 str. EC-0012; identical to SEQ ID NO: 9118

SEQ ID NO: 9429 - DNA, 2121 bp, Vibrio cholerae O1 str. EC-0027; identical to SEQ ID NO: 9137

SEQ ID NO: 9430 - DNA, 735 bp, Vibrio cholerae O1 str. EC-0027; identical to SEQ ID NO: 9108

SEQ ID NO: 9431 - DNA, 1452 bp, Vibrio cholerae O1 str. EC-0027; identical to SEQ ID NO: 9109

SEQ ID NO: 9432 - DNA, 3450 bp, Vibrio cholerae O1 str. EC-0027; identical to SEQ ID NO: 9118

SEQ ID NO: 9433 - DNA, 2064 bp, Vibrio cholerae O1 str. EC-0051; identical to SEQ ID NO: 9169

SEQ ID NO: 9434 - DNA, 735 bp, Vibrio cholerae O1 str. EC-0051; identical to SEQ ID NO: 9108

SEQ ID NO: 9435 - DNA, 1452 bp, Vibrio cholerae O1 str. EC-0051; identical to SEQ ID NO: 9109

SEQ ID NO: 9436 - DNA, 3450 bp, Vibrio cholerae O1 str. EC-0051; identical to SEQ ID NO: 9118

SEQ ID NO: 9437 - DNA, 2121 bp, Vibrio cholerae O1 str. EDC-020; identical to SEQ ID NO: 9137

SEQ ID NO: 9438 - DNA, 735 bp, Vibrio cholerae O1 str. EDC-020; identical to SEQ ID NO: 9108

SEQ ID NO: 9439 - DNA, 1452 bp, Vibrio cholerae O1 str. EDC-020; identical to SEQ ID NO: 9109

SEQ ID NO: 9440 - DNA, 3450 bp, Vibrio cholerae O1 str. EDC-020; identical to SEQ ID NO: 9118

SEQ ID NO: 9441 - DNA, 2121 bp, Vibrio cholerae O1 str. EDC-022; identical to SEQ ID NO: 9107

SEQ ID NO: 9442 - DNA, 735 bp, Vibrio cholerae O1 str. EDC-022; identical to SEQ ID NO: 9108

SEQ ID NO: 9443 - DNA, 1452 bp, Vibrio cholerae O1 str. EDC-022; identical to SEQ ID NO: 9109

SEQ ID NO: 9444 - DNA, 3450 bp, Vibrio cholerae O1 str. EDC-022; identical to SEQ ID NO: 9118

SEQ ID NO: 9445 - DNA, 2121 bp, Vibrio cholerae O1 str. EM-1536; identical to SEQ ID NO: 9107

SEQ ID NO: 9446 - DNA, 735 bp, Vibrio cholerae O1 str. EM-1536; identical to SEQ ID NO: 9108

SEQ ID NO: 9447 - DNA, 1452 bp, Vibrio cholerae O1 str. EM-1536; identical to SEQ ID NO: 9109

SEQ ID NO: 9448 - DNA, 3450 bp, Vibrio cholerae O1 str. EM-1536; identical to SEQ ID NO: 9118

SEQ ID NO: 9449 - DNA, 2121 bp, Vibrio cholerae O1 str. EM-1546; identical to SEQ ID NO: 9137

SEQ ID NO: 9450 - DNA, 735 bp, Vibrio cholerae O1 str. EM-1546; identical to SEQ ID NO: 9108

SEQ ID NO: 9451 - DNA, 1452 bp, Vibrio cholerae O1 str. EM-1546; identical to SEQ ID NO: 9109

SEQ ID NO: 9452 - DNA, 3450 bp, Vibrio cholerae O1 str. EM-1546; identical to SEQ ID NO: 9118

SEQ ID NO: 9453 - DNA, 2121 bp, Vibrio cholerae O1 str. EM-1626; identical to SEQ ID NO: 9107

SEQ ID NO: 9454 - DNA, 657 bp, Vibrio cholerae O1 str. EM-1626; identical to SEQ ID NO: 9218

SEQ ID NO: 9455 - DNA, 1452 bp, Vibrio cholerae O1 str. EM-1626; identical to SEQ ID NO: 9109

SEQ ID NO: 9456 - DNA, 3450 bp, Vibrio cholerae O1 str. EM-1626; identical to SEQ ID NO: 9118

SEQ ID NO: 9457 - DNA, 2121 bp, Vibrio cholerae O1 str. EM-1727; identical to SEQ ID NO: 9107

SEQ ID NO: 9458 - DNA, 735 bp, Vibrio cholerae O1 str. EM-1727; identical to SEQ ID NO: 9108

SEQ ID NO: 9459 - DNA, 1452 bp, Vibrio cholerae O1 str. EM-1727; identical to SEQ ID NO: 9109

SEQ ID NO: 9460 - DNA, 3450 bp, Vibrio cholerae O1 str. EM-1727; identical to SEQ ID NO: 9118

SEQ ID NO: 9461 - DNA, 2121 bp, Vibrio cholerae O1 str. NHCC-004A; identical to SEQ ID NO: 9137

SEQ ID NO: 9462 - DNA, 735 bp, Vibrio cholerae O1 str. NHCC-004A; identical to SEQ ID NO: 9108

SEQ ID NO: 9463 - DNA, 1452 bp, Vibrio cholerae O1 str. NHCC-004A; identical to SEQ ID NO: 9109

SEQ ID NO: 9464 - DNA, 3450 bp, Vibrio cholerae O1 str. NHCC-004A; identical to SEQ ID NO: 9118

SEQ ID NO: 9465 - DNA, 2064 bp, Vibrio cholerae O1 str. NHCC-006C; identical to SEQ ID NO: 9173

SEQ ID NO: 9466 - DNA, 735 bp, Vibrio cholerae O1 str. NHCC-006C; identical to SEQ ID NO: 9108

SEQ ID NO: 9467 - DNA, 1452 bp, Vibrio cholerae O1 str. NHCC-006C; identical to SEQ ID NO: 9109

SEQ ID NO: 9468 - DNA, 3450 bp, Vibrio cholerae O1 str. NHCC-006C; identical to SEQ ID NO: 9118

SEQ ID NO: 9469 - DNA, 2064 bp, Vibrio cholerae O1 str. NHCC-010F; identical to SEQ ID NO: 9173

SEQ ID NO: 9470 - DNA, 735 bp, Vibrio cholerae O1 str. NHCC-010F; identical to SEQ ID NO: 9108

SEQ ID NO: 9471 - DNA, 1452 bp, Vibrio cholerae O1 str. NHCC-010F; identical to SEQ ID NO: 9109

SEQ ID NO: 9472 - DNA, 3450 bp, Vibrio cholerae O1 str. NHCC-010F; identical to SEQ ID NO: 9118

SEQ ID NO: 9473 - DNA, 2064 bp, Vibrio cholerae O1 str. Nep-21106; identical to SEQ ID NO: 9169

SEQ ID NO: 9474 - DNA, 735 bp, Vibrio cholerae O1 str. Nep-21106; identical to SEQ ID NO: 9108

SEQ ID NO: 9475 - DNA, 1452 bp, Vibrio cholerae O1 str. Nep-21106; identical to SEQ ID NO: 9109

SEQ ID NO: 9476 - DNA, 3450 bp, Vibrio cholerae O1 str. Nep-21106; identical to SEQ ID NO: 9118

SEQ ID NO: 9477 - DNA, 2121 bp, Vibrio cholerae O1 str. Nep-21113; identical to SEQ ID NO: 9107

SEQ ID NO: 9478 - DNA, 735 bp, Vibrio cholerae O1 str. Nep-21113; identical to SEQ ID NO: 9108

SEQ ID NO: 9479 - DNA, 1452 bp, Vibrio cholerae O1 str. Nep-21113; identical to SEQ ID NO: 9109

SEQ ID NO: 9480 - DNA, 3450 bp, Vibrio cholerae O1 str. Nep-21113; identical to SEQ ID NO: 9118

SEQ ID NO: 9481 - DNA, 2121 bp, Vibrio cholerae O1 str. PCS-023; identical to SEQ ID NO: 9137

SEQ ID NO: 9482 - DNA, 735 bp, Vibrio cholerae O1 str. PCS-023; identical to SEQ ID NO: 9108

SEQ ID NO: 9483 - DNA, 1452 bp, Vibrio cholerae O1 str. PCS-023; identical to SEQ ID NO: 9109

SEQ ID NO: 9484 - DNA, 3450 bp, Vibrio cholerae O1 str. PCS-023; identical to SEQ ID NO: 9118

SEQ ID NO: 9485 - DNA, 2121 bp, Vibrio cholerae O1 str. PCS-022; identical to SEQ ID NO: 9107

SEQ ID NO: 9486 - DNA, 735 bp, Vibrio cholerae O1 str. PCS-022; identical to SEQ ID NO: 9108

SEQ ID NO: 9487 - DNA, 1452 bp, Vibrio cholerae O1 str. PCS-022; identical to SEQ ID NO: 9109

SEQ ID NO: 9488 - DNA, 3450 bp, Vibrio cholerae O1 str. PCS-022; identical to SEQ ID NO: 9118

SEQ ID NO: 9489 - DNA, 2121 bp, Vibrio cholerae O1 biovar El Tor; identical to SEQ ID NO: 9107

SEQ ID NO: 9490 - DNA, 735 bp, Vibrio cholerae O1 biovar El Tor; identical to SEQ ID NO: 9108

SEQ ID NO: 9491 - DNA, 1452 bp, Vibrio cholerae O1 biovar El Tor; identical to SEQ ID NO: 9109

SEQ ID NO: 9492 - DNA, 3450 bp, Vibrio cholerae O1 biovar El Tor; identical to SEQ ID NO: 9118

SEQ ID NO: 9493 - DNA, 2121 bp, Vibrio cholerae 2012EL-1759; identical to SEQ ID NO: 9107

SEQ ID NO: 9494 - DNA, 735 bp, Vibrio cholerae 2012EL-1759; identical to SEQ ID NO: 9108

SEQ ID NO: 9495 - DNA, 1452 bp, Vibrio cholerae 2012EL-1759; identical to SEQ ID NO: 9117

SEQ ID NO: 9496 - DNA, 2121 bp, Vibrio cholerae O1 biovar El Tor; identical to SEQ ID NO: 9137

SEQ ID NO: 9497 - DNA, 735 bp, Vibrio cholerae O1 biovar El Tor; identical to SEQ ID NO: 9108

SEQ ID NO: 9498 - DNA, 1452 bp, Vibrio cholerae O1 biovar El Tor; identical to SEQ ID NO: 9109

SEQ ID NO: 9499 - DNA, 3450 bp, Vibrio cholerae O1 biovar El Tor; identical to SEQ ID NO: 9118

SEQ ID NO: 9500 - DNA, 2121 bp, Vibrio cholerae O1 biovar El Tor; identical to SEQ ID NO: 9137

SEQ ID NO: 9501 - DNA, 735 bp, Vibrio cholerae O1 biovar El Tor; identical to SEQ ID NO: 9108

SEQ ID NO: 9502 - DNA, 1452 bp, Vibrio cholerae O1 biovar El Tor; identical to SEQ ID NO: 9109

SEQ ID NO: 9503 - DNA, 3450 bp, Vibrio cholerae O1 biovar El Tor; identical to SEQ ID NO: 9118

SEQ ID NO: 9504 - DNA, 1710 bp, Vibrio cholerae
atgattgcggcggttccaggctttttaacggctctgggtgttattggtacttttgtcggtttacagctaggactttcagatctcaatatcgcgggcaacgttgatgtcaatgaaatgaaaaatggcgttgctggagttataaatggtgcaaaaatcgcatttatgacatcggtttggggcgtgctactcagtgttgcatttaatttcattgagaagatacttgagcaaattattagaaagaaaattaagtctttgcaaaaccgtattgacaggatgttccctcgattaagtgcggaatatcaactgcaatctattgcaaataacagccagcaatctcgagaaagcctacaaggacttgctgagaaaataggcgagaaaatgcaggagtcactcattcaggcaactcagggtattcaacaaggtctcgagagtagtctggaaaaaatcatggctccggctatcaataagctcgttgacgaaacatctgacgggaatcaaaaagcactggaaagcgttcttcaatctttcatggagggttttggtcaacaaggcgaacaacaacgtgtcgcgatggactctgcgtctcaaaacgtaaataagacgctagaatcaatgagcgtttcgatggctgctttcgtcaataagttggaagttcagcaaaacgcatcttcagaaagagagaaagaactgatctcaactatttcagttcaagtttctgagctagttactcagggtaatgagcagaagcgtgttctaacagagtttgtagaaaaacaagtctcagagttaggtgagcagcttactaaaagagaattagctgcttctgaacgtgaacagaaattggcttcctcaatggaaagtacgattaaagatttagtagaaaatgtttcagcacaaagccaagtcttgaccgattttgttcagaatcaagttgtccaacttacccaaacgttctccgaacgagatggaatggcaagtcagatggaaaaagagcgtaatgatatatttgtgaatcaaacgcaggcgatgaaagctggaacggatgagcttcttgctcaagtgaaagcggcgactgaatcacaacaaatcacatctaatagtattattgagcaaggtaaacaattacaaaatagtatcgattcatctgtttcggcatctgctcgagctacggagagtatgcagcagtcggcgaatgagttacgagttgccgctgatagtatgaatgtgtttggttccaacatcaaagatgcgggcaacaaactatctggtgctgttactgaagcggttaacagtacgaaggatttagcggaacaaaaccatctaggcgcagtgaaagttcaagcgttgagggagcagttgctggaagatacaagtaagtttagcgcgattgcagatcagataaacaatatgctgattagtgcagaacagtcgtttagcacgcttcgcactacccaaaatgagttccttgtagaacaaaaaggtaatctaaacgaactcacttcagaaatgaaacgtaatgtgaaagagttgacggagcaaatggctcaactgcttgaagattacgcagagcaagccaacggacaaaccgccgagcacctcaaagtttgggccaatagtagcatacaatatgcagagagcatgaatacagcagttagagctatttctagtgttgtcgatgaaattcaagataaagtgagccaacatgcgtag

SEQ ID NO: 9505 - DNA, 735 bp, Vibrio cholerae
atgcgtagaggtgttcgttcgcatacacaaaactcagtagatgaagaaaatccctactgggtttcattttccgatctaatgtctgctttgcttgttatatttatacttgcagctgttgctctgattattgaattaactcaaaagaccaatgatgtcgaagctggtattgaagagcttaagcaagctgagttagcaagaaagaatataatttatgatgttcgagacgaactggctaaaagaaacgtaattgttgaaattgctgataacgatacggtaattcggattccagaaagcacactgacgtttgcatcaggtaaatcatcaattccgaacgatgcaacaatacagcaagcagttaaggacataggtgttgttcttcattctgcaattcagaagaaagaccgatttcaatatctcgataccatttttattgaggggcataccgatagcgatagtatccattacagaggaaaagggaattgggggttatctactgatcgagcaatatctgtctggaatgtctggcaaaatgaactgagcttaacgcctaaactcggtgacttagaaaatgcttatcatgcaaagctgttctctgttagtggttatgcggcgacaagacgtgccaatctacatgagtcgaatcagcaagaaaagagccagaataggcgcattgatattcgatttacagttaagaaaccatctattgctgagctcgagaggattgttggaccgtga

SEQ ID NO: 9506 - DNA, 1452 bp, Vibrio cholerae
gtgagtctaaatataaaaaagctcaaagttagtttgcctgctaatccttttggtcaagccatcaaggactttgcacatctatcgagtcagctagaagtgctttctaagagtgccggtattgaaaacaataagttccgaactgcatatggagaagtatgtaatgcgcttgcctctaagaaaagagttgaggacgttatagatagctctgtacacgttcgcgccttagctctttcgctacatacggatgcgaagaaaaatgtcagctttacgcgcagattgcttaataaaattacaaaaattgtaaaaaaaccaagctctttagtcatagagtcgttttatcagcatttcttatcagagtatgaccgactggcagacttggaagctacagcagactggttgttggtggctaaaaggctgcgaggcaatgatgagcagtttgatgaaaatatattgtcaaccaatggccccaagtggcttgcggaaagggctattcaaaataatgtcgattttgatcatttaattgcggagatgaagctggaacgttatgcaaatggcagatatttaacggcggctaaaggcatctactatattgagcagttaaacactataccattaggccaagatcatcctctcctagaggaggttcaaaaaacggtggtttttgattctcgatatgactctgaaagtttgttagggcatcaaattcttagaattttgattggccgatcgataggttctcacatcagtgagccttggatgaatgtgatcttagcaattggcggtgacccacgagtaccaagttcaaatccaagatatattaagtggtggaagagtttagaaccaaatctggttcaagctgttcgcggatggttatcaaaactagacttgaagttgtttctggaagcgttggaggattattcttactcttcagctaattacgagctacagagaatgtacccatctaggaaaagtttcttagaggggatgttcgatgcgggggttatttcaaatacccggctttatttgagtctggatgctgcaaggtatttgaagagaaattatgaccctaagcacttgccaaatttctctactgttaaagatggtgacaaatcgataatttatgtgcaaatgaacggtgctcacatggttgaggggagccatagttgttatttgtggttgtaccggtatcttgacccttccgtttgtgtttttaactataacattgatagtcctacgtactcacaactcacaatcggtataaacaatcaaatgtcaagattgtcatctggtgcagttgctaaaataacgcactctccgagtggttacgcatggcaacgaaaagcacttatagcactaagagagttaggtgttaaattgacgccgaaagatgtgctttcgaatgaagattatattgattttaaacaacgttatggggtgcgagagtggagttaa

SEQ ID NO: 9507 - DNA, 1710 bp, Vibrio cholerae; identical to SEQ ID NO: 9504

SEQ ID NO: 9508 - DNA, 735 bp, Vibrio cholerae; identical to SEQ ID NO: 9505

SEQ ID NO: 9509 - DNA, 1452 bp, Vibrio cholerae; identical to SEQ ID NO: 9506

SEQ ID NO: 9510 - DNA, 2064 bp, Vibrio cholerae; identical to SEQ ID NO: 9169

SEQ ID NO: 9511 - DNA, 735 bp, Vibrio cholerae; identical to SEQ ID NO: 9108

SEQ ID NO: 9512 - DNA, 1452 bp, Vibrio cholerae; identical to SEQ ID NO: 9109

SEQ ID NO: 9513 - DNA, 3450 bp, Vibrio cholerae; identical to SEQ ID NO: 9118

SEQ ID NO: 9514 - DNA, 2064 bp, Vibrio cholerae; identical to SEQ ID NO: 9169

SEQ ID NO: 9515 - DNA, 735 bp, Vibrio cholerae; identical to SEQ ID NO: 9108

SEQ ID NO: 9516 - DNA, 1452 bp, Vibrio cholerae; identical to SEQ ID NO: 9117

SEQ ID NO: 9517 - DNA, 3450 bp, Vibrio cholerae; identical to SEQ ID NO: 9118

SEQ ID NO: 9518 - DNA, 2121 bp, Vibrio cholerae O1 biovar El Tor; identical to SEQ ID NO: 9107

SEQ ID NO: 9519 - DNA, 735 bp, Vibrio cholerae O1 biovar El Tor; identical to SEQ ID NO: 9108

SEQ ID NO: 9520 - DNA, 1452 bp, Vibrio cholerae O1 biovar El Tor; identical to SEQ ID NO: 9117

SEQ ID NO: 9521 - DNA, 3450 bp, Vibrio cholerae O1 biovar El Tor; identical to SEQ ID NO: 9118

SEQ ID NO: 9522 - DNA, 2121 bp, Vibrio cholerae; identical to SEQ ID NO: 9137

SEQ ID NO: 9523 - DNA, 735 bp, Vibrio cholerae; identical to SEQ ID NO: 9108

SEQ ID NO: 9524 - DNA, 1452 bp, Vibrio cholerae; identical to SEQ ID NO: 9109

SEQ ID NO: 9525 - DNA, 3450 bp, Vibrio cholerae; identical to SEQ ID NO: 9118

SEQ ID NO: 9526 - DNA, 2121 bp, Vibrio cholerae; identical to SEQ ID NO: 9137

SEQ ID NO: 9527 - DNA, 735 bp, Vibrio cholerae; identical to SEQ ID NO: 9108

SEQ ID NO: 9528 - DNA, 1452 bp, Vibrio cholerae; identical to SEQ ID NO: 9109

SEQ ID NO: 9529 - DNA, 3450 bp, Vibrio cholerae; identical to SEQ ID NO: 9118

SEQ ID NO: 9530 - DNA, 2121 bp, Vibrio cholerae; identical to SEQ ID NO: 9137

SEQ ID NO: 9531 - DNA, 735 bp, Vibrio cholerae; identical to SEQ ID NO: 9108

SEQ ID NO: 9532 - DNA, 1452 bp, Vibrio cholerae; identical to SEQ ID NO: 9109

SEQ ID NO: 9533 - DNA, 3450 bp, Vibrio cholerae; identical to SEQ ID NO: 9118

SEQ ID NO: 9534 - DNA, 2121 bp, Vibrio cholerae MS6; identical to SEQ ID NO: 9107

SEQ ID NO: 9535 - DNA, 735 bp, Vibrio cholerae MS6; identical to SEQ ID NO: 9108

SEQ ID NO: 9536 - DNA, 1452 bp, Vibrio cholerae MS6; identical to SEQ ID NO: 9117

SEQ ID NO: 9537 - DNA, 3450 bp, Vibrio cholerae MS6; identical to SEQ ID NO: 9118

SEQ ID NO: 9538 - DNA, 2121 bp, Vibrio cholerae O1 biovar El Tor; identical to SEQ ID NO: 9107

SEQ ID NO: 9539 - DNA, 735 bp, Vibrio cholerae O1 biovar El Tor; identical to SEQ ID NO: 9108

SEQ ID NO: 9540 - DNA, 1452 bp, Vibrio cholerae O1 biovar El Tor; identical to SEQ ID NO: 9117

SEQ ID NO: 9541 - DNA, 3450 bp, Vibrio cholerae O1 biovar El Tor; identical to SEQ ID NO: 9118

SEQ ID NO: 9542 - DNA, 2121 bp, Vibrio cholerae; identical to SEQ ID NO: 9137

SEQ ID NO: 9543 - DNA, 735 bp, Vibrio cholerae; identical to SEQ ID NO: 9108

SEQ ID NO: 9544 - DNA, 1452 bp, Vibrio cholerae; identical to SEQ ID NO: 9109

SEQ ID NO: 9545 - DNA, 3450 bp, Vibrio cholerae; identical to SEQ ID NO: 9118

SEQ ID NO: 9546 - DNA, 2121 bp, Vibrio cholerae; identical to SEQ ID NO: 9137

SEQ ID NO: 9547 - DNA, 735 bp, Vibrio cholerae; identical to SEQ ID NO: 9108

SEQ ID NO: 9548 - DNA, 1452 bp, Vibrio cholerae; identical to SEQ ID NO: 9109

SEQ ID NO: 9549 - DNA, 3450 bp, Vibrio cholerae; identical to SEQ ID NO: 9118

SEQ ID NO: 9550 - DNA, 2121 bp, Vibrio cholerae O1 biovar El Tor; identical to SEQ ID NO: 9137

SEQ ID NO: 9551 - DNA, 735 bp, Vibrio cholerae O1 biovar El Tor; identical to SEQ ID NO: 9108

SEQ ID NO: 9552 - DNA, 1452 bp, Vibrio cholerae O1 biovar El Tor; identical to SEQ ID NO: 9109

SEQ ID NO: 9553 - DNA, 3450 bp, Vibrio cholerae O1 biovar El Tor; identical to SEQ ID NO: 9118

SEQ ID NO: 9554 - DNA, 2121 bp, Vibrio cholerae; identical to SEQ ID NO: 9111

SEQ ID NO: 9555 - DNA, 735 bp, Vibrio cholerae; identical to SEQ ID NO: 9108

SEQ ID NO: 9556 - DNA, 1452 bp, Vibrio cholerae; identical to SEQ ID NO: 9113

SEQ ID NO: 9557 - DNA, 3441 bp, Vibrio cholerae; identical to SEQ ID NO: 9114

SEQ ID NO: 9558 - DNA, 2121 bp, Vibrio cholerae O1 biovar El Tor; identical to SEQ ID NO: 9137

SEQ ID NO: 9559 - DNA, 735 bp, Vibrio cholerae O1 biovar El Tor; identical to SEQ ID NO: 9108

SEQ ID NO: 9560 - DNA, 1452 bp, Vibrio cholerae O1 biovar El Tor; identical to SEQ ID NO: 9109

SEQ ID NO: 9561 - DNA, 3450 bp, Vibrio cholerae O1 biovar El Tor; identical to SEQ ID NO: 9118

SEQ ID NO: 9562 - DNA, 2121 bp, Vibrio cholerae O1 biovar El Tor; identical to SEQ ID NO: 9107

SEQ ID NO: 9563 - DNA, 735 bp, Vibrio cholerae O1 biovar El Tor; identical to SEQ ID NO: 9108

SEQ ID NO: 9564 - DNA, 1452 bp, Vibrio cholerae O1 biovar El Tor; identical to SEQ ID NO: 9109

SEQ ID NO: 9565 - DNA, 3450 bp, Vibrio cholerae O1 biovar El Tor; identical to SEQ ID NO: 9118

SEQ ID NO: 9566 - DNA, 2121 bp, Vibrio cholerae; identical to SEQ ID NO: 9107

SEQ ID NO: 9567 - DNA, 735 bp, Vibrio cholerae; identical to SEQ ID NO: 9108

SEQ ID NO: 9568 - DNA, 1452 bp, Vibrio cholerae; identical to SEQ ID NO: 9109

SEQ ID NO: 9569 - DNA, 3450 bp, Vibrio cholerae; identical to SEQ ID NO: 9118

SEQ ID NO: 9570 - DNA, 2064 bp, Vibrio cholerae; identical to SEQ ID NO: 9169

SEQ ID NO: 9571 - DNA, 657 bp, Vibrio cholerae; identical to SEQ ID NO: 9218

SEQ ID NO: 9572 - DNA, 1452 bp, Vibrio cholerae; identical to SEQ ID NO: 9109

SEQ ID NO: 9573 - DNA, 3450 bp, Vibrio cholerae; identical to SEQ ID NO: 9118

SEQ ID NO: 9574 - DNA, 2121 bp, Vibrio cholerae; identical to SEQ ID NO: 9107

SEQ ID NO: 9575 - DNA, 735 bp, Vibrio cholerae; identical to SEQ ID NO: 9108

SEQ ID NO: 9576 - DNA, 1419 bp, Vibrio cholerae; identical to SEQ ID NO: 9227

SEQ ID NO: 9577 - DNA, 3450 bp, Vibrio cholerae; identical to SEQ ID NO: 9118

SEQ ID NO: 9578 - DNA, 2121 bp, Vibrio cholerae; identical to SEQ ID NO: 9107

SEQ ID NO: 9579 - DNA, 657 bp, Vibrio cholerae; identical to SEQ ID NO: 9218

SEQ ID NO: 9580 - DNA, 1419 bp, Vibrio cholerae; identical to SEQ ID NO: 9227

SEQ ID NO: 9581 - DNA, 3450 bp, Vibrio cholerae; identical to SEQ ID NO: 9118

SEQ ID NO: 9582 - DNA, 2121 bp, Vibrio cholerae; identical to SEQ ID NO: 9107

SEQ ID NO: 9583 - DNA, 735 bp, Vibrio cholerae; identical to SEQ ID NO: 9108

SEQ ID NO: 9584 - DNA, 1452 bp, Vibrio cholerae; identical to SEQ ID NO: 9109

SEQ ID NO: 9585 - DNA, 3450 bp, Vibrio cholerae; identical to SEQ ID NO: 9118

SEQ ID NO: 9586 - DNA, 735 bp, Vibrio cholerae; identical to SEQ ID NO: 9108

SEQ ID NO: 9587 - DNA, 1479 bp, Vibrio cholerae
  modified_base (344)..(389): a, c, t, g, unknown or other
gtgagtctaaatataaaaaagctcaaagttagtttgcctgctaatccttttggtcaagccatcaaggactttgcacatctatcgagtcagctagaagtgctttctaagagtgccggtattgaaaacaataagttccgaactgcatatggagaagtatgtaatgcgcttgcctctaagaaaagagttgaggacgttatagatagctctgtacacgttcgcgccttagctctttcgctacatacggatgcgaagaaaaatgtcagctttacgcgcagattgcttaataaaattacagaaattgtaaaaaaaccaagctctttagtcatagagtcgttttttcagcnnnnnnnnnnnnnnnnnnnnnnnnnnnnnnnnnnnnnnnnnnnnnnccgactggcagacttggaagctacagcagactggttgttggaggctaaaaggctgcgaggcaatgatgagcagtttgatgaaaatatattgtcaaccaatggccccaagtggcttgcggaaagggctattcaaaataatgtcgattttgatcatttaattgcggagatgaagctggaacgttatgcaaatggcagatatttaacggcggctaaaggcatctactatattgagcagttaaacactataccattaggccaagatcatcctctcctagaggaggttcaaaaaacggtggtttttgattctcgatatgactctgaaagtttgttagggcatcaaattcttagaattttgattggccgatcgataggttctcacatcagtgagccttggatgaatgtgatcttagcaattggcggtgacccacgagtaccaagttcaaatccaagatatattaagtggtggaagagtttagaaccaaatctggttcaagctgttctcggatggttatcaaaactagacttgaagttgtttctggaagcgttggaggattattcttactcttcagctaattacgagctacagagaatgtacccatctcggaaaagtttcttagaggggatgttcgatgcgggggttatttcaaatacccggctttatttgagtctggatgctgcaaggtatttgaagagaaattatgaccctaagcacttgccaaatttctctactgttaaagatggtgacaaatcgataatttatgtgcaaatgaacggcgctcacatggttgaggggagccatagttgttatttgtggttgtaccggtatcttgacccttccgtttgtgtgtttaactataacattgatagtcctacgtactcacaactcacaatcggtataaacaatcaaatgtccagattgtcatctggtgcagttgctaaaataacgcactctccgagtggttacgcatggcaacgaaaagcacttatagcactaagagagttaggagttaaattgacgccgaaagatgtgctttcgaatgaagattatattgattttaaacaacgttatggggtgcgagagtggagttaa

SEQ ID NO: 9588 - DNA, 1953 bp, Vibrio cholerae
atggccctctcagcaatagaacatatttatcaacgacaacaaattagtggtgaaacgaagaaacctgcgttgatagttgctcctttgagtttattggaaaactggaaggatgaggtagataaaacctttaaacactcaccattcaaagatgtagttattttgcaatcatccgctgagttaaatgagtatcgcatggggggcgtagagattcgaggccagagcgcatctgatgattgtttagaacccaaatattctttgaaagttgggaaatactttggtcctagccgtttagatctaccagagcgattggtaatcactacttatcaaactttgcgcgattaccagttctccatgtgtttgattgattgggggatcgtggttttcgatgaagcccagaacattaaaaatccaaatgcacttcaaactcgtgctgcgaaaggcctaaaagcggatttcaaactagtggctacgggtacgcctgtagaaaacagcttagccgatttttggtgtttaatggatacagcttgcccaggacatctgggtagctatcaagaatttcgtgctcgttatatctcaccaattcttaaagctgctggtgatgaagttgaagaaataagagctaggcttggaagagaacttcgtatagctgtcggggcattgatgcttaggcgcattaaagaggacaaccttaaagggttacctctaaaacatatgtatgctggtggagaatttgaaaactggaagtatttagaagaacttaagtcgacaatggttggctaccagagagatgtttacgaaggagcgattagccatcaactcgagaatgaagaaagtcacgcgcttaccactttgatgcggctaagagatagttcgttacatcctcggttaagtgatggaggtcgccttgatattcccaaaaatgcaaaatcagctagagctctatacggagaatcaggaaaattagtttccttgcttgagactttagacagagtacgaagcaaacaagaaaagtgcattatttttgcggttaacaaacgactgcaaagtttcttaagtgtgactttggggcagatctataacctaggtccgctctcagttattaatggtgatgcaaaagccgtagcaaagcgtaaatctgtcccaactcgaaaatcaatgatttcagacttcgaagcaaaagaaggctttaatctaattgtaatgtctccagtcgcggctggtgtcggtttaactgtggtcggtgcgaatcatgtggttcatttagagcggtactggaacccagctaaagaagctcaagctacggatagggtttatcgtatcggacaggaaaaagaggttcatatctacatccctctgttgcatcaccctgaatttgaatcatttgatgtaaacctacataggctacttacccaaaaaacgttgctgaaggatgctgttgttacaccagaagatgttattccacagccagcaggtgtcgggggagtagtttctggtgatttgattgataaacgtattacagcggctgaacttgataagttaagttggcagcaatttgaagcgttatgtgtagaattgcttgcaaagattacggatagtgaaagcgcttggttgacgaacaatggtgctgatcatggtgctgatggtgtactacttaataacagtggtaatattttgcttcaggctaagtttacgcaacgacaatatgatggttataaagggatacaggagattcattctgctaaacctatttatgaatcagcaatgagaagttcttttgggcgtttgatttttgttactaattcacctttgttagctaagcgaactcatgaaattgctgccacatgtggtattgaagttttgggcagaacacagctgttaacttaccttgaagaatatgacattacactgaaagacattctgtcaaggttggggaaagatcgattaagagtttaa

SEQ ID NO: 9589 - DNA, 2064 bp, Vibrio cholerae; identical to SEQ ID NO: 9173

SEQ ID NO: 9590 - DNA, 735 bp, Vibrio cholerae; identical to SEQ ID NO: 9108

SEQ ID NO: 9591 - DNA, 501 bp, Vibrio cholerae
atgtacccatctcggaaaagtttcttagaggggatgttcgatgcgggggttatttcaaatacccggctttatttgagtctggatgctgcaaggtatttgaagagaaattatgaccctaagcacttgccaaatttctctactgttaaagatggtgacaaatcgataatttatgtgcaaatgaacggcgctcacatggttgaggggagccatagttgttatttgtggttgtaccggtatcttgacccttccgtttgtgtgtttaactataacattgatagtcctacgtactcacaactcacaatcggtataaacaatcaaatgtccagattgtcatctggtgcagttgctaaaataacgcactctccgagtggttacgcatggcaacgaaaagcacttatagcactaagagagttaggagttaaattgacgccgaaagatgtgctttcgaatgaagattatattgattttaaacaacgttatggggtgcgagagtggagttaa

SEQ ID NO: 9592 - DNA, 3450 bp, Vibrio cholerae; identical to SEQ ID NO: 9118

SEQ ID NO: 9593 - DNA, 2064 bp, Vibrio cholerae; identical to SEQ ID NO: 9169

SEQ ID NO: 9594 - DNA, 735 bp, Vibrio cholerae; identical to SEQ ID NO: 9108

SEQ ID NO: 9595 - DNA, 1452 bp, Vibrio cholerae; identical to SEQ ID NO: 9109

SEQ ID NO: 9596 - DNA, 3450 bp, Vibrio cholerae; identical to SEQ ID NO: 9118

SEQ ID NO: 9597 - DNA, 2064 bp, Vibrio cholerae; identical to SEQ ID NO: 9169

SEQ ID NO: 9598 - DNA, 735 bp, Vibrio cholerae; identical to SEQ ID NO: 9108

SEQ ID NO: 9599 - DNA, 1452 bp, Vibrio cholerae; identical to SEQ ID NO: 9109

SEQ ID NO: 9600 - DNA, 3450 bp, Vibrio cholerae; identical to SEQ ID NO: 9118

SEQ ID NO: 9601 - DNA, 2064 bp, Vibrio cholerae; identical to SEQ ID NO: 9173

SEQ ID NO: 9602 - DNA, 735 bp, Vibrio cholerae; identical to SEQ ID NO: 9108

SEQ ID NO: 9603 - DNA, 1452 bp, Vibrio cholerae; identical to SEQ ID NO: 9109

SEQ ID NO: 9604 - DNA, 3450 bp, Vibrio cholerae; identical to SEQ ID NO: 9118

SEQ ID NO: 9605 - DNA, 1755 bp, Vibrio cholerae
  modified_base (1630)..(1673): a, c, t, g, unknown or other
atgccacctcaaactcctgagcaattgagtgctttgtttgtggttattttatggggtgtcgctctatttttcttaatttggtcagttgctgcatttattcgcgcaagacaacgagtagtttggcttaacaaatctttggatgatgcggagaaatcgactctgtcaggtgttcgaaatgatttaatttctagagctgaacaaaaaaaagattcagtagggcatttatggctcgagtttgatgaaacattgcttgaagtaaaaggtgctgatgacgttgttcgattgcataacacatttgatgctgactatttttttaatagttctagtttagctggtggtagtactgaaaacagaatgattgcggtggttccaggctttttaacggctctgggtgttattggtacttttgtcggtttacagctaggactttcagatctcaatatcgcgggcaacgttgatgtcaatgaaatgaaaaatggcgttgctggagttataaatggtgcaaaaatcgcatttatgacatcggtttggggcgtgctactcagtgttgcatttaatttcattgagaagatacttgagcaaattattagaaagaaaattaagtctttgcaaaaccgtattgacaggatgttccctcgattaagtgcggaatatcaactgcaatctattgcaaataacagccagcaatctcgagaaagcctacaaggacttgctgagaaaataggcgagaaaatgcaggagtcactcattcaggcaactcagggtattcaacaaggtctcgagagtagtctggaaaaaatcatggctccggctatcaataagctcgttgacgaaacatctgacgggaatcaaaaagcactggaaagcgttcttcaatctttcatggagggttttggtcaacaaggcgaacaacaacgtgtcgcgatggactctgcgtctcaaaacgtaaataagacgctagaatcaatgagcgtttcgatggctgctttcgtcaataagttggaagttcagcaaaacgcatcttcagaaagagagaaagaactgatctcaactatttcagttcaagtttctgagctagttactcagggtaatgagcagaagcgtgttctaacagagtttgtagaaaaacaagtctcagagttaggtgagcagcttactaaaagagaattagctgcttctgaacgtgaacagaaattggcttcctcaatggaaagtacgattaaagatttagtagaaaatgtttcagcacaaagccaagtcttgaccgattttgttcagaatcaagttgtccaacttacccaaacgttctccgaacgagatggaatggcaagtcagatggaaaaagagcgtaatgatatatttgtgaatcaaacgcaggcgatgaaagctggaacggatgagcttcttgctcaagtgaaagcggcgactgaatcacaacaaatcacaactaatagtattattgagcaaggtaaacaattacaaaatagtatcgattcctctgtttcggcatctgctcgagctacggagagtatgcagcagtcggcgaatgagttacgagttgccgctgatagtatgaatgtgtttggttccaacatcaaagatgcgggcaacaaactatctggtgctgttnnnnnnnnnnnnnnnnnnnnnnnnnnnnnnnnnnnnnnnnnnnncgaaggatttagcggaacaaaaccatctaggcgcagtgaaagttcaagcgttgagggagcagttgctggaagatacaagtaa

SEQ ID NO: 9606 - DNA, 735 bp, Vibrio cholerae; identical to SEQ ID NO: 9108

SEQ ID NO: 9607 - DNA, 1452 bp, Vibrio cholerae; identical to SEQ ID NO: 9109

SEQ ID NO: 9608 - DNA, 3450 bp, Vibrio cholerae; identical to SEQ ID NO: 9118

SEQ ID NO: 9609 - DNA, 2064 bp, Vibrio cholerae; identical to SEQ ID NO: 9169

SEQ ID NO: 9610 - DNA, 735 bp, Vibrio cholerae; identical to SEQ ID NO: 9108

SEQ ID NO: 9611 - DNA, 1452 bp, Vibrio cholerae; identical to SEQ ID NO: 9113

SEQ ID NO: 9612 - DNA, 3441 bp, Vibrio cholerae; identical to SEQ ID NO: 9114

SEQ ID NO: 9613 - DNA, 2052 bp, Vibrio cholerae
  modified_base (1991)..(2021): a, c, t, g, unknown or other
atgaccgatagccttaatctttccagtttatggccagacttgagcagtctaaatgtaatgccacctcaaactcctgagcaattgagtgctttgtttgtggttattttatggggtgtcgctctatttttcttaatttggtcagttgctgcatttattcgcgcaagacaacgagtagtttggcttaacaaatctttggatgatgcggagaaatcgactctgtcaggtgttcgaaatgatttaatttctagagctgaacaaaaaaaagattcagtagggcatttatggctcgagtttgatgaaacattgcttgaagtaaaaggtgctgatgacgttgttcgattgcataacacatttgatgctgactatttttttaatagttctagtttagctggtggtagtactgaaaacagaatgattgcggtggttccaggctttttaacggctctgggtgttattggtacttttgtcggtttacagctaggactttcagatctcaatatcgcgggcaacgttgatgtcaatgaaatgaaaaatggcgttgctggagttataaatggtgcaaaaatcgcatttatgacatcggtttggggcgtgctactcagtgttgcatttaatttcattgagaagatacttgagcaaattattagaaagaaaattaagtctttgcaaaaccgtattgacaggatgttccctcgattaagtgcggaatatcaactgcaatctattgcaaataacagccagcaatctcgagaaagcctacaaggacttgctgagaaaataggcgagaaaatgcaggagtcactcattcaggcaactcagggtattcaacaaggtctcgagagtagtctggaaaaaatcatggctccggctatcaataagctcgttgacgaaacatctgacgggaatcaaaaagcactggaaagcgttcttcaatctttcatggagggttttggtcaacaaggcgaacaacaacgtgtcgcgatggactctgcgtctcaaaacgtaaataagacgctagaatcaatgagcgtttcgatggctgctttcgtcaataagttggaagttcagcaaaacgcatcttcagaaagagagaaagaactgatctcaactatttcagttcaagtttctgagctagttactcagggtaatgagcagaagcgtgttctaacagagtttgtagaaaaacaagtctcagagttaggtgagcagcttactaaaagagaattagctgcttctgaacgtgaacagaaattggcttcctcaatggaaagtacgattaaagatttagtagaaaatgtttcagcacaaagccaagtcttgaccgattttgttcagaatcaagttgtccaacttacccaaacgttctccgaacgagatggaatggcaagtcagatggaaaaagagcgtaatgatatatttgtgaatcaaacgcaggcgatgaaagctggaacggatgagcttcttgctcaagtgaaagcggcgactgaatcacaacaaatcacaactaatagtattattgagcaaggtaaacaattacaaaatagtatcgattcctctgtttcggcatctgctcgagctacggagagtatgcagcagtcggcgaatgagttacgagttgccgctgatagtatgaatgtgtttggttccaacatcaaagatgcgggcaacaaactatctggtgctgttactgaagcggttaacagcacgaaggatttagcggaacaaaaccatctaggcgcagtgaaagttcaagcgttgagggagcagttgctggaagatacaagtaagtttagcgcgattgcagatcagataaacaatatgctgattagtgcagaacagtcgtttagcacgcttcgtactacccaaaatgagttccttgcagaacaaaaaggtaatctaaacgaactcacttcagaaatgaaacgtaatgtgaaagagttgacggagcaaatggctcaactgcttgaagattacgcagagcaagccaatgnnnnnnnnnnnnnnnnnnnnnnnnnnnnnnnccgccgagcacctcaaagtttgggccaatag

SEQ ID NO: 9614 - DNA, 735 bp, Vibrio cholerae; identical to SEQ ID NO: 9108

SEQ ID NO: 9615 - DNA, 501 bp, Vibrio cholerae
atgtacccatctcggaaaagtttcttagaggggatgttcgatgcgggggttatttcaaatacccggctttatttgagtctggatgctgcaaggtatttgaagagaaattatgaccctaagcacttgccaaatttctctactgttaaagatggtgacaaatcgataatttatgtgcaaatgaacggcgctcacatggttgaggggagccatagttgttatttgtggttgtaccggtatcttgacccttccgtttgtgtgtttaactataacattgatagtcctacgtactcacaactcacaatcggtataaacaatcaaatgtccagattgtcatctggtgcagttgctaaaataacgcactctccgagtggttacgcatggcaacgaaaagcacttatagcactaagagagttaggtgttaaattgacgccgaaagatgtgctttcgaatgaagattatattgattttaaacaacgttatggggtgcgagagtggagttaa

SEQ ID NO: 9616 - DNA, 1974 bp, Vibrio cholerae
atggggttaggtaagacttttatggccctctcagcaatagaacatatttatcaacgacaacaaattagtggtgaaacgaagaaacctgcgttgatagttgctcctttgagtttattggaaaactggaaggatgaggtagataaaacctttaaacactcaccattcaaagatgtagttattttgcaatcatccgctgagttaaatgagtatcgcatggggggcgtagagattcgaggccagagcgcatctgatgattgtttagaacccaaatattctttgaaagttgggaaatactttggtcctagccgtttagatctaccagagcgattggtaatcactacttatcaaactttgcgcgattaccagttctccatgtgtttgattgattgggggatcgtggttttcgatgaagcccagaacattaaaaatccaaatgcacttcaaactcgtgctgcgaaaggcctaaaagcggatttcaaactagtggctacgggtacgcctgtagaaaacagcttagccgatttttggtgtttaatggatacagcttgcccaggacatctgggtagctatcaagaatttcgtgctcgttatatctcaccaattcttaaagctgctggtgatgaagttgaagaaataagagctaggcttggaagagaacttcgtatagctgtcggggcattgatgcttaggcgcattaaagaggacaaccttaaagggttacctctaaaacatatgtatgctggtggagaatttgaaaactggaagtatttagaagaacttaagtcgacaatggttggctaccagagagatgtttacgaaggagcgattagccatcaactcgagaatgaagaaagtcacgcgcttaccactttgatgcggctaagagatagttcgttacatcctcggttaagtgatggaggtcgccttgatattcccaaaaatgcaaaatcagctagagctctatacggagaatcaggaaaattagtttccttgcttgagactttagacagagtacgaagcaaacaagaaaagtgcattatttttgcggttaacaaacgactgcaaagtttcttaagtgtgactttggggcagatctataacctaggtccgctctcagttattaatggtgatgcaaaagccgtagcaaagcgtaaatctgtcccaactcgaaaatcaatgatttcagacttcgaagcaaaagaaggctttaatctaattgtaatgtctccagtcgcggctggtgtcggtttaactgtggtcggtgcgaatcatgtggttcatttagagcggtactggaacccagctaaagaagctcaagctacggatagggtttatcgtatcggacaggaaaaagaggttcatatctacatccctctgttgcatcaccctgaatttgaatcatttgatgtaaacctacataggctacttacccaaaaaacgttgctgaaggatgctgttgttacaccagaagatgttattccacagccagcaggtgtcgggggagtagtttctggtgatttgattgataaacgtattacagcggctgaacttgataagttaagttggcagcaatttgaagcgttatgtgtagaattgcttgcaaagattacggatagtgaaagcgcttggttgacgaacaatggtgctgatcatggtgctgatggtgtactacttaataacagtggtaatattttgcttcaggctaagtttacgcaacgacaatatgatggttataaagggatacaggagattcattctgctaaacctatttatgaatcagcaatgagaagttcttttgggcgtttgatttttgttactaattcacctttgttagctaagcgaactcatgaaattgctgccacatgtggtattgaagttttgggcagaacacagctgttaacttaccttgaagaatatgacattacactgaaagacattctgtcaaggttggggaaagatcgattaagagtttaa

SEQ ID NO: 9617 - DNA, 2121 bp, Vibrio cholerae; identical to SEQ ID NO: 9107

SEQ ID NO: 9618 - DNA, 735 bp, Vibrio cholerae; identical to SEQ ID NO: 9108

SEQ ID NO: 9619 - DNA, 1452 bp, Vibrio cholerae; identical to SEQ ID NO: 9109

SEQ ID NO: 9620 - DNA, 3450 bp, Vibrio cholerae; identical to SEQ ID NO: 9118

SEQ ID NO: 9621 - DNA, 2064 bp, Vibrio cholerae; identical to SEQ ID NO: 9169

SEQ ID NO: 9622 - DNA, 735 bp, Vibrio cholerae; identical to SEQ ID NO: 9108

SEQ ID NO: 9623 - DNA, 1452 bp, Vibrio cholerae; identical to SEQ ID NO: 9109

SEQ ID NO: 9624 - DNA, 3450 bp, Vibrio cholerae; identical to SEQ ID NO: 9118

SEQ ID NO: 9625 - DNA, 2064 bp, Vibrio cholerae; identical to SEQ ID NO: 9173

SEQ ID NO: 9626 - DNA, 735 bp, Vibrio cholerae; identical to SEQ ID NO: 9108

SEQ ID NO: 9627 - DNA, 1452 bp, Vibrio cholerae; identical to SEQ ID NO: 9109

SEQ ID NO: 9628 - DNA, 3450 bp, Vibrio cholerae; identical to SEQ ID NO: 9118

SEQ ID NO: 9629 - DNA, 2121 bp, Vibrio cholerae; identical to SEQ ID NO: 9257

SEQ ID NO: 9630 - DNA, 735 bp, Vibrio cholerae; identical to SEQ ID NO: 9108

SEQ ID NO: 9631 - DNA, 798 bp, Vibrio cholerae; identical to SEQ ID NO: 9339

SEQ ID NO: 9632 - DNA, 2121 bp, Vibrio cholerae; identical to SEQ ID NO: 9107

SEQ ID NO: 9633 - DNA, 735 bp, Vibrio cholerae; identical to SEQ ID NO: 9108

SEQ ID NO: 9634 - DNA, 1452 bp, Vibrio cholerae; identical to SEQ ID NO: 9109

SEQ ID NO: 9635 - DNA, 3450 bp, Vibrio cholerae; identical to SEQ ID NO: 9118

SEQ ID NO: 9636 - DNA, 2064 bp, Vibrio cholerae; identical to SEQ ID NO: 9169

SEQ ID NO: 9637 - DNA, 735 bp, Vibrio cholerae; identical to SEQ ID NO: 9108

SEQ ID NO: 9638 - DNA, 1452 bp, Vibrio cholerae; identical to SEQ ID NO: 9113

SEQ ID NO: 9639 - DNA, 3441 bp, Vibrio cholerae; identical to SEQ ID NO: 9114

SEQ ID NO: 9640 - DNA, 2064 bp, Vibrio cholerae; identical to SEQ ID NO: 9169

SEQ ID NO: 9641 - DNA, 735 bp, Vibrio cholerae; identical to SEQ ID NO: 9108

SEQ ID NO: 9642 - DNA, 1452 bp, Vibrio cholerae; identical to SEQ ID NO: 9117

SEQ ID NO: 9643 - DNA, 3450 bp, Vibrio cholerae; identical to SEQ ID NO: 9118

SEQ ID NO: 9644 - DNA, 2064 bp, Vibrio cholerae; identical to SEQ ID NO: 9169

SEQ ID NO: 9645 - DNA, 735 bp, Vibrio cholerae; identical to SEQ ID NO: 9108

SEQ ID NO: 9646 - DNA, 1452 bp, Vibrio cholerae; identical to SEQ ID NO: 9109

SEQ ID NO: 9647 - DNA, 3450 bp, Vibrio cholerae; identical to SEQ ID NO: 9118

SEQ ID NO: 9648 - DNA, 1566 bp, Vibrio cholerae
atgccacctcaaactcctgagcaattgagtgctttgtttgtggttattttatggggtgtcgctctatttttcttaatttggtcagttgctgcatttattcgcgcaagacaacgagtagtttggcttaacaaatctttggatgatgcggagaaatcgactctgtcaggtgttcgaaatgatttaatttctagagctgaacaaaaaaaagattcagtagggcatttatggctcgagtttgatgaaacattgcttgaagtaaaaggtgctgatgacgttgttcgattgcataacacatttgatgctgactatttttttaatagttctagtttagctggtggtagtactgaaaacagaatgattgcggtggttccaggctttttaacggctctgggtgttattggtacttttgtcggtttacagctaggactttcagatctcaatatcgcgggcaacgttgatgtcaatgaaatgaaaaatggcgttgctggagttataaatggtgcaaaaatcgcatttatgacatcggtttggggcgtgctactcagtgttgcatttaatttcattgagaagatacttgagcaaattattagaaagaaaattaagtctttgcaaaaccgtattgacaggatgttccctcgattaagtgcggaatatcaactgcaatctattgcaaataacagccagcaatctcgagaaagcctacaaggacttgctgagaaaataggcgagaaaatgcaggagtcactcattcaggcaactcagggtattcaacaaggtctcgagagtagtctggaaaaaatcatggctccggctatcaataagctcgttgacgaaacatctgacgggaatcaaaaagcactggaaagcgttcttcaatctttcatggagggttttggtcaacaaggcgaacaacaacgtgtcgcgatggactctgcgtctcaaaacgtaaataagacgctagaatcaatgagcgtttcgatggctgctttcgtcaataagttggaagttcagcaaaacgcatcttcagaaagagagaaagaactgatctcaactatttcagttcaagtttctgagctagttactcagggtaatgagcagaagcgtgttctaacagagtttgtagaaaaacaagtctcagagttaggtgagcagcttactaaaagagaattagctgcttctgaacgtgaacagaaattggcttcctcaatggaaagtacgattaaagatttagtagaaaatgtttcagcacaaagccaagtcttgaccgattttgttcagaatcaagttgtccaacttacccaaacgttctccgaacgagatggaatggcaagtcagatggaaaaagagcgtaatgatatatttgtgaatcaaacgcaggcgatgaaagctggaacggatgagcttcttgctcaagtgaaagcggcgactgaatcacaactaatagtattattgagcaaggtaaacaattacaaaatagtatcgattcctctgtttcggcatctgctcgagctacggagagtatgcagcagtcggcgaatgagttacgagttgccgctgatagtatga

SEQ ID NO: 9649 - DNA, 735 bp, Vibrio cholerae; identical to SEQ ID NO: 9108

SEQ ID NO: 9650 - DNA, 525 bp, Vibrio cholerae
  modified_base (14)..(44): a, c, t, g, unknown or other
atgtacccatctcnnnnnnnnnnnnnnnnnnnnnnnnnnnnnnntttcttagaggggatgttcgatgcgggggttatttcaaatacccggctttatttgagtctggatgctgcaaggtatttgaagagaaattatgaccctaagcacttgccaaatttctctactgttaaagatggtgacaaatcgataatttatgtgcaaatgaacggcgctcacatggttgaggggagccatagttgttatttgtggttgtaccggtatcttgacccttccgtttgtgtgtttaactataacattgatagtcctacgtactcacaactcacaatcggtataaacaatcaaatgtccagattgtcatctggtgcagttgctaaaataacgcactctccgagtggttacgcatggcaacgaaaagcacttatagcactaagagagttaggagttaaattgacgccgaaagatgtgctttcgaatgaagattatattgattttaaacaacgttatggggtgcgagagtggagttaa

SEQ ID NO: 9651 - DNA, 3450 bp, Vibrio cholerae; identical to SEQ ID NO: 9118

SEQ ID NO: 9652 - DNA, 2064 bp, Vibrio cholerae
atgccacctcaaactcctgagcaattgagtgctttgtttgtggttattttatggggtgtcgctctatttttcttaatttggtcagttgctgcatttattcgcgcaagacaacgagtagtttggcttaacaaatctttggatgatgcggagaaatcgactctgtcaggtgttcgaaatgatttaatttctagagctgaacaaaaaaaagattcagtagggcatttatggctcgagtttgatgaaacattgcttgaagtaaaaggtgctgatgacgttgttcgattgcataacacatttgatgctgactatttttttaatagttctagtttagctggtggtagtactgaaaacagaatgattgcggtggttccaggctttttaacggctctgggtgttattggtacttttgtcggtttacagctaggactttcagatctcaatatcgcgggcaacgttgatgtcaatgaaatgaaaaatggcgttgctggagttataaatggtgcaaaaatcgcatttatgacatcggtttggggcgtgctactcagtgttgcatttaatttcattgagaagatacttgagcaaattattagaaagaaaattaagtctttgcaaaaccgtattgacaggatgttccctcgattaagtgcggaatatcaactgcaatctattgcaaataacagccagcaatctcgagaaagcctacaaggacttgctgagaaaataggcgagaaaatgcaggagtcactcattcaggcaactcagggtattcaacaaggtctcgagagtagtctggaaaaaatcatggctccggctatcaataagctcgttgacgaaacatctgacgggaatcaaaaagcactggaaagcgttcttcaatctttcatggagggttttggtcaacaaggcgaacagcaacgtgtcgcgatggactctgcgtctcaaaacgtaaataagacgctagaatcaatgagcgttttgatggctgctttcgtcaataagttggaagttcagcaaaacgcatcttcagaaagagagaaagaactgatctcaactatttcagttcaagtttctgagctagttactcagggtaatgagcagaagcgtgttctaacagagtttgtagaaaaacaagtctcagagttaggtgagcagcttactaaaagagaattagctgcttctgaacgtgaacagaaattggcttcctcaatggaaagtacgattaaagatttagtagaaaatgtttcagcacaaagccaagtcttgaccgattttgttcagaatcaagttgtccaacttacccaaacgttctccgaacgagatggaatggcaagtcagatggaaaaagagcgtaatgatatatttgtgaatcaaacgcaggcgatgaaagctggaacggatgagcttcttgctcaagtgaaagcggcgactgaatcacaacaaatcacaactaatagtattattgagcaaggtaaacaattacaaaatagtatcgattcctctgtttcggcatctgctcgagctacggagagtatgcagcagtcggcgaatgagttacgagttgccgctgatagtatgaatgtgtttggttccaacatcaaagatgcgggcaacaaactatctggtgctgttactgaagcggttaacagcacgaaggatttagcggaacaaaaccatctaggcgcagtgaaagttcaagcgttgagggagcagttgctggaagatacaagtaagtttagcgcgattgcagatcagataaacaatatgctgattagtgcagaacagtcgtttagcacgcttcgtactacccaaaatgagttccttgcagaacaaaaaggtaatctaaacgaactcacttcagaaatgaaacgtaatgtgaaagagttgacggagcaaatggctcaactgcttgaagattacgcagagcaagccaatggacaaaccgccgagcacctcaaagtttgggccaatagtagcacacaatatgcagagagcatgaatacagcagttagagctatttctagtgttgtcgatgaaattcaagataaagtgagccaacatgcgtag

SEQ ID NO: 9653 - DNA, 735 bp, Vibrio cholerae; identical to SEQ ID NO: 9108

SEQ ID NO: 9654 - DNA, 924 bp, Vibrio cholerae
atgaagctggaacgttatgcaaatggcagatatttaacggcggctaaaggcatctactatattgagcagttaaacactataccattaggccaagatcatcctctcctagaggaggttcaaaaaacggtggtttttgattctcgatatgactctgaaagtttgttagggcatcaaattcttagaattttgattggccgatcgataggttctcacatcagtgagccttggatgaatgtgatcttagcaattggcggtgacccacgagtaccaagttcaaatccaagatatattaagtggtggaagagtttagaaccaaatctggttcaagctgttctcggatggttatcaaaactagacttgaagttgtttctggaagcgttggaggattattcttactcttcagctaattacgagctacagagaatgtacccatctcggaaaagtttcttagaggggatgttcgatgcgggggttatttcaaatacccggctttatttgagtctggatgctgcaaggtatttgaagagaaattatgaccctaagcacttgccaaatttctctactgttaaagatggtgacaaatcgataatttatgtgcaaatgaacggcgctcacatggttgaggggagccatagttgttatttgtggttgtaccggtatcttgacccttccgtttgtgtgtttaactataacattgatagtcctacgtactcacaactcacaatcggtataaacaatcaaatgtccagattgtcatctggtgcagttgctaaaataacgcactctccgagtggttacgcatggcaacgaaaagcacttatagcactaagagagttaggagttaaattgacgccgaaagatgtgctttcgaatgaagattatattgattttaaacaacgttatggggtgcgagagtggagttaa

SEQ ID NO: 9655 - DNA, 3450 bp, Vibrio cholerae; identical to SEQ ID NO: 9118

SEQ ID NO: 9656 - DNA, 2064 bp, Vibrio cholerae; identical to SEQ ID NO: 9169

SEQ ID NO: 9657 - DNA, 735 bp, Vibrio cholerae; identical to SEQ ID NO: 9108

SEQ ID NO: 9658 - DNA, 1452 bp, Vibrio cholerae; identical to SEQ ID NO: 9109

SEQ ID NO: 9659 - DNA, 3450 bp, Vibrio cholerae; identical to SEQ ID NO: 9118

SEQ ID NO: 9660 - DNA, 2121 bp, Vibrio cholerae; identical to SEQ ID NO: 9257

SEQ ID NO: 9661 - DNA, 735 bp, Vibrio cholerae; identical to SEQ ID NO: 9108

SEQ ID NO: 9662 - DNA, 282 bp, Vibrio cholerae
ttgtggttgtaccggtatcttgacccttccgtttgtgtgtttaactataacattgatagtcctacgtactcacaactcacaatcggtataaacaatcaaatgtccagattgtcatctggtgcagttgctaaaataacgcactctccgagtggttacgcatggcaacgaaaagcacttatagcactaagagagttaggagttaaattgacgccgaaagatgtgctttcgaatgaagattatattgattttaaacaacgttatggggtgcgagagtggagttaa

SEQ ID NO: 9663 - DNA, 1698 bp, Vibrio cholerae
ttgaaagttgggaaatactttggtcctagccgtttagatctaccagagcgattggtaatcactacttatcaaactttgcgcgattaccagttctccatgtgtttgattgattgggggatcgtggttttcgatgaagcccagaacattaaaaatccaaatgcacttcaaactcgtgctgcgaaaggcctaaaagcggatttcaaactagtggctacgggtacgcctgtagaaaacagcttagccgatttttggtgtttaatggatacagcttgcccaggacatctgggtagctatcaagaatttcgtgctcgttatatctcaccaattcttaaagctgctggtgatgaagttgaagaaataagagctaggcttggaagagaacttcgtatagctgtcggggcattgatgcttaggcgcattaaagaggacaaccttaaagggttacctctaaaacatatgtatgctggtggagaatttgaaaactggaagtatttagaagaacttaagtcgacaatggttggctaccagagagatgtttacgaaggagcgattagccatcaactcgagaatgaagaaagtcacgcgcttaccactttgatgcggctaagagatagttcgttacatcctcggttaagtgatggaggtcgccttgatattcccaaaaatgcaaaatcagctagagctctatacggagaatcaggaaaattagtttccttgcttgagactttagacagagtacgaagcaaacaagaaaagtgcattatttttgcggttaacaaacgactgcaaagtttcttaagtgtgactttggggcagatctataacctaggtccgctctcagttattaatggtgatgcaaaagccgtagcaaagcgtaaatctgtcccaactcgaaaatcaatgatttcagacttcgaagcaaaagaaggctttaatctaattgtaatgtctccagtcgcggctggtgtcggtttaactgtggtcggtgcgaatcatgtggttcatttagagcggtactggaacccagctaaagaagctcaagctacggatagggtttatcgtatcggacaggaaaaagaggttcatatctacatccctctgttgcatcaccctgaatttgaatcatttgatgtaaacctacataggctacttacccaaaaaacgttgctgaaggatgctgttgttacaccagaagatgttattccacagccagcaggtgtcgggggagtagtttctggtgatttgattgataaacgtattacagcggctgaacttgataagttaagttggcagcaatttgaagcgttatgtgtagaattgcttgcaaagattacggatagtgaaagcgcttggttgacgaacaatggtgctgatcatggtgctgatggtgtactacttaataacagtggtaatattttgcttcaggctaagtttacgcaacgacaatatgatggttataaagggatacaggagattcattctgctaaacctatttatgaatcagcaatgagaagttcttttgggcgtttgatttttgttactaattcacctttgttagctaagcgaactcatgaaattgctgccacatgtggtattgaagttttgggcagaacacagctgttaacttaccttgaagaatatgacattacactgaaagacattctgtcaaggttggggaaagatcgattaagagtttaa

SEQ ID NO: 9664 - DNA, 2064 bp, Vibrio cholerae; identical to SEQ ID NO: 9169

SEQ ID NO: 9665 - DNA, 735 bp, Vibrio cholerae; identical to SEQ ID NO: 9108

SEQ ID NO: 9666 - DNA, 1452 bp, Vibrio cholerae; identical to SEQ ID NO: 9109

SEQ ID NO: 9667 - DNA, 3450 bp, Vibrio cholerae; identical to SEQ ID NO: 9118

SEQ ID NO: 9668 - DNA, 2064 bp, Vibrio cholerae; identical to SEQ ID NO: 9169

SEQ ID NO: 9669 - DNA, 735 bp, Vibrio cholerae; identical to SEQ ID NO: 9108

SEQ ID NO: 9670 - DNA, 1452 bp, Vibrio cholerae; identical to SEQ ID NO: 9109

SEQ ID NO: 9671 - DNA, 3450 bp, Vibrio cholerae; identical to SEQ ID NO: 9118

SEQ ID NO: 9672 - DNA, 2064 bp, Vibrio cholerae; identical to SEQ ID NO: 9169

SEQ ID NO: 9673 - DNA, 735 bp, Vibrio cholerae; identical to SEQ ID NO: 9108

SEQ ID NO: 9674 - DNA, 1452 bp, Vibrio cholerae; identical to SEQ ID NO: 9109

SEQ ID NO: 9675 - DNA, 2064 bp, Vibrio cholerae; identical to SEQ ID NO: 9169

SEQ ID NO: 9676 - DNA, 735 bp, Vibrio cholerae; identical to SEQ ID NO: 9108

SEQ ID NO: 9677 - DNA, 1452 bp, Vibrio cholerae; identical to SEQ ID NO: 9109

SEQ ID NO: 9678 - DNA, 3450 bp, Vibrio cholerae; identical to SEQ ID NO: 9118

SEQ ID NO: 9679 - DNA, 2064 bp, Vibrio cholerae; identical to SEQ ID NO: 9173

SEQ ID NO: 9680 - DNA, 735 bp, Vibrio cholerae; identical to SEQ ID NO: 9108

SEQ ID NO: 9681 - DNA, 3450 bp, Vibrio cholerae; identical to SEQ ID NO: 9118

SEQ ID NO: 9682 - DNA, 2064 bp, Vibrio cholerae; identical to SEQ ID NO: 9169

SEQ ID NO: 9683 - DNA, 735 bp, Vibrio cholerae; identical to SEQ ID NO: 9108

SEQ ID NO: 9684 - DNA, 1452 bp, Vibrio cholerae; identical to SEQ ID NO: 9109

SEQ ID NO: 9685 - DNA, 3450 bp, Vibrio cholerae; identical to SEQ ID NO: 9118

SEQ ID NO: 9686 - DNA, 2064 bp, Vibrio cholerae; identical to SEQ ID NO: 9173

SEQ ID NO: 9687 - DNA, 735 bp, Vibrio cholerae; identical to SEQ ID NO: 9108

SEQ ID NO: 9688 - DNA, 1452 bp, Vibrio cholerae; identical to SEQ ID NO: 9109

SEQ ID NO: 9689 - DNA, 3450 bp, Vibrio cholerae; identical to SEQ ID NO: 9118

SEQ ID NO: 9690 - DNA, 2064 bp, Vibrio cholerae; identical to SEQ ID NO: 9173

SEQ ID NO: 9691 - DNA, 735 bp, Vibrio cholerae; identical to SEQ ID NO: 9108

SEQ ID NO: 9692 - DNA, 1452 bp, Vibrio cholerae; identical to SEQ ID NO: 9109

SEQ ID NO: 9693 - DNA, 3450 bp, Vibrio cholerae; identical to SEQ ID NO: 9118

SEQ ID NO: 9694 - DNA, 2064 bp, Vibrio cholerae; identical to SEQ ID NO: 9169

SEQ ID NO: 9695 - DNA, 735 bp, Vibrio cholerae; identical to SEQ ID NO: 9108

SEQ ID NO: 9696 - DNA, 798 bp, Vibrio cholerae
gtggtttttgattctcgatatgactctgaaagtttgttagggcatcaaattcttagaattttgattggccgatcgataggttctcacatcagtgagccttggatgaatgtgatcttagcaattggcggtgacccacgagtaccaagttcaaatccaagatatattaagtggtggaagagtttagaaccaaatctggttcaagctgttctcggatggttatcaaaactagacttgaagttgtttctggaagcgttggaggattattcttactcttcagctaattacgagctacagagaatgtacccatctcggaaaagtttcttagaggggatgttcgatgcgggggttatttcaaatacccggctttatttgagtctggatgctgcaaggtatttgaagagaaattatgaccctaagcacttgccaaatttctctactgttaaagatggtgacaaatcgataatttatgtgcaaatgaacggcgctcacatggttgaggggagccatagttgttatttgtggttgtaccggtatcttgacccttccgtttgtgtgtttaactataacattgatagtcctacgtactcacaactcacaatcggtataaacaatcaaatgtccagattgtcatctggtgcagttgctaaaataacgcactctccgagtggttacgcatggcaacgaaaagcacttatagcactaagagagttaggtgttaaattgacgccgaaagatgtgctttcgaatgaagattatattgattttaaacaacgttatggggtgcgagagtggagttaa

SEQ ID NO: 9697 - DNA, 3456 bp, Vibrio cholerae
  modified_base (587)..(620): a, c, t, g, unknown or other
gtggagttaacctctttaatcagcaagttcttctctagctcagataaaacgtctcagtttgaactcatttgtgatgatagtcttgattttgcaacttccagaaaaactctagagaaaattaaagctgatgagtggataacagcgcagtatgttgcacttaaaatgcttgaagagcagggggatgtaagctcatttccagatggcttcattatgcctgccgatacagctgtcagactcgattctgagttgagggatttgtttagtttgcccccggtttggaaaggagtcattgacgctgatattcaaggaaaagctagtacacccacctttaaaattgatctttcggtcacaaccaaacaaggtcgaacaacactaaattacactgtggatgggcctttcattcggtttagtcaaaatgagcagtacctgctaacacccgagcagcttatggtatttattgcgcataaaacccatgtaaggtctgataggtctgaatatgataacttactgtacttacactctttgcaagaggcccaaaagaatggttgtaagctgaatctaaagcactttgaaaggctaagaatatnnnnnnnnnnnnnnnnnnnnnnnnnnnnnnnnnnagtagaagcagaattgaattctcaaggcgagctaatattgacgccaaacatggggcaaagtgcgagtcatgagtcgattcaaaaggttttggggcagttgcaaagcgacaacgcagttactctgaaagtgggtgatgaaatagtcttattttctgaagaaaagctaatggctgtaaaagaagttattagcaacagggtaattccccaacagcaagttaaagcgttcctggaaaaccctacagcatatattgatgcgagtttagtcgatcttgatttaggtttttctatcagagttcatggtgcgacagtttttaaacatgcttattttggagaaacggacgagtcaggtatagattggttcggagcctcccccacatctgatttgattaatccaatatccaagctgactgatagagttcgcgataaaacaactcttgaggacgtagctaagaagattgaagatgcacgacaaaccggagcaaccgtttttgattatgaaggacaatcatacgatatcagcgatcctgcagctgttgaaaaagttctaaacgaaataggtcacaagatatctagccctaatacagatctttctagctacggagaggcagaagacgccgagactgaatcagaaggctcagaaatacatgttgttgatattgatctaaatgacgaagagctgtctgaaaattctcctaaagttgaacaactgatttctgatatttcatgggatggtgagttaaattgggaaaaccacaagcggacaccattcccacaccaggatattggtgttcgttggattttaggcgttgaacaaaaaagcttatcagactcgaaagttagtggagccttgctagctgatgacatggggttaggtaagacttttatggccctctcagcaatagaacatatttatcaacgacaacaaattagtggtgaaacgaagaaacctgcgttgatagttgctcctttgagtttattggaaaactggaaggatgaggtagataaaacctttaaacactcaccattcaaagatgtagttattttgcaatcatccgctgagttaaatgagtatcgcatggggggcgtagagattcgaggccagagcgcatctgatgattgtttagaacccaaatattctttgaaagttgggaaatactttggtcctagccgtttagatctaccagagcgattggtaatcactacttatcaaactttgcgcgattaccagttctccatgtgtttgattgattgggggatcgtggttttcgatgaagcccagaacattaaaaatccaaatgcacttcaaactcgtgctgcgaaaggcctaaaagcggatttcaaactagtggctacgggtacgcctgtagaaaacagcttagccgatttttggtgtttaatggatacagcttgcccaggacatctgggtagctatcaagaatttcgtgctcgttatatctcaccaattcttaaagctgctggtgatgaagttgaagaaataagagctaggcttggaagagaacttcgtatagctgtcggggcattgatgcttaggcgcattaaagaggacaaccttaaagggttacctctaaaacatatgtatgctggtggagaatttgaaaactggaagtatttagaagaacttaagtcgacaatggttggctaccagagagatgtttacgaaggagcgattagccatcaactcgagaatgaagaaagtcacgcgcttaccactttgatgcggctaagagatagttcgttacatcctcggttaagtgatggaggtcgccttgatattcccaaaaatgcaaaatcagctagagctctatacggagaatcaggaaaattagtttccttgcttgagactttagacagagtacgaagcaaacaagaaaagtgcattatttttgcggttaacaaacgactgcaaagtttcttaagtgtgactttggggcagatctataacctaggtccgctctcagttattaatggtgatgcaaaagccgtagcaaagcgtaaatctgtcccaactcgaaaatcaatgatttcagacttcgaagcaaaagaaggctttaatctaattgtaatgtctccagtcgcggctggtgtcggtttaactgtggtcggtgcgaatcatgtggttcatttagagcggtactggaacccagctaaagaagctcaagctacggatagggtttatcgtatcggacaggaaaaagaggttcatatctacatccctctgttgcatcaccctgaatttgaatcatttgatgtaaacctacataggctacttacccaaaaaacgttgctgaaggatgctgttgttacaccagaagatgttattccacagccagcaggtgtcgggggagtagtttctggtgatttgattgataaacgtattacagcggctgaacttgataagttaagttggcagcaatttgaagcgttatgtgtagaattgcttgcaaagattacggatagtgaaagcgcttggttgacgaacaatggtgctgatcatggtgctgatggtgtactacttaataacagtggtaatattttgcttcaggctaagtttacgcaacgacaatatgatggttataaagggatacaggagattcattctgctaaacctatttatgaatcagcaatgagaagttcttttgggcgtttgatttttgttactaattcacctttgttagctaagcgaactcatgaaattgctgccacatgtggtattgaagttttgggcagaacacagctgttaacttaccttgaagaatatgacattacactgaaagacattctgtcaaggttggggaaagatcgattaagagtttaa

SEQ ID NO: 9698 - DNA, 2121 bp, Vibrio cholerae; identical to SEQ ID NO: 9107

SEQ ID NO: 9699 - DNA, 735 bp, Vibrio cholerae; identical to SEQ ID NO: 9108

SEQ ID NO: 9700 - DNA, 501 bp, Vibrio cholerae; identical to SEQ ID NO: 9591

SEQ ID NO: 9701 - DNA, 1266 bp, Vibrio cholerae
  modified_base (1216)..(1258): a, c, t, g, unknown or other
atggccctctcagcaatagaacatatttatcaacgacaacaaattagtggtgaaacgaagaaacctgcgttgatagttgctcctttgagtttattggaaaactggaaggatgaggtagataaaacctttaaacactcaccattcaaagatgtagttattttgcaatcatccgctgagttaaatgagtatcgcatggggggcgtagagattcgaggccagagcgcatctgatgattgtttagaacccaaatattctttgaaagttgggaaatactttggtcctagccgtttagatctaccagagcgattggtaatcactacttatcaaactttgcgcgattaccagttctccatgtgtttgattgattgggggatcgtggttttcgatgaagcccagaacattaaaaatccaaatgcacttcaaactcgtgctgcgaaaggcctaaaagcggatttcaaactagtggctacgggtacgcctgtagaaaacagcttagccgatttttggtgtttaatggatacagcttgcccaggacatctgggtagctatcaagaatttcgtgctcgttatatctcaccaattcttaaagctgctggtgatgaagttgaagaaataagagctaggcttggaagagaacttcgtatagctgtcggggcattgatgcttaggcgcattaaagaggacaaccttaaagggttacctctaaaacatatgtatgctggtggagaatttgaaaactggaagtatttagaagaacttaagtcgacaatggttggctaccagagagatgtttacgaaggagcgattagccatcaactcgagaatgaagaaagtcacgcgcttaccactttgatgcggctaagagatagttcgttacatcctcggttaagtgatggaggtcgccttgatattcccaaaaatgcaaaatcagctagagctctatacggagaatcaggaaaattagtttccttgcttgagactttagacagagtacgaagcaaacaagaaaagtgcattatttttgcggttaacaaacgactgcaaagtttcttaagtgtgactttggggcagatctataacctaggtccgctctcagttattaatggtgatgcaaaagccgtagcaaagcgtaaatctgtcccaactcgaaaatcaatgatttcagacttcgaagcaaaagaaggctttaatctaattgtaatgtctccagtcgcgnnnnnnnnnnnnnnnnnnnnnnnnnnnnnnnnnnnnnnnnnnncggtttaa

SEQ ID NO: 9702 - DNA, 735 bp, Vibrio cholerae; identical to SEQ ID NO: 9108

SEQ ID NO: 9703 - DNA, 1002 bp, Vibrio cholerae
ttgtcaaccaatggccccaagtggcttgcggaaagggctattcaaaataatgtcgattttgatcatttaattgcggagatgaagctggaacgttatgcaaatggcagatatttaacggcggctaaaggcatctactatattgagcagttaaacactataccattaggccaagatcatcctctcctagaggaggttcaaaaaacggtggtttttgattctcgatatgactctgaaagtttgttagggcatcaaattcttagaattttgattggccgatcgataggttctcacatcagtgagccttggatgaatgtgatcttagcaattggcggtgacccacgagtaccaagttcaaatccaagatatattaagtggtggaagagtttagaaccaaatctggttcaagctgttctcggatggttatcaaaactagacttgaagttgtttctggaagcgttggaggattattcttactcttcagctaattacgagctacagagaatgtacccatctcggaaaagtttcttagaggggatgttcgatgcgggggttatttcaaatacccggctttatttgagtctggatgctgcaaggtatttgaagagaaattatgaccctaagcacttgccaaatttctctactgttaaagatggtgacaaatcgataatttatgtgcaaatgaacggcgctcacatggttgaggggagccatagttgttatttgtggttgtaccggtatcttgacccttccgtttgtgtgtttaactataacattgatagtcctacgtactcacaactcacaatcggtataaacaatcaaatgtccagattgtcatctggtgcagttgctaaaataacgcactctccgagtggttacgcatggcaacgaaaagcacttatagcactaagagagttaggagttaaattgacgccgaaagatgtgctttcgaatgaagattatattgattttaaacaacgttatggggtgcgagagtggagttaa

SEQ ID NO: 9704 - DNA, 1953 bp, Vibrio cholerae; identical to SEQ ID NO: 9588

SEQ ID NO: 9705 - DNA, 2064 bp, Vibrio cholerae; identical to SEQ ID NO: 9652

SEQ ID NO: 9706 - DNA, 735 bp, Vibrio cholerae; identical to SEQ ID NO: 9108

SEQ ID NO: 9707 - DNA, 1452 bp, Vibrio cholerae; identical to SEQ ID NO: 9109

SEQ ID NO: 9708 - DNA, 3450 bp, Vibrio cholerae; identical to SEQ ID NO: 9118

SEQ ID NO: 9709 - DNA, 2064 bp, Vibrio cholerae
atgccacctcaaactcctgagcaattgagtgctttgtttgtggttattttatggggtgtcgctctatttttcttaatttggtcagttgctgcatttattcgcgcaagacaacgagtagtttggcttaacaaatctttggatgatgcggagaaatcgactctgtcaggtgttcgaaatgatttaatttctagagctgaacaaaaaaaagattcagtagggcatttatggctcgagtttgatgaaacattgcttgaagtaaaaggtgctgatgacgttgttcgattgcataacacatttgatgctgactatttttttaatagttctagtttagctggtggtagtactgaaaacagaatgattgcggtggttccaggctttttaacggctctgggtgttattggtacttttgtcggtttacagctaggactttcagatctcaatatcgcgggcaacgttgatgtcaatgaaatgaaaaatggcgttgctggagttataaatggtgcaaaaatcgcatttatgacatcggtttggggcgtgctactcagtgttgcatttaatttcattgagaagatacttgagcaaattattagaaagaaaattaagtctttgcaaaaccgtattgacaggatgttccctcgattaagtgcggaatatcaactgcaatctattgcaaataacagccagcaatctcgagaaagcctacaaggacttgctgagaaaataggcgagaaaatgcaggagtcactcattcaggcaactcagggtattcaacaaggtctcgagagtagtctggaaaaaatcatggctccggctatcaataagctcgttgacgaaacatctaacgggaatcaaaaagcactggaaagcgttcttcaatctttcatggagggttttggtcaacaaggcgaacaacaacgtgtcgcgatggactctgcgtctcaaaacgtaaataagacgctagaatcaatgagcgtttcgatggctgctttcgtcaataagttggaagttcagcaaaacgcatcttcagaaagagagaaagaactgatctcaactatttcagttcaagtttctgagctagttactcagggtaatgagcagaagcgtgttctaacagagtttgtagaaaaacaagtctcagagttaggtgagcagcttactaaaagagaattagctgcttctgaacgtgaacagaaattggcttcctcaatggaaagtacgattaaagatttagtagaaaatgtttcagcacaaagccaagtcttgaccgattttgttcagaatcaagttgtccaacttacccaaacgttctccgaacgagatggaatggcaagtcagatggaaaaagagcgtaatgatatatttgtgaatcaaacgcaggcgatgaaagctggaacggatgagcttcttgctcaagtgaaagcggcgactgaatcacaacaaatcacaactaatagtattattgagcaaggtaaacaattacaaaatagtatcgattcctctgtttcggcatctgctcgagctacggagagtatgcagcagtcggcgaatgagttacgagttgccgctgatagtatgaatgtgtttggttccaacatcaaagatgcgggcaacaaactatctggtgctgttactgaagcggttaacagcacgaaggatttagcggaacaaaaccatctaggcgcagtgaaagttcaagcgttgagggagcagttgctggaagatacaagtaagtttagcgcgattgcagatcagataaacaatatgctgattagtgcagaacagtcgtttagcacgcttcgtactacccaaaatgagttccttgcagaacaaaaaggtaatctaaacgaactcacttcagaaatgaaacgtaatgtgaaagagttgacggagcaaatggctcaactgcttgaagattacgcagagcaagccaatggacaaaccgccgagcacctcaaagtttgggccaatagtagcacacaatatgcagagagcatgaatacagcagttagagctatttctagtgttgtcgatgaaattcaagataaagtgagccaacatgcgtag

SEQ ID NO: 9710 - DNA, 735 bp, Vibrio cholerae; identical to SEQ ID NO: 9108

SEQ ID NO: 9711 - DNA, 1452 bp, Vibrio cholerae; identical to SEQ ID NO: 9113

SEQ ID NO: 9712 - DNA, 3441 bp, Vibrio cholerae; identical to SEQ ID NO: 9114

SEQ ID NO: 9713 - DNA, 735 bp, Vibrio cholerae; identical to SEQ ID NO: 9108

SEQ ID NO: 9714 - DNA, 1452 bp, Vibrio cholerae; identical to SEQ ID NO: 9109

SEQ ID NO: 9715 - DNA, 2709 bp, Vibrio cholerae
gtgggtgatgaaatagtcttattttctgaagaaaagctaatggctgtaaaagaagttattagcaacagggtaattccccaacagcaagttaaagcgttcctggaaaaccctacagcatatattgatgcgagtttagtcgatcttgatttaggtttttctatcagagttcatggtgcgacagtttttaaacatgcttattttggagaaacggacgagtcaggtatagattggttcggagcctcccccacatctgatttgattaatccaatatccaagctgactgatagagttcgcgataaaacaactcttgaggacgtagctaagaagattgaagatgcacgacaaaccggagcaaccgtttttgattatgaaggacaatcatacgatatcagcgatcctgcagctgttgaaaaagttctaaacgaaataggtcacaagatatctagccctaatacagatctttctagctacggagaggcagaagacgccgagactgaatcagaaggctcagaaatacatgttgttgatattgatctaaatgacgaagagctgtctgaaaattctcctaaagttgaacaactgatttctgatatttcatgggatggtgagttaaattgggaaaaccacaagcggacaccattcccacaccaggatattggtgttcgttggattttaggcgttgaacaaaaaagcttatcagactcgaaagttagtggagccttgctagctgatgacatggggttaggtaagacttttatggccctctcagcaatagaacatatttatcaacgacaacaaattagtggtgaaacgaagaaacctgcgttgatagttgctcctttgagtttattggaaaactggaaggatgaggtagataaaacctttaaacactcaccattcaaagatgtagttattttgcaatcatccgctgagttaaatgagtatcgcatggggggcgtagagattcgaggccagagcgcatctgatgattgtttagaacccaaatattctttgaaagttgggaaatactttggtcctagccgtttagatctaccagagcgattggtaatcactacttatcaaactttgcgcgattaccagttctccatgtgtttgattgattgggggatcgtggttttcgatgaagcccagaacattaaaaatccaaatgcacttcaaactcgtgctgcgaaaggcctaaaagcggatttcaaactagtggctacgggtacgcctgtagaaaacagcttagccgatttttggtgtttaatggatacagcttgcccaggacatctgggtagctatcaagaatttcgtgctcgttatatctcaccaattcttaaagctgctggtgatgaagttgaagaaataagagctaggcttggaagagaacttcgtatagctgtcggggcattgatgcttaggcgcattaaagaggacaaccttaaagggttacctctaaaacatatgtatgctggtggagaatttgaaaactggaagtatttagaagaacttaagtcgacaatggttggctaccagagagatgtttacgaaggagcgattagccatcaactcgagaatgaagaaagtcacgcgcttaccactttgatgcggctaagagatagttcgttacatcctcggttaagtgatggaggtcgccttgatattcccaaaaatgcaaaatcagctagagctctatacggagaatcaggaaaattagtttccttgcttgagactttagacagagtacgaagcaaacaagaaaagtgcattatttttgcggttaacaaacgactgcaaagtttcttaagtgtgactttggggcagatctataacctaggtccgctctcagttattaatggtgatgcaaaagccgtagcaaagcgtaaatctgtcccaactcgaaaatcaatgatttcagacttcgaagcaaaagaaggctttaatctaattgtaatgtctccagtcgcggctggtgtcggtttaactgtggtcggtgcgaatcatgtggttcatttagagcggtactggaacccagctaaagaagctcaagctacggatagggtttatcgtatcggacaggaaaaagaggttcatatctacatccctctgttgcatcaccctgaatttgaatcatttgatgtaaacctacataggctacttacccaaaaaacgttgctgaaggatgctgttgttacaccagaagatgttattccacagccagcaggtgtcgggggagtagtttctggtgatttgattgataaacgtattacagcggctgaacttgataagttaagttggcagcaatttgaagcgttatgtgtagaattgcttgcaaagattacggatagtgaaagcgcttggttgacgaacaatggtgctgatcatggtgctgatggtgtactacttaataacagtggtaatattttgcttcaggctaagtttacgcaacgacaatatgatggttataaagggatacaggagattcattctgctaaacctatttatgaatcagcaatgagaagttcttttgggcgtttgatttttgttactaattcacctttgttagctaagcgaactcatgaaattgctgccacatgtggtattgaagttttgggcagaacacagctgttaacttaccttgaagaatatgacattacactgaaagacattctgtcaaggttggggaaagatcgattaagagtttaa

SEQ ID NO: 9716 - DNA, 2064 bp, Vibrio cholerae; identical to SEQ ID NO: 9652

SEQ ID NO: 9717 - DNA, 735 bp, Vibrio cholerae; identical to SEQ ID NO: 9108

SEQ ID NO: 9718 - DNA, 1452 bp, Vibrio cholerae; identical to SEQ ID NO: 9109

SEQ ID NO: 9719 - DNA, 3450 bp, Vibrio cholerae; identical to SEQ ID NO: 9118

SEQ ID NO: 9720 - DNA, 2121 bp, Vibrio cholerae; identical to SEQ ID NO: 9257

SEQ ID NO: 9721 - DNA, 735 bp, Vibrio cholerae; identical to SEQ ID NO: 9108

SEQ ID NO: 9722 - DNA, 798 bp, Vibrio cholerae; identical to SEQ ID NO: 9339

SEQ ID NO: 9723 - DNA, 984 bp, Vibrio cholerae
ttgcttgagactttagacagagtacgaagcaaacaagaaaagtgcattatttttgcggttaacaaacgactgcaaagtttcttaagtgtgactttggggcagatctataacctaggtccgctctcagttattaatggtgatgcaaaagccgtagcaaagcgtaaatctgtcccaactcgaaaatcaatgatttcagacttcgaagcaaaagaaggctttaatctaattgtaatgtctccagtcgcggctggtgtcggtttaactgtggtcggtgcgaatcatgtggttcatttagagcggtactggaacccagctaaagaagctcaagctacggatagggtttatcgtatcggacaggaaaaagaggttcatatctacatccctctgttgcatcaccctgaatttgaatcatttgatgtaaacctacataggctacttacccaaaaaacgttgctgaaggatgctgttgttacaccagaagatgttattccacagccagcaggtgtcgggggagtagtttctggtgatttgattgataaacgtattacagcggctgaacttgataagttaagttggcagcaatttgaagcgttatgtgtagaattgcttgcaaagattacggatagtgaaagcgcttggttgacgaacaatggtgctgatcatggtgctgatggtgtactacttaataacagtggtaatattttgcttcaggctaagtttacgcaacgacaatatgatggttataaagggatacaggagattcattctgctaaacctatttatgaatcagcaatgagaagttcttttgggcgtttgatttttgttactaattcacctttgttagctaagcgaactcatgaaattgctgccacatgtggtattgaagttttgggcagaacacagctgttaacttaccttgaagaatatgacattacactgaaagacattctgtcaaggttggggaaagatcgattaagagtttaa

SEQ ID NO: 9724 - DNA, 2064 bp, Vibrio cholerae; identical to SEQ ID NO: 9169

SEQ ID NO: 9725 - DNA, 735 bp, Vibrio cholerae; identical to SEQ ID NO: 9108

SEQ ID NO: 9726 - DNA, 1452 bp, Vibrio cholerae; identical to SEQ ID NO: 9109

SEQ ID NO: 9727 - DNA, 3450 bp, Vibrio cholerae; identical to SEQ ID NO: 9118

SEQ ID NO: 9728 - DNA, 2064 bp, Vibrio cholerae; identical to SEQ ID NO: 9169

SEQ ID NO: 9729 - DNA, 735 bp, Vibrio cholerae; identical to SEQ ID NO: 9108

SEQ ID NO: 9730 - DNA, 1452 bp, Vibrio cholerae; identical to SEQ ID NO: 9109

SEQ ID NO: 9731 - DNA, 3450 bp, Vibrio cholerae; identical to SEQ ID NO: 9118

SEQ ID NO: 9732 - DNA, 2064 bp, Vibrio cholerae; identical to SEQ ID NO: 9169

SEQ ID NO: 9733 - DNA, 735 bp, Vibrio cholerae; identical to SEQ ID NO: 9108

SEQ ID NO: 9734 - DNA, 1452 bp, Vibrio cholerae; identical to SEQ ID NO: 9109

SEQ ID NO: 9735 - DNA, 3450 bp, Vibrio cholerae; identical to SEQ ID NO: 9118

SEQ ID NO: 9736 - DNA, 2064 bp, Vibrio cholerae; identical to SEQ ID NO: 9169

SEQ ID NO: 9737 - DNA, 735 bp, Vibrio cholerae; identical to SEQ ID NO: 9108

SEQ ID NO: 9738 - DNA, 1452 bp, Vibrio cholerae; identical to SEQ ID NO: 9109

SEQ ID NO: 9739 - DNA, 3450 bp, Vibrio cholerae; identical to SEQ ID NO: 9118

SEQ ID NO: 9740 - DNA, 2064 bp, Vibrio cholerae; identical to SEQ ID NO: 9652

SEQ ID NO: 9741 - DNA, 735 bp, Vibrio cholerae; identical to SEQ ID NO: 9108

SEQ ID NO: 9742 - DNA, 1452 bp, Vibrio cholerae; identical to SEQ ID NO: 9109

SEQ ID NO: 9743 - DNA, 3450 bp, Vibrio cholerae; identical to SEQ ID NO: 9118

SEQ ID NO: 9744 - DNA, 2064 bp, Vibrio cholerae; identical to SEQ ID NO: 9169

SEQ ID NO: 9745 - DNA, 735 bp, Vibrio cholerae; identical to SEQ ID NO: 9108

SEQ ID NO: 9746 - DNA, 1452 bp, Vibrio cholerae; identical to SEQ ID NO: 9109

SEQ ID NO: 9747 - DNA, 3450 bp, Vibrio cholerae; identical to SEQ ID NO: 9118

SEQ ID NO: 9748 - DNA, 2064 bp, Vibrio cholerae; identical to SEQ ID NO: 9169

SEQ ID NO: 9749 - DNA, 735 bp, Vibrio cholerae; identical to SEQ ID NO: 9108

SEQ ID NO: 9750 - DNA, 1452 bp, Vibrio cholerae; identical to SEQ ID NO: 9109

SEQ ID NO: 9751 - DNA, 3450 bp, Vibrio cholerae; identical to SEQ ID NO: 9118

SEQ ID NO: 9752 - DNA, 2064 bp, Vibrio cholerae; identical to SEQ ID NO: 9169

SEQ ID NO: 9753 - DNA, 735 bp, Vibrio cholerae; identical to SEQ ID NO: 9108

SEQ ID NO: 9754 - DNA, 1452 bp, Vibrio cholerae; identical to SEQ ID NO: 9109

SEQ ID NO: 9755 - DNA, 3450 bp, Vibrio cholerae; identical to SEQ ID NO: 9118

SEQ ID NO: 9756 - DNA, 2064 bp, Vibrio cholerae; identical to SEQ ID NO: 9169

SEQ ID NO: 9757 - DNA, 735 bp, Vibrio cholerae; identical to SEQ ID NO: 9108

SEQ ID NO: 9758 - DNA, 1452 bp, Vibrio cholerae; identical to SEQ ID NO: 9109

SEQ ID NO: 9759 - DNA, 3450 bp, Vibrio cholerae; identical to SEQ ID NO: 9118

SEQ ID NO: 9760 - DNA, 2064 bp, Vibrio cholerae; identical to SEQ ID NO: 9169

SEQ ID NO: 9761 - DNA, 735 bp, Vibrio cholerae; identical to SEQ ID NO: 9108

SEQ ID NO: 9762 - DNA, 1452 bp, Vibrio cholerae; identical to SEQ ID NO: 9109

SEQ ID NO: 9763 - DNA, 3450 bp, Vibrio cholerae; identical to SEQ ID NO: 9118

SEQ ID NO: 9764 - DNA, 2064 bp, Vibrio cholerae; identical to SEQ ID NO: 9169

SEQ ID NO: 9765 - DNA, 735 bp, Vibrio cholerae; identical to SEQ ID NO: 9108

SEQ ID NO: 9766 - DNA, 1452 bp, Vibrio cholerae; identical to SEQ ID NO: 9109

SEQ ID NO: 9767 - DNA, 3450 bp, Vibrio cholerae; identical to SEQ ID NO: 9118

SEQ ID NO: 9768 - DNA, 2121 bp, Vibrio cholerae; identical to SEQ ID NO: 9107

SEQ ID NO: 9769 - DNA, 735 bp, Vibrio cholerae; identical to SEQ ID NO: 9108

SEQ ID NO: 9770 - DNA, 1452 bp, Vibrio cholerae; identical to SEQ ID NO: 9109

SEQ ID NO: 9771 - DNA, 3450 bp, Vibrio cholerae; identical to SEQ ID NO: 9118

SEQ ID NO: 9772 - DNA, 2064 bp, Vibrio cholerae; identical to SEQ ID NO: 9169

SEQ ID NO: 9773 - DNA, 735 bp, Vibrio cholerae; identical to SEQ ID NO: 9108

SEQ ID NO: 9774 - DNA, 1452 bp, Vibrio cholerae; identical to SEQ ID NO: 9109

SEQ ID NO: 9775 - DNA, 3450 bp, Vibrio cholerae; identical to SEQ ID NO: 9118

SEQ ID NO: 9776 - DNA, 2064 bp, Vibrio cholerae; identical to SEQ ID NO: 9169

SEQ ID NO: 9777 - DNA, 735 bp, Vibrio cholerae; identical to SEQ ID NO: 9108

SEQ ID NO: 9778 - DNA, 1452 bp, Vibrio cholerae; identical to SEQ ID NO: 9109

SEQ ID NO: 9779 - DNA, 3450 bp, Vibrio cholerae; identical to SEQ ID NO: 9118

SEQ ID NO: 9780 - DNA, 1332 bp, Vibrio cholerae
atgcaggagtcactcattcaggcaactcagggtattcaacaaggtctcgagagtagtctggaaaaaatcatggctccggctatcaataagctcgttgacgaaacatctgacgggaatcaaaaagcactggaaagcgttcttcaatctttcatggagggttttggtcaacaaggcgaacaacaacgtgtcgcgatggactctgcgtctcaaaacgtaaataagacgctagaatcaatgagcgtttcgatggctgctttcgtcaataagttggaagttcagcaaaacgcatcttcagaaagagagaaagaactgatctcaactatttcagttcaagtttctgagctagttactcagggtaatgagcagaagcgtgttctaacagagtttgtagaaaaacaagtctcagagttaggtgagcagcttactaaaagagaattagctgcttctgaacgtgaacagaaattggcttcctcaatggaaagtacgattaaagatttagtagaaaatgtttcagcacaaagccaagtcttgaccgattttgttcagaatcaagttgtccaacttacccaaacgttctccgaacgagatggaatggcaagtcagatggaaaaagagcgtaatgatatatttgtgaatcaaacgcaggcgatgaaagctggaacggatgagcttcttgctcaagtgaaagcggcgactgaatcacaacaaatcacaactaatagtattattgagcaaggtaaacaattacaaaatagtatcgattcctctgtttcggcatctgctcgagctacggagagtatgcagcagtcggcgaatgagttacgagttgccgctgatagtatgaatgtgtttggttccaacatcaaagatgcgggcaacaaactatctggtgctgttactgaagcggttaacagcacgaaggatttagcggaacaaaaccatctaggcgcagtgaaagttcaagcgttgagggagcagttgctggaagatacaagtaagtttagcgcgattgcagatcagataaacaatatgctgattagtgcagaacagtcgtttagcacgcttcgtactacccaaaatgagttccttgcagaacaaaaaggtaatctaaacgaactcacttcagaaatgaaacgtaatgtgaaagagttgacggagcaaatggctcaactgcttgaagattacgcagagcaagccaatggacaaaccgccgagcacctcaaagtttgggccaatagtagcacacaatatgcagagagcatgaatacagcagttagagctatttctagtgttgtcgatgaaattcaagataaagtgagccaacatgcgtag

SEQ ID NO: 9781 - DNA, 735 bp, Vibrio cholerae; identical to SEQ ID NO: 9108

SEQ ID NO: 9782 - DNA, 702 bp, Vibrio cholerae
gtggttcatttagagcggtactggaacccagctaaagaagctcaagctacggatagggtttatcgtatcggacaggaaaaagaggttcatatctacatccctctgttgcatcaccctgaatttgaatcatttgatgtaaacctacataggctacttacccaaaaaacgttgctgaaggatgctgttgttacaccagaagatgttattccacagccagcaggtgtcgggggagtagtttctggtgatttgattgataaacgtattacagcggctgaacttgataagttaagttggcagcaatttgaagcgttatgtgtagaattgcttgcaaagattacggatagtgaaagcgcttggttgacgaacaatggtgctgatcatggtgctgatggtgtactacttaataacagtggtaatattttgcttcaggctaagtttacgcaacgacaatatgatggttataaagggatacaggagattcattctgctaaacctatttatgaatcagcaatgagaagttcttttgggcgtttgatttttgttactaattcacctttgttagctaagcgaactcatgaaattgctgccacatgtggtattgaagttttgggcagaacacagctgttaacttaccttgaagaatatgacattacactgaaagacattctgtcaaggttggggaaagatcgattaagagtttaa

SEQ ID NO: 9783 - DNA, 1332 bp, Vibrio cholerae; identical to SEQ ID NO: 9780

SEQ ID NO: 9784 - DNA, 735 bp, Vibrio cholerae; identical to SEQ ID NO: 9108

SEQ ID NO: 9785 - DNA, 1053 bp, Vibrio cholerae
ttggaggctaaaaggctgcgaggcaatgatgagcagtttgatgaaaatatattgtcaaccaatggcctcaagtggcttgcggaaagggctattcaaaataatgtcgattttgatcatttaattgcggagatgaagctggaacgttatgcaaatggcagatatttaacggcggctaaaggcatctactatattgagcagttaaacactataccattaggccaagatcatcctctcctagaggaggttcaaaaaacggtggtttttgattctcgatatgactctgaaagtttgttagggcatcaaattcttagaattttgattggccgatcgataggttctcacatcagtgagccttggatgaatgtgatcttagcaattggcggtgacccacgagtaccaagttcaaatccaagatatattaagtggtggaagagtttagaaccaaatctggttcaagctgttctcggatggttatcaaaactagacttgaagttgtttctggaagcgttggaggattattcttactcttcagctaattacgagctacagagaatgtacccatctcggaaaagtttcttagaggggatgttcgatgcgggggttatttcaaatacccggctttatttgagtctggatgctgcaaggtatttgaagagaaattatgaccctaagcacttgccaaatttctctactgttaaagatggtgacaaatcgataatttatgtgcaaatgaacggcgctcacatggttgaggggagccatagttgttatttgtggttgtaccggtatcttgacccttccgtttgtgtgtttaactataacattgatagtcctacgtactcacaactcacaatcggtataaacaatcaaatgtccagattgtcatctggtgcagttgctaaaataacgcactctccgagtggttacgcatggcaacgaaaagcacttatagcactaagagagttaggtgttaaattgacgccgaaagatgtgctttcgaatgaagattatattgattttaaacaacgttatggggtgcgagagtggagttaa

SEQ ID NO: 9786 - DNA, 1242 bp, Vibrio cholerae
atgtatgctggtggagaatttgaaaactggaagtatttagaagaacttaagtcgacaatggttggctaccagagagatgtttacgaaggagcgattagccatcaactcgagaatgaagaaagtcacgcgcttaccactttgatgcggctaagagatagttcgttacatcctcggttaagtgatggaggtcgccttgatattcccaaaaatgcaaaatcagctagagctctatacggagaatcaggaaaattagtttccttgcttgagactttagacagagtacgaagcaaacaagaaaagtgcattatttttgcggttaacaaacgactgcaaagtttcttaagtgtgactttggggcagatctataacctaggtccgctctcagttattaatggtgatgcaaaagccgtagcaaagcgtaaatctgtcccaactcgaaaatcaatgatttcagacttcgaagtaaaagaaggctttaatctaattgtaatgtctccagtcgcggctggtgtcggtttaactgtggtcggtgcgaatcatgtggttcatttagagcggtactggaacccagctaaagaagctcaagctacggatagggtttatcgtatcggacaggaaaaagaggttcatatctacatccctctgttgcatcaccctgaatttgaatcatttgatgtaaacctacataggctacttacccaaaaaacgttgctgaaggatgctgttgttacaccagaagatgttattccacagccagcaggtgtcgggggagtagtttctggtgatttgattgataaacgtattacagcggctgaacttgataagttaagttggcagcaatttgaagcgttatgtgtagaattgcttgcaaagattacggatagtgaaagcgcttggttgacgaacaatggtgctgatcatggtgctgatggtgtactacttaataacagtggtaatattttgcttcaggctaagtttacgcaacgacaatatgatggttataaagggatacaggagattcattctgctaaacctatttatgaatcagcaatgagaagttcttttgggcgtttgatttttgttactaattcacctttgttagctaagcgaactcatgaaattgctgccacatgtggtattgaagttttgggcagaacacagctgttaacttaccttgaagaatatgacattacactgaaagacattctgtcaaggttggggaaagatcgattaagagtttaa

SEQ ID NO: 9787 - DNA, 2121 bp, Vibrio cholerae; identical to SEQ ID NO: 9111

SEQ ID NO: 9788 - DNA, 735 bp, Vibrio cholerae; identical to SEQ ID NO: 9108

SEQ ID NO: 9789 - DNA, 324 bp, Vibrio cholerae
atgaacggcgctcacatggttgaggggagccatagttgttatttgtggttgtaccggtatcttgacccttccgtttgtgtgtttaactataacattgatagtcctacgtactcacaactcacaatcggtataaacaatcaaatgtccagattgtcatctggtgcagttgctaaaataacgcactctccgagtggttacgcatggcaacgaaaagcacttatagcactaagagagttaggtgttaaattgacgccgaaagatgtgctttcgaatgaagattatattgattttaaacaacgttatggggtgcgagagtggagttaa

SEQ ID NO: 9790 - DNA, 1491 bp, Vibrio cholerae
gtggctacgggtacgcctgtagaaaacagcttagccgatttttggtgtttaatggatacagcttgcccaggacatctgggtagctatcaagaatttcgtgctcgttatatctcaccaattcttaaagctgctggtgatgaagttgaagaaataagagctaggcttggaagagaacttcgtatagctgtcggggcattgatgcttaggcgcattaaagaggacaaccttaaagggttacctctaaaacatatgtatgctggtggagaatttgaaaactggaagtatttagaagaacttaagtcgacaatggttggctaccagagagatgtttacgaaggagcgattagccatcaactcgagaatgaagaaagtcacgcgcttaccactttgatgcggctaagagatagttcgttacatcctcggttaagtgatggaggtcgccttgatattcccaaaaatgcaaaatcagctagagctctatacggagaatcaggaaaattagtttccttgcttgagactttagacagagtacgaagcaaacaagaaaagtgcattatttttgcggttaacaaacgactgcaaagtttcttaagtgtgactttggggcagatctataacctaggtccgctctcagttattaatggtgatgcaaaagccgtagcaaagcgtaaatctgtcccaactcgaaaatcaatgatttcagacttcgaagcaaaagaaggctttaatctaattgtaatgtctccagtcgcggctggtgtcggtttaactgtggtcggtgcgaatcatgtggttcatttagagcggtactggaacccagctaaagaagctcaagctacggatagggtttatcgtatcggacaggaaaaagaggttcatatctacatccctctgttgcatcaccctgaatttgaatcatttgatgtaaacctacataggctacttacccaaaaaacgttgctgaaggatgctgttgttacaccagaagatgttattccacagccagcaggtgtcgggggagtagtttctggtgatttgattgataaacgtattacagcggctgaacttgataagttaagttggcagcaatttgaagcgttatgtgtagaattgcttgcaaagattacggatagtgaaagcgcttggttgacgaacaatggtgctgatcatggtgctgatggtgtactacttaataacagtggtaatattttgcttcaggctaagtttacgcaacgacaatatgatggttataaagggatacaggagattcattctgctaaacctatttatgaatcagcaatgagaagttcttttgggcgtttgatttttgttactaattcacctttgttagctaagcgaactcatgaaattgctgccacatgtggtattgaagttttgggcagaacacagctgttaacttaccttgaagaatatgacattacactgaaagacattctgtcaaggttggggaaagatcgattaagagtttaa

SEQ ID NO: 9791 - DNA, 657 bp, Vibrio cholerae; identical to SEQ ID NO: 9218

SEQ ID NO: 9792 - DNA, 600 bp, Vibrio cholerae
  modified_base (506)..(549): a, c, t, g, unknown or other
ttgttagggcatcaaattcttagaattttgattggccgatcgataggttctcacatcagtgagccttggatgaatgtgatcttagcaattggcggtgacccacgagtaccaagttcaaatccaagatatattaagtggtggaagagtttagaaccaaatctggttcaagctgttctcggatggttatcaaaactagacttgaagttgtttctggaagcgttggaggattattcttactcttcagctaattacgagctacagagaatgtacccatctcggaaaagtttcttagaggggatgttcgatgcgggggttatttcaaatacccggctttatttgagtctggatgctgcaaggtatttgaagagaaattatgaccctaagcacttgccaaatttctctactgttaaagatggtgacaaatcgataatttatgtgcaaatgaacggcgctcacatggttgaggggagccatagttgttatttgtggttgtaccggtatcttgnnnnnnnnnnnnnnnnnnnnnnnnnnnnnnnnnnnnnnnnnnnnttaactataacattgatagtcctacgtactcacaactcacaatcggtataa

SEQ ID NO: 9793 - DNA, 984 bp, Vibrio cholerae; identical to SEQ ID NO: 9723

SEQ ID NO: 9794 - DNA, 2064 bp, Vibrio cholerae; identical to SEQ ID NO: 9169

SEQ ID NO: 9795 - DNA, 735 bp, Vibrio cholerae; identical to SEQ ID NO: 9108

SEQ ID NO: 9796 - DNA, 924 bp, Vibrio cholerae
atgaagctggaacgttatgcaaatggcagatatttaacggcggctaaaggcatctactatattgagcagttaaacactataccattaggccaagatcatcctctcctagaggaggttcaaaaaacggtggtttttgattctcgatatgactctgaaagtttgttagggcatcaaattcttagaattttgattggccgatcgataggttctcacatcagtgagccttggatgaatgtgatcttagcaattggcggtgacccacgagtaccaagttcaaatccaagatatattaagtggtggaagagtttagaaccaaatctggttcaagctgttctcggatggttatcaaaactagacttgaagttgtttctggaagcgttggaggattattcttactcttcagctaattacgagctacagagaatgtacccatctcggaaaagtttcttagaggggatgttcgatgcgggggttatttcaaatacccggctttatttgagtctggatgctgcaaggtatttgaagagaaattatgaccctaagcacttgccaaatttctctactgttaaagatggtgacaaatcgataatttatgtgcaaatgaacggcgctcacatggttgaggggagccatagttgttatttgtggttgtaccggtatcttgacccttccgtttgtgtgtttaactataacattgatagtcctacgtactcacaactcacaatcggtataaacaatcaaatgtccagattgtcatctggtgcagttgctaaaataacgcactctccgagtggttacgcatggcaacgaaaagcacttatagcactaagagagttaggtgttaaattgacgccgaaagatgtgctttcgaatgaagattatattgattttaaacaacgttatggggtgcgagagtggagttaa

SEQ ID NO: 9797 - DNA, 3474 bp, Vibrio cholerae
  modified_base (805)..(852): a, c, t, g, unknown or other
gtggagttaacctctttaatcagcaagttcttctctagctcagataaaacgtctcagtttgaactcatttgtgatgatagtcttgattttgcaacttccagaaaaactctagagaaaattaaagctgatgagtggataacagcgcagtatgttgcacttaaaatgcttgaagagcagggggatgtaagctcatttccagatggcttcattatgcctgccgatacagctgtcagactcgattctgagttgagggatttgtttagtttgcccccggtttggaaaggagtcattgacgctgatattcaaggaaaagctagtacacccacctttaaaattgatctttcggtcacaaccaaacaaggtcgaacaacactaaattacactgtggatgggcctttcattcggtttagtcaaaatgagcagtacctgctaacacccgagcagcttatggtatttattgcgcataaaacccatgtaaggtctgataggtctgaatatgataacttactgtacttacactctttgcaagaggcccaaaagaatggttgtaagctgaatctaaagcactttgaaaggctaagaatattgacaccaaataaaatcacagtagaagcagaattgaattctcaaggcgagctaatattgacgccaaacatggggcaaagtgcgagtcatgagtcgattcaaaaggttttggggcagttgcaaagcgacaacgcagttactctgaaagtgggtgatgaaatagtcttattttctgaagaaaagctaatggctgtaaaagaagttattagcaacagggtannnnnnnnnnnnnnnnnnnnnnnnnnnnnnnnnnnnnnnnnnnnnnnngttaaagcgttcctggaaaaccctacagcatatattgatgcgagtttagtcgatcttgatttaggtttttctatcagagttcatggtgcgacagtttttaaacatgcttattttggagaaacggacgagtcaggtatagattggttcggagcctcccccacatctgatttgattaatccaatatccaagctgactgatagagttcgcgataaaacaactcttgaggacgtagctaagaagattgaagatgcacgacaaaccggagcaaccgtttttgattatgaaggacaatcatacgatatcagcgatcctgcagctgttgaaaaagttctaaacgaaataggtcacaagatatctagccctaatacagatctttctagctacggagaggcagaagacgccgagactgaatcagaaggctcagaaatacatgttgttgatattgatctaaatgacgaagagctgtctgaaaattctcctaaagttgaacaactgatttctgatatttcatgggatggtgagttaaattgggaaaaccacaagcggacaccattcccacaccaggatattggtgttcgttggattttaggcgttgaacaaaaaagcttatcagactcgaaagttagtggagccttgctagctgatgacatggggttaggtaagacttttatggccctctcagcaatagaacatatttatcaacgacaacaaattagtggtgaaacgaagaaacctgcgttgatagttgctcctttgagtttattggaaaactggaaggatgaggtagataaaacctttaaacactcaccattcaaagatgtagttattttgcaatcatccgctgagttaaatgagtatcgcatggggggcgtagagattcgaggccagagcgcatctgatgattgtttagaacccaaatattctttgaaagttgggaaatactttggtcctagccgtttagatctaccagagcgattggtaatcactacttatcaaactttgcgcgattaccagttctccatgtgtttgattgattgggggatcgtggttttcgatgaagcccagaacattaaaaatccaaatgcacttcaaactcgtgctgcgaaaggcctaaaagcggatttcaaactagtggctacgggtacgcctgtagaaaacagcttagccgatttttggtgtttaatggatacagcttgcccaggacatctgggtagctatcaagaatttcgtgctcgttatatctcaccaattcttaaagctgctggtgatgaagttgaagaaataagagctaggcttggaagagaacttcgtatagctgtcggggcattgatgcttaggcgcattaaagaggacaaccttaaagggttacctctaaaacatatgtatgctggtggagaatttgaaaactggaagtatttagaagaacttaagtcgacaatggttggctaccagagagatgtttacgaaggagcgattagccatcaactcgagaatgaagaaagtcacgcgcttaccactttgatgcggctaagagatagttcgttacatcctcggttaagtgatggaggtcgccttgatattcccaaaaatgcaaaatcagctagagctctatacggagaatcaggaaaattagtttccttgcttgagactttagacagagtacgaagcaaacaagaaaagtgcattatttttgcggttaacaaacgactgcaaagtttcttaagtgtgactttggggcagatctataacctaggtccgctctcagttattaatggtgatgcaaaagccgtagcaaagcgtaaatctgtcccaactcgaaaatcaatgatttcagacttcgaagcaaaagaaggctttaatctaattgtaatgtctccagtcgcggctggtgtcggtttaactgtggtcggtgcgaatcatgtggttcatttagagcggtactggaacccagctaaagaagctcaagctacggatagggtttatcgtatcggacaggaaaaagaggttcatatctacatccctctgttgcatcaccctgaatttgaatcatttgatgtaaacctacataggctacttacccaaaaaacgttgctgaaggatgctgttgttacaccagaagatgttattccacagccagcaggtgtcgggggagtagtttctggtgatttgattgataaacgtattacagcggctgaacttgataagttaagttggcagcaatttgaagcgttatgtgtagaattgcttgcaaagattacggatagtgaaagcgcttggttgacgaacaatggtgctgatcatggtgctgatggtgtactacttaataacagtggtaatattttgcttcaggctaagtttacgcaacgacaatatgatggttataaagggatacaggagattcattctgctaaacctatttatgaatcagcaatgagaagttcttttgggcgtttgatttttgttactaattcacctttgttagctaagcgaactcatgaaattgctgccacatgtggtattgaagttttgggcagaacacagctgttaacttaccttgaagaatatgacattacactgaaagacattctgtcaaggttggggaaagatcgattaagagtttaa

SEQ ID NO: 9798 - DNA, 735 bp, Vibrio cholerae; identical to SEQ ID NO: 9108

SEQ ID NO: 9799 - DNA, 1083 bp, Vibrio cholerae
  modified_base (1035)..(1077): a, c, t, g, unknown or other
gtgagtctaaatataaaaaagctcaaagttagtttgcctgctaatccttttggtcaagccatcaaggactttgcacatctatcgagtcagctagaagtgctttctaagagtgccggtattgaaaacaataagttccgaactgcatatggagaagtatgtaatgcgcttgcctctaagaaaagagttgaggacgttatagatagctctgtacacgttcgcgccttagctctttcgctacatacggatgcgaagaaaaatgtcagctttacgcgcagattgcttaataaaattacagaaattgtaaaaaaaccaagctctttagtcatagagtcgttttatcagcatttcttatcagagtatgaccgactggcagacttggaagctacagcagactggttgttggaggctaaaaggctgcgaggcaatgatgagcagtttgatgaaaatatattgtcaaccaatggccccaagtggcttgcggaaagggctattcaaaataatgtcgattttgatcatttaattgcggagatgaagctggaacgttatgcaaatggcagatatttaacggcggctaaaggcatctactatattgagcagttaaacactataccattaggccaagatcatcctctcctagaggaggttcaaaaaacggtggtttttgattctcgatatgactctgaaagtttgttagggcatcaaattcttagaattttgattggccgatcgataggttctcacatcagtgagccttggatgaatgtgatcttagcaattggcggtgacccacgagtaccaagttcaaatccaagatatattaagtggtggaagagtttagaaccaaatctggttcaagctgttctcggatggttatcaaaactagacttgaagttgtttctggaagcgttggaggattattcttactcttcagctaattacgagctacagagaatgtacccatctcggaaaagtttcttagaggggatgttcgatgcgggggttatttcaaatacccggctttatttgagtctggannnnnnnnnnnnnnnnnnnnnnnnnnnnnnnnnnnnnnnnnnnttatga

SEQ ID NO: 9800 - DNA, 1308 bp, Vibrio cholerae
  modified_base (1240)..(1281): a, c, t, g, unknown or other
atggggttaggtaagacttttatggccctctcagcaatagaacatatttatcaacgacaacaaattagtggtgaaacgaagaaacctgcgttgatagttgctcctttgagtttattggaaaactggaaggatgaggtagataaaacctttaaacactcaccattcaaagatgtagttattttgcaatcatccgctgagttaaatgagtatcgcatggggggcgtagagattcgaggccagagcgcatctgatgattgtttagaacccaaatattctttgaaagttgggaaatactttggtcctagccgtttagatctaccagagcgattggtaatcactacttatcaaactttgcgcgattaccagttctccatgtgtttgattgattgggggatcgtggttttcgatgaagcccagaacattaaaaatccaaatgcacttcaaactcgtgctgcgaaaggcctaaaagcggatttcaaactagtggctacgggtacgcctgtagaaaacagcttagccgatttttggtgtttaatggatacagcttgcccaggacatctgggtagctatcaagaatttcgtgctcgttatatctcaccaattcttaaagctgctggtgatgaagttgaagaaataagagctaggcttggaagagaacttcgtatagctgtcggggcattgatgcttaggcgcattaaagaggacaaccttaaagggttacctctaaaacatatgtatgctggtggagaatttgaaaactggaagtatttagaagaacttaagtcgacaatggttggctaccagagagatgtttacgaaggagcgattagccatcaactcgagaatgaagaaagtcacgcgcttaccactttgatgcggctaagagatagttcgttacatcctcggttaagtgatggaggtcgccttgatattcccaaaaatgcaaaatcagctagagctctatacggagaatcaggaaaattagtttccttgcttgagactttagacagagtacgaagcaaacaagaaaagtgcattatttttgcggttaacaaacgactgcaaagtttcttaagtgtgactttggggcagatctataacctaggtccgctctcagttattaatggtgatgcaaaagccgtagcaaagcgtaaatctgtcccaactcgaaaatcaatgatttcagacttcgaagcaaaagaaggctttaatctaattgtaatgtctccagtcgcggctnnnnnnnnnnnnnnnnnnnnnnnnnnnnnnnnnnnnnnnnnntcggtgcgaatcatgtggttcatttag

SEQ ID NO: 9801 - DNA, 2064 bp, Vibrio cholerae; identical to SEQ ID NO: 9169

SEQ ID NO: 9802 - DNA, 735 bp, Vibrio cholerae; identical to SEQ ID NO: 9108

SEQ ID NO: 9803 - DNA, 1452 bp, Vibrio cholerae; identical to SEQ ID NO: 9109

SEQ ID NO: 9804 - DNA, 3450 bp, Vibrio cholerae; identical to SEQ ID NO: 9118

SEQ ID NO: 9805 - DNA, 735 bp, Vibrio cholerae; identical to SEQ ID NO: 9108

SEQ ID NO: 9806 - DNA, 696 bp, Vibrio cholerae
atgaatgtgatcttagcaattggcggtgacccacgagtaccaagttcaaatccaagatatattaagtggtggaagagtttagaaccaaatctggttcaagctgttctcggatggttatcaaaactagacttgaagttgtttctggaagcgttggaggattattcttactcttcagctaattacgagctacagagaatgtacccatctcggaaaagtttcttagaggggatgttcgatgcgggggttatttcaaatacccggctttatttgagtctggatgctgcaaggtatttgaagagaaattatgaccctaagcacttgccaaatttctctactgttaaagatggtgacaaatcgataatttatgtgcaaatgaacggcgctcacatggttgaggggagccatagttgttatttgtggttgtaccggtatcttgacccttccgtttgtgtgtttaactataacattgatagtcctacgtactcacaactcacaatcggtataaacaatcaaatgtccagattgtcatctggtgcagttgctaaaataacgcactctccgagtggttacgcatggcaacgaaaagcacttatagcactaagagagttaggagttaaattgacgccgaaagatgtgctttcgaatgaagattatattgattttaaacaacgttatggggtgcgagagtggagttaa

SEQ ID NO: 9807 - DNA, 1953 bp, Vibrio cholerae; identical to SEQ ID NO: 9588

SEQ ID NO: 9808 - DNA, 2121 bp, Vibrio cholerae; identical to SEQ ID NO: 9111

SEQ ID NO: 9809 - DNA, 735 bp, Vibrio cholerae; identical to SEQ ID NO: 9108

SEQ ID NO: 9810 - DNA, 1452 bp, Vibrio cholerae; identical to SEQ ID NO: 9113

SEQ ID NO: 9811 - DNA, 2064 bp, Vibrio cholerae; identical to SEQ ID NO: 9169

SEQ ID NO: 9812 - DNA, 735 bp, Vibrio cholerae; identical to SEQ ID NO: 9108

SEQ ID NO: 9813 - DNA, 1452 bp, Vibrio cholerae; identical to SEQ ID NO: 9109

SEQ ID NO: 9814 - DNA, 3450 bp, Vibrio cholerae; identical to SEQ ID NO: 9118

SEQ ID NO: 9815 - DNA, 735 bp, Vibrio cholerae; identical to SEQ ID NO: 9108

SEQ ID NO: 9816 - DNA, 1452 bp, Vibrio cholerae; identical to SEQ ID NO: 9109

SEQ ID NO: 9817 - DNA, 1974 bp, Vibrio cholerae; identical to SEQ ID NO: 9616

SEQ ID NO: 9818 - DNA, 2064 bp, Vibrio cholerae; identical to SEQ ID NO: 9652

SEQ ID NO: 9819 - DNA, 735 bp, Vibrio cholerae; identical to SEQ ID NO: 9108

SEQ ID NO: 9820 - DNA, 1452 bp, Vibrio cholerae; identical to SEQ ID NO: 9109

SEQ ID NO: 9821 - DNA, 3450 bp, Vibrio cholerae; identical to SEQ ID NO: 9118

SEQ ID NO: 9822 - DNA, 2064 bp, Vibrio cholerae; identical to SEQ ID NO: 9169

SEQ ID NO: 9823 - DNA, 735 bp, Vibrio cholerae; identical to SEQ ID NO: 9108

SEQ ID NO: 9824 - DNA, 1452 bp, Vibrio cholerae; identical to SEQ ID NO: 9109

SEQ ID NO: 9825 - DNA, 3450 bp, Vibrio cholerae; identical to SEQ ID NO: 9118

SEQ ID NO: 9826 - DNA, 2064 bp, Vibrio cholerae; identical to SEQ ID NO: 9169

SEQ ID NO: 9827 - DNA, 735 bp, Vibrio cholerae; identical to SEQ ID NO: 9108

SEQ ID NO: 9828 - DNA, 1452 bp, Vibrio cholerae; identical to SEQ ID NO: 9109

SEQ ID NO: 9829 - DNA, 3450 bp, Vibrio cholerae; identical to SEQ ID NO: 9118

SEQ ID NO: 9830 - DNA, 2064 bp, Vibrio cholerae; identical to SEQ ID NO: 9169

SEQ ID NO: 9831 - DNA, 735 bp, Vibrio cholerae; identical to SEQ ID NO: 9108

SEQ ID NO: 9832 - DNA, 1452 bp, Vibrio cholerae; identical to SEQ ID NO: 9113

SEQ ID NO: 9833 - DNA, 3450 bp, Vibrio cholerae; identical to SEQ ID NO: 9118

SEQ ID NO: 9834 - DNA, 2148 bp, Vibrio cholerae
  modified_base (432)..(479): a, c, t, g, unknown or other
atgaccgatagccttaatctttccagcttatggccagacttgagcagtctaaatgtaatgccacctcaaactcctgagcaattgagtgctttgtttgtggttattttatggggtgtcgctctatttttcttaatttggtcagttgctgcatttattcgcgcaagacaacgagtagtttggcttaacaaatctttggatgatgcggagaaatcgactctgtcaggtgttcgaaatgatttaatttctagagctgaacaaaaaaaagattcagtagggcatttatggctcgagtttgatgaaacattgcttgaagtaaaaggtgctgatgacgttgttcgattgcataacacatttgatgctgactatttttttaatagttctagtttagctggtggtagtactgaaaacagaatgattgcggtggttccaggnnnnnnnnnnnnnnnnnnnnnnnnnnnnnnnnnnnnnnnnnnnnnnnntattggtacttttgtcggtttacagctaggactttcagatctcaatatcgcgggcaacgttgatgtcaatgaaatgaaaaatggcgttgctggagttataaatggtgcaaaaatcgcatttatgacatcggtttggggcgtgctactcagtgttgcatttaatttcattgagaagatacttgagcaaattattagaaagaaaattaagtctttgcaaaaccgtattgacaggatgttccctcgattaagtgcggaatatcaactgcaatctattgcaaataacagccagcaatctcgagaaagcctacaaggacttgctgagaaaataggcgagaaaatgcaggagtcactcattcaggcaactcagggtattcaacaaggtctcgagagtagtctggaaaaaatcatggctccggctatcaataagctcgttgacgaaacatctgacgggaatcaaaaagcactggaaagcgttcttcaatctttcatggagggttttggtcaacaaggcgaacaacaacgtgtcgcgatggactctgcgtctcaaaacgtaaataagacgctagaatcaatgagcgtttcgatggctgctttcgtcaataagttggaagttcagcaaaacgcatcttcagaaagagagaaagaactgatctcaactatttcagttcaagtttctgagctagttactcagggtaatgagcagaagcgtgttctaacagagtttgtagaaaaacaagtctcagagttaggtgagcagcttactaaaagagaattagctgcttctgaacgtgaacagaaattggcttcctcaatggaaagtacgattaaagatttagtagaaaatgtttcagcacaaagccaagtcttgaccgattttgttcagaatcaagttgtccaacttacccaaacgttctccgaacgagatggaatggcaagtcagatggaaaaagagcgtaatgatatatttgtgaatcaaacgcaggcgatgaaagctggaacggatgagcttcttgctcaagtgaaagcggcgactgaatcacaacaaatcacaactaatagtattattgagcaaggtaaacaattacaaaatagtatcgattcctctgtttcggcatctgctcgagctacggagagtatgcagcagtcggcgaatgagttacgagttgccgctgatagtatgaatgtgtttggttccaacatcaaagatgcgggcaacaaactatctggtgctgttactgaagcggttaacagcacgaaggatttagcggaacaaaaccatctaggcgcagtgaaagttcaagcgttgagggagcagttgctggaagatacaagtaagtttagcgcgattgcagatcagataaacaatatgctgattagtgcagaacagtcgtttagcacgcttcgtactacccaaaatgagttccttgcagaacaaaaaggtaatctaaacgaactcacttcagaaatgaaacgtaatgtgaaagagttgacggagcaaatggctcaactgcttgaagattacgcagagcaagccaatggacaaaccgccgagcacctcaaagtttgggccaatagtagcacacaatatgcagagagcatgaatacagcagttagagctatttctagtgttgtcgatgaaattcaagataaagtgagccaacatgcgtag

SEQ ID NO: 9835 - DNA, 735 bp, Vibrio cholerae; identical to SEQ ID NO: 9108

SEQ ID NO: 9836 - DNA, 798 bp, Vibrio cholerae; identical to SEQ ID NO: 9696

SEQ ID NO: 9837 - DNA, 3441 bp, Vibrio cholerae; identical to SEQ ID NO: 9114

SEQ ID NO: 9838 - DNA, 2064 bp, Vibrio cholerae; identical to SEQ ID NO: 9169

SEQ ID NO: 9839 - DNA, 735 bp, Vibrio cholerae; identical to SEQ ID NO: 9108

SEQ ID NO: 9840 - DNA, 1452 bp, Vibrio cholerae; identical to SEQ ID NO: 9109

SEQ ID NO: 9841 - DNA, 3450 bp, Vibrio cholerae; identical to SEQ ID NO: 9118

SEQ ID NO: 9842 - DNA, 2064 bp, Vibrio cholerae; identical to SEQ ID NO: 9169

SEQ ID NO: 9843 - DNA, 735 bp, Vibrio cholerae; identical to SEQ ID NO: 9108

SEQ ID NO: 9844 - DNA, 1452 bp, Vibrio cholerae; identical to SEQ ID NO: 9109

SEQ ID NO: 9845 - DNA, 3450 bp, Vibrio cholerae; identical to SEQ ID NO: 9118

SEQ ID NO: 9846 - DNA, 2064 bp, Vibrio cholerae; identical to SEQ ID NO: 9169

SEQ ID NO: 9847 - DNA, 735 bp, Vibrio cholerae; identical to SEQ ID NO: 9108

SEQ ID NO: 9848 - DNA, 1452 bp, Vibrio cholerae; identical to SEQ ID NO: 9109

SEQ ID NO: 9849 - DNA, 3450 bp, Vibrio cholerae; identical to SEQ ID NO: 9118

SEQ ID NO: 9850 - DNA, 2064 bp, Vibrio cholerae; identical to SEQ ID NO: 9169

SEQ ID NO: 9851 - DNA, 735 bp, Vibrio cholerae; identical to SEQ ID NO: 9108

SEQ ID NO: 9852 - DNA, 1452 bp, Vibrio cholerae; identical to SEQ ID NO: 9109

SEQ ID NO: 9853 - DNA, 3450 bp, Vibrio cholerae; identical to SEQ ID NO: 9118

SEQ ID NO: 9854 - DNA, 2121 bp, Vibrio cholerae; identical to SEQ ID NO: 9107

SEQ ID NO: 9855 - DNA, 735 bp, Vibrio cholerae; identical to SEQ ID NO: 9108

SEQ ID NO: 9856 - DNA, 1452 bp, Vibrio cholerae; identical to SEQ ID NO: 9109

SEQ ID NO: 9857 - DNA, 1101 bp, Vibrio cholerae
atgcggctaagagatagttcgttacatcctcggttaagtgatggaggtcgccttgatattcccaaaaatgcaaaatcagctagagctctatacggagaatcaggaaaattagtttccttgcttgagactttagacagagtacgaagcaaacaagaaaagtgcattatttttgcggttaacaaacgactgcaaagtttcttaagtgtgactttggggcagatctataacctaggtccgctctcagttattaatggtgatgcaaaagccgtagcaaagcgtaaatctgtcccaactcgaaaatcaatgatttcagacttcgaagcaaaagaaggctttaatctaattgtaatgtctccagtcgcggctggtgtcggtttaactgtggtcggtgcgaatcatgtggttcatttagagcggtactggaacccagctaaagaagctcaagctacggatagggtttatcgtatcggacaggaaaaagaggttcatatctacatccctctgttgcatcaccctgaatttgaatcatttgatgtaaacctacataggctacttacccaaaaaacgttgctgaaggatgctgttgttacaccagaagatgttattccacagccagcaggtgtcgggggagtagtttctggtgatttgattgataaacgtattacagcggctgaacttgataagttaagttggcagcaatttgaagcgttatgtgtagaattgcttgcaaagattacggatagtgaaagcgcttggttgacgaacaatggtgctgatcatggtgctgatggtgtactacttaataacagtggtaatattttgcttcaggctaagtttacgcaacgacaatatgatggttataaagggatacaggagattcattctgctaaacctatttatgaatcagcaatgagaagttcttttgggcgtttgatttttgttactaattcacctttgttagctaagcgaactcatgaaattgctgccacatgtggtattgaagttttgggcagaacacagctgttaacttaccttgaagaatatgacattacactgaaagacattctgtcaaggttggggaaagatcgattaagagtttaa

SEQ ID NO: 9858 - DNA, 1437 bp, Vibrio cholerae
atgttccctcgattaagtgcggaatatcaactgcaatctattgcaaataacagccagcaatctcgagaaagcctacaaggacttgctgagaaaataggcgagaaaatgcaggagtcactcattcaggcaactcagggtattcaacaaggtctcgagagtagtctggaaaaaatcatggctccggctatcaataagctcgttgacgaaacatctgacgggaatcaaaaagcactggaaagcgttcttcaatctttcatggagggttttggtcaacaaggcgaacagcaacgtgtcgcgatggactctgcgtctcaaaacgtaaataagacgctagaatcaatgagcgttttgatggctgctttcgtcaataagttggaagttcagcaaaacgcatcttcagaaagagagaaagaactgatctcaactatttcagttcaagtttctgagctagttactcagggtaatgagcagaagcgtgttctaacagagtttgtagaaaaacaagtctcagagttaggtgagcagcttactaaaagagaattagctgcttctgaacgtgaacagaaattggcttcctcaatggaaagtacgattaaagatttagtagaaaatgtttcagcacaaagccaagtcttgaccgattttgttcagaatcaagttgtccaacttacccaaacgttctccgaacgagatggaatggcaagtcagatggaaaaagagcgtaatgatatatttgtgaatcaaacgcaggcgatgaaagctggaacggatgagcttcttgctcaagtgaaagcggcgactgaatcacaacaaatcacaactaatagtattattgagcaaggtaaacaattacaaaatagtatcgattcctctgtttcggcatctgctcgagctacggagagtatgcagcagtcggcgaatgagttacgagttgccgctgatagtatgaatgtgtttggttccaacatcaaagatgcgggcaacaaactatctggtgctgttactgaagcggttaacagcacgaaggatttagcggaacaaaaccatctaggcgcagtgaaagttcaagcgttgagggagcagttgctggaagatacaagtaagtttagcgcgattgcagatcagataaacaatatgctgattagtgcagaacagtcgtttagcacgcttcgtactacccaaaatgagttccttgcagaacaaaaaggtaatctaaacgaactcacttcagaaatgaaacgtaatgtgaaagagttgacggagcaaatggctcaactgcttgaagattacgcagagcaagccaatggacaaaccgccgagcacctcaaagtttgggccaatagtagcacacaatatgcagagagcatgaatacagcagttagagctatttctagtgttgtcgatgaaattcaagataaagtgagccaacatgcgtag

SEQ ID NO: 9859 - DNA, 735 bp, Vibrio cholerae; identical to SEQ ID NO: 9108

SEQ ID NO: 9860 - DNA, 405 bp, Vibrio cholerae
ttgaagagaaattatgaccctaagcacttgccaaatttctctactgttaaagatggtgacaaatcgataatttatgtgcaaatgaacggcgctcacatggttgaggggagccatagttgttatttgtggttgtaccggtatcttgacccttccgtttgtgtgtttaactataacattgatagtcctacgtactcacaactcacaatcggtataaacaatcaaatgtccagattgtcatctggtgcagttgctaaaataacgcactctccgagtggttacgcatggcaacgaaaagcacttatagcactaagagagttaggagttaaattgacgccgaaagatgtgctttcgaatgaagattatattgattttaaacaacgttatggggtgcgagagtggagttaa

SEQ ID NO: 9861 - DNA, 1953 bp, Vibrio cholerae; identical to SEQ ID NO: 9588

SEQ ID NO: 9862 - DNA, 2064 bp, Vibrio cholerae; identical to SEQ ID NO: 9169

SEQ ID NO: 9863 - DNA, 735 bp, Vibrio cholerae; identical to SEQ ID NO: 9108

SEQ ID NO: 9864 - DNA, 1452 bp, Vibrio cholerae; identical to SEQ ID NO: 9109

SEQ ID NO: 9865 - DNA, 3450 bp, Vibrio cholerae
gtggagttaacctctttaatcagcaagttcttctctagctcagataaaacgtctcagtttgaactcatttgtgatgatagtcttgattttgcaacttccagaaaaactctagagaaaattaaagctggtaaagctgatgagtggataacagcgcagtatgttgcacttaaaatgcttgaagagcagggggatgtaagctcatttccagatggcttcattatgcctgccgatacagctgtcagactcgattctgagttgagggatttgtttagtttgcccccggtttggaaaggagtcattgacgctgatattcaaggaaaagctagtacacccacctttaaaattgatctttcggtcacaaccaaacaaggtcgaacaacactaaattacactgtggatgggcctttcattcggtttagtcaaaatgagcagtacctgctaacacccgagcagcttatggtatttattgcgcataaaacccatgtaaggtctgataggtctgaatatgataacttactgtacttacactctttgcaagaggcccaaaagaatggttgtaagctgaatctaaagcactttgaaaggctaagaatattgacaccaaataaaatcacagtagaagcagaattgaattctcaaggcgagctaatattgacgccaaacatggggcaaagtgcgagtcatgagtcgattcaaaaggttttggggcagttgcaaagcgacaacgcagttactctgaaagtgggtgatgaaatagtcttattttctgaagaaaagctaatggctgtaaaagaagttattagcaacagggtaattccccaacagcaagttaaagcgttcctggaaaaccctacagcatatattgatgcgagtttagtcgatcttgatttaggtttttctatcagagttcatggtgcgacagtttttaaacatgcttattttggagaaacggacgagtcaggtatagattggttcggagcctcccccacatctgatttgattaatccaatatccaagctgactgatagagttcgcgataaaacaactcttgaggacgtagctaagaagattgaagatgcacgacaaaccggagcaaccgtttttgattatgaaggacaatcatacgatatcagcgatcctgcagctgttgaaaaagttctaaacgaaataggtcacaagatatctagccctaatacagatctttctagctacggagaggcagaagacgccgagactgaatcagaaggctcagaaatacatgttgttgatattgatctaaatgacgaagagctgtctgaaaattctcctaaagttgaacaactgatttctgatatttcatgggatggtgagttaaattgggaaaaccacaagcggacaccattcccacaccaggatattggtgttcgttggatcttaggcgttgaacaaaaaagcttatcagactcgaaagttagtggagccttgctagctgatgacatggggttaggtaagacttttatggccctctcagcaatagaacatatttatcaacgacaacaaattagtggtgaaacgaagaaacctgcgttgatagttgctcctttgagtttattggaaaactggaaggatgaggtagataaaacctttaaacactcaccattcaaagatgtagttattttgcaatcatccgctgagttaaatgagtatcgcatggggggcgtagagattcgaggccagagcgcatctgatgattgtttagaacccaaatattctttgaaagttgggaaatactttggtcctagccgtttagatctaccagagcgattggtaatcactacttatcaaactttgcgcgattaccagttctccatgtgtttgattgattgggggatcgtggttttcgatgaagcccagaacattaaaaatccaaatgcacttcaaactcgtgctgcgaaaggcctaaaagcggatttcaaactagtggctacgggtacgcctgtagaaaacagcttagccgatttttggtgtttaatggatacagcttgcccaggacatctgggtagctatcaagaatttcgtgctcgttatatctcaccaattcttaaagctgctggtgatgaagttgaagaaataagagctaggcttggaagagaacttcgtatagctgtcggggcattgatgcttaggcgcattaaagaggacaaccttaaagggttacctctaaaacatatgtatgctggtggagaatttgaaaactggaagtatttagaagaacttaagtcgacaatggttggctaccagagagatgtttacgaaggagcgattagccatcaactcgagaatgaagaaagtcacgcgcttaccactttgatgcggctaagagatagttcgttacatcctcggttaagtgatggaggtcgccttgatattcccaaaaatgcaaaatcagctagagctctatacggagaatcaggaaaattagtttccttgcttgagactttagacagagtacgaagcaaacaagaaaagtgcattatttttgcggttaacaaacgactgcaaagtttcttaagtgtgactttggggcagatctataacctaggtccgctctcagttattaatggtgatgcaaaagccgtagcaaagcgtaaatctgtcccaactcgaaaatcaatgatttcagacttcgaagcaaaagaaggctttaatctaattgtaatgtctccagtcgcggctggtgtcggtttaactgtggtcggtgcgaatcatgtggttcatttagagcggtactggaacccagctaaagaagctcaagctacggatagggtttatcgtatcggacaggaaaaagaggttcatatctacatccctctgttgcatcaccctgaatttgaatcatttgatgtaaacctacataggctacttacccaaaaaacgttgctgaaggatgctgttgttacaccagaagatgttattccacagccagcaggtgtcgggggagtagtttctggtgatttgattgataaacgtattacagcggctgaacttgataagttaagttggcagcaatttgaagcgttatgtgtagaattgcttgcaaagattacggatagtgaaagcgcttggttgacgaacaatggtgctgatcatggtgctgatggtgtactacttaataacagtggtaatattttgcttcaggctaagtttacgcaacgacaatatgatggttataaagggatacaggagattcattctgctaaacctatttatgaatcagcaatgagaagttcttttgggcgtttgatttttgttactaattcacctttgttagctaagcgaactcatgaaattgctgccacatgtggtattgaagttttgggcagaacacagctgttaacttaccttgaagaatatgacattacactgaaagacattctgtcaaggttggggaaagatcgattaagagtttaa

SEQ ID NO: 9866 - DNA, 2121 bp, Vibrio cholerae; identical to SEQ ID NO: 9107

SEQ ID NO: 9867 - DNA, 735 bp, Vibrio cholerae; identical to SEQ ID NO: 9108

SEQ ID NO: 9868 - DNA, 1452 bp, Vibrio cholerae; identical to SEQ ID NO: 9109

SEQ ID NO: 9869 - DNA, 3450 bp, Vibrio cholerae; identical to SEQ ID NO: 9118

SEQ ID NO: 9870 - DNA, 2064 bp, Vibrio cholerae; identical to SEQ ID NO: 9169

SEQ ID NO: 9871 - DNA, 735 bp, Vibrio cholerae; identical to SEQ ID NO: 9108

SEQ ID NO: 9872 - DNA, 1452 bp, Vibrio cholerae; identical to SEQ ID NO: 9109

SEQ ID NO: 9873 - DNA, 3450 bp, Vibrio cholerae; identical to SEQ ID NO: 9118

SEQ ID NO: 9874 - DNA, 2064 bp, Vibrio cholerae; identical to SEQ ID NO: 9169

SEQ ID NO: 9875 - DNA, 735 bp, Vibrio cholerae; identical to SEQ ID NO: 9108

SEQ ID NO: 9876 - DNA, 1452 bp, Vibrio cholerae; identical to SEQ ID NO: 9109

SEQ ID NO: 9877 - DNA, 3450 bp, Vibrio cholerae; identical to SEQ ID NO: 9118

SEQ ID NO: 9878 - DNA, 2064 bp, Vibrio cholerae; identical to SEQ ID NO: 9652

SEQ ID NO: 9879 - DNA, 735 bp, Vibrio cholerae; identical to SEQ ID NO: 9108

SEQ ID NO: 9880 - DNA, 1479 bp, Vibrio cholerae
  modified_base (573)..(617): a, c, t, g, unknown or other
gtgagtctaaatataaaaaagctcaaagttagtttgcctgctaatccttttggtcaagccatcaaggactttgcacatctatcgagtcagctagaagtgctttctaagagtgccggtattgaaaacaataagttccgaactgcatatggagaagtatgtaatgcgcttgcctctaagaaaagagttgaggacgttatagatagctctgtacacgttcgcgccttagctctttcgctacatacggatgcgaagaaaaatgtcagctttacgcgcagattgcttaataaaattacagaaattgtaaaaaaaccaagctctttagtcatagagtcgttttatcagcatttcttatcagagtatgaccgactggcagacttggaagctacagcagactggttgttggaggctaaaaggctgcgaggcaatgatgagcagtttgatgaaaatatattgtcaaccaatggccccaagtggcttgcggaaagggctattcaaaataatgtcgattttgatcatttaattgcggagatgaagctggaacgttatgcaaatggcagatatttaacggcggcnnnnnnnnnnnnnnnnnnnnnnnnnnnnnnnnnnnnnnnnnnnnntgagcagttaaacactataccattaggccaagatcatcctctcctagaggaggttcaaaaaacggtggtttttgattctcgatatgactctgaaagtttgttagggcatcaaattcttagaattttgattggccgatcgataggttctcacatcagtgagccttggatgaatgtgatcttagcaattggcggtgacccacgagtaccaagttcaaatccaagatatattaagtggtggaagagtttagaaccaaatctggttcaagctgttctcggatggttatcaaaactagacttgaagttgtttctggaagcgttggaggattattcttactcttcagctaattacgagctacagagaatgtacccatctcggaaaagtttcttagaggggatgttcgatgcgggggttatttcaaatacccggctttatttgagtctggatgctgcaaggtatttgaagagaaattatgaccctaagcacttgccaaatttctctactgttaaagatggtgacaaatcgataatttatgtgcaaatgaacggcgctcacatggttgaggggagccatagttgttatttgtggttgtaccggtatcttgacccttccgtttgtgtgtttaactataacattgatagtcctacgtactcacaactcacaatcggtataaacaatcaaatgtccagattgtcatctggtgcagttgctaaaataacgcactctccgagtggttacgcatggcaacgaaaagcacttatagcactaagagagttaggagttaaattgacgccgaaagatgtgctttcgaatgaagattatattgattttaaacaacgttatggggtgcgagagtggagttaa

SEQ ID NO: 9881 - DNA, 2064 bp, Vibrio cholerae; identical to SEQ ID NO: 9173

SEQ ID NO: 9882 - DNA, 735 bp, Vibrio cholerae; identical to SEQ ID NO: 9108

SEQ ID NO: 9883 - DNA, 501 bp, Vibrio cholerae; identical to SEQ ID NO: 9591

SEQ ID NO: 9884 - DNA, 3450 bp, Vibrio cholerae; identical to SEQ ID NO: 9118

SEQ ID NO: 9885 - DNA, 2064 bp, Vibrio cholerae; identical to SEQ ID NO: 9169

SEQ ID NO: 9886 - DNA, 735 bp, Vibrio cholerae; identical to SEQ ID NO: 9108

SEQ ID NO: 9887 - DNA, 1452 bp, Vibrio cholerae; identical to SEQ ID NO: 9109

SEQ ID NO: 9888 - DNA, 3450 bp, Vibrio cholerae; identical to SEQ ID NO: 9118

SEQ ID NO: 9889 - DNA, 1800 bp, Vibrio cholerae
  modified_base (1682)..(1715): a, c, t, g, unknown or other
atgaccgatagccttaatctttccagtttatggccagacttgagcagtctaaatgtaatgccacctcaaactcctgagcaattgagtgctttgtttgtggttattttatggggtgtcgctctatttttcttaatttggtcagttgctgcatttattcgcgcaagacaacgagtagtttggcttaacaaatctttggatgatgcggagaaatcgactctgtcaggtgttcgaaatgatttaatttctagagctgaacaaaaaaaagattcagtagggcatttatggctcgagtttgatgaaacattgcttgaagtaaaaggtgctgatgacgttgttcgattgcataacacatttgatgctgactatttttttaatagttctagtttagctggtggtagtactgaaaacagaatgattgcggtggttccaggctttttaacggctctgggtgttattggtacttttgtcggtttacagctaggactttcagatctcaatatcgcgggcaacgttgatgtcaatgaaatgaaaaatggcgttgctggagttataaatggtgcaaaaatcgcatttatgacatcggtttggggcgtgctactcagtgttgcatttaatttcattgagaagatacttgagcaaattattagaaagaaaattaagtctttgcaaaaccgtattgacaggatgttccctcgattaagtgcggaatatcaactgcaatctattgcaaataacagccagcaatctcgagaaagcctacaaggacttgctgagaaaataggcgagaaaatgcaggagtcactcattcaggcaactcagggtattcaacaaggtctcgagagtagtctggaaaaaatcatggctccggctatcaataagctcgttgacgaaacatctgacgggaatcaaaaagcactggaaagcgttcttcaatctttcatggagggttttggtcaacaaggcgaacaacaacgtgtcgcgatggactctgcgtctcaaaacgtaaataagacgctagaatcaatgagcgtttcgatggctgctttcgtcaataagttggaagttcagcaaaacgcatcttcagaaagagagaaagaactgatctcaactatttcagttcaagtttctgagctagttactcagggtaatgagcagaagcgtgttctaacagagtttgtagaaaaacaagtctcagagttaggtgagcagcttactaaaagagaattagctgcttctgaacgtgaacagaaattggcttcctcaatggaaagtacgattaaagatttagtagaaaatgtttcagcacaaagccaagtcttgaccgattttgttcagaatcaagttgtccaacttacccaaacgttctccgaacgagatggaatggcaagtcagatggaaaaagagcgtaatgatatatttgtgaatcaaacgcaggcgatgaaagctggaacggatgagcttcttgctcaagtgaaagcggcgactgaatcacaacaaatcacaactaatagtattattgagcaaggtaaacaattacaaaatagtatcgattcctctgtttcggcatctgctcgagctacggagagtatgcagcagtcggcgaatgagttacgagttgccgctgatagtatgaatgtgtttggttccaacatcaaagatgcgggcaacaaactatctggtgnnnnnnnnnnnnnnnnnnnnnnnnnnnnnnnnnngcacgaaggatttagcggaacaaaaccatctaggcgcagtgaaagttcaagcgttgagggagcagttgctggaagatacaagtaa

SEQ ID NO: 9890 - DNA, 735 bp, Vibrio cholerae; identical to SEQ ID NO: 9108

SEQ ID NO: 9891 - DNA, 501 bp, Vibrio cholerae; identical to SEQ ID NO: 9615

SEQ ID NO: 9892 - DNA, 702 bp, Vibrio cholerae; identical to SEQ ID NO: 9782

SEQ ID NO: 9893 - DNA, 2064 bp, Vibrio cholerae; identical to SEQ ID NO: 9169

SEQ ID NO: 9894 - DNA, 735 bp, Vibrio cholerae; identical to SEQ ID NO: 9108

SEQ ID NO: 9895 - DNA, 1452 bp, Vibrio cholerae; identical to SEQ ID NO: 9109

SEQ ID NO: 9896 - DNA, 1953 bp, Vibrio cholerae; identical to SEQ ID NO: 9588

SEQ ID NO: 9897 - DNA, 2121 bp, Vibrio cholerae; identical to SEQ ID NO: 9107

SEQ ID NO: 9898 - DNA, 735 bp, Vibrio cholerae; identical to SEQ ID NO: 9108

SEQ ID NO: 9899 - DNA, 1452 bp, Vibrio cholerae; identical to SEQ ID NO: 9109

SEQ ID NO: 9900 - DNA, 2748 bp, Vibrio cholerae
ttggggcagttgcaaagcgacaacgcagttactctgaaagtgggtgatgaaatagtcttattttctgaagaaaagctaatggctgtaaaagaagttattagcaacagggtaattccccaacagcaagttaaagcgttcctggaaaaccctacagcatatattgatgcgagtttagtcgatcttgatttaggtttttctatcagagttcatggtgcgacagtttttaaacatgcttattttggagaaacggacgagtcaggtatagattggttcggagcctcccccacatctgatttgattaatccaatatccaagctgactgatagagttcgcgataaaacaactcttgaggacgtagctaagaagattgaagatgcacgacaaaccggagcaaccgtttttgattatgaaggacaatcatacgatatcagcgatcctgcagctgttgaaaaagttctaaacgaaataggtcacaagatatctagccctaatacagatctttctagctacggagaggcagaagacgccgagactgaatcagaaggctcagaaatacatgttgttgatattgatctaaatgacgaagagctgtctgaaaattctcctaaagttgaacaactgatttctgatatttcatgggatggtgagttaaattgggaaaaccacaagcggacaccattcccacaccaggatattggtgttcgttggattttaggcgttgaacaaaaaagcttatcagactcgaaagttagtggagccttgctagctgatgacatggggttaggtaagacttttatggccctctcagcaatagaacatatttatcaacgacaacaaattagtggtgaaacgaagaaacctgcgttgatagttgctcctttgagtttattggaaaactggaaggatgaggtagataaaacctttaaacactcaccattcaaagatgtagttattttgcaatcatccgctgagttaaatgagtatcgcatggggggcgtagagattcgaggccagagcgcatctgatgattgtttagaacccaaatattctttgaaagttgggaaatactttggtcctagccgtttagatctaccagagcgattggtaatcactacttatcaaactttgcgcgattaccagttctccatgtgtttgattgattgggggatcgtggttttcgatgaagcccagaacattaaaaatccaaatgcacttcaaactcgtgctgcgaaaggcctaaaagcggatttcaaactagtggctacgggtacgcctgtagaaaacagcttagccgatttttggtgtttaatggatacagcttgcccaggacatctgggtagctatcaagaatttcgtgctcgttatatctcaccaattcttaaagctgctggtgatgaagttgaagaaataagagctaggcttggaagagaacttcgtatagctgtcggggcattgatgcttaggcgcattaaagaggacaaccttaaagggttacctctaaaacatatgtatgctggtggagaatttgaaaactggaagtatttagaagaacttaagtcgacaatggttggctaccagagagatgtttacgaaggagcgattagccatcaactcgagaatgaagaaagtcacgcgcttaccactttgatgcggctaagagatagttcgttacatcctcggttaagtgatggaggtcgccttgatattcccaaaaatgcaaaatcagctagagctctatacggagaatcaggaaaattagtttccttgcttgagactttagacagagtacgaagcaaacaagaaaagtgcattatttttgcggttaacaaacgactgcaaagtttcttaagtgtgactttggggcagatctataacctaggtccgctctcagttattaatggtgatgcaaaagccgtagcaaagcgtaaatctgtcccaactcgaaaatcaatgatttcagacttcgaagcaaaagaaggctttaatctaattgtaatgtctccagtcgcggctggtgtcggtttaactgtggtcggtgcgaatcatgtggttcatttagagcggtactggaacccagctaaagaagctcaagctacggatagggtttatcgtatcggacaggaaaaagaggttcatatctacatccctctgttgcatcaccctgaatttgaatcatttgatgtaaacctacataggctacttacccaaaaaacgttgctgaaggatgctgttgttacaccagaagatgttattccacagccagcaggtgtcgggggagtagtttctggtgatttgattgataaacgtattacagcggctgaacttgataagttaagttggcagcaatttgaagcgttatgtgtagaattgcttgcaaagattacggatagtgaaagcgcttggttgacgaacaatggtgctgatcatggtgctgatggtgtactacttaataacagtggtaatattttgcttcaggctaagtttacgcaacgacaatatgatggttataaagggatacaggagattcattctgctaaacctatttatgaatcagcaatgagaagttcttttgggcgtttgatttttgttactaattcacctttgttagctaagcgaactcatgaaattgctgccacatgtggtattgaagttttgggcagaacacagctgttaacttaccttgaagaatatgacattacactgaaagacattctgtcaaggttggggaaagatcgattaagagtttaa

SEQ ID NO: 9901 - DNA, 2064 bp, Vibrio cholerae; identical to SEQ ID NO: 9169

SEQ ID NO: 9902 - DNA, 735 bp, Vibrio cholerae; identical to SEQ ID NO: 9108

SEQ ID NO: 9903 - DNA, 1452 bp, Vibrio cholerae; identical to SEQ ID NO: 9109

SEQ ID NO: 9904 - DNA, 3450 bp, Vibrio cholerae; identical to SEQ ID NO: 9118

SEQ ID NO: 9905 - DNA, 2064 bp, Vibrio cholerae; identical to SEQ ID NO: 9173

SEQ ID NO: 9906 - DNA, 735 bp, Vibrio cholerae; identical to SEQ ID NO: 9108

SEQ ID NO: 9907 - DNA, 1452 bp, Vibrio cholerae; identical to SEQ ID NO: 9109

SEQ ID NO: 9908 - DNA, 3450 bp, Vibrio cholerae; identical to SEQ ID NO: 9118

SEQ ID NO: 9909 - DNA, 2064 bp, Vibrio cholerae; identical to SEQ ID NO: 9169

SEQ ID NO: 9910 - DNA, 735 bp, Vibrio cholerae; identical to SEQ ID NO: 9108

SEQ ID NO: 9911 - DNA, 1452 bp, Vibrio cholerae; identical to SEQ ID NO: 9109

SEQ ID NO: 9912 - DNA, 3450 bp, Vibrio cholerae; identical to SEQ ID NO: 9118

SEQ ID NO: 9913 - DNA, 2064 bp, Vibrio cholerae; identical to SEQ ID NO: 9652

SEQ ID NO: 9914 - DNA, 735 bp, Vibrio cholerae; identical to SEQ ID NO: 9108

SEQ ID NO: 9915 - DNA, 1452 bp, Vibrio cholerae; identical to SEQ ID NO: 9109

SEQ ID NO: 9916 - DNA, 3450 bp, Vibrio cholerae; identical to SEQ ID NO: 9118

SEQ ID NO: 9917 - DNA, 2064 bp, Vibrio cholerae; identical to SEQ ID NO: 9169

SEQ ID NO: 9918 - DNA, 735 bp, Vibrio cholerae; identical to SEQ ID NO: 9108

SEQ ID NO: 9919 - DNA, 1452 bp, Vibrio cholerae; identical to SEQ ID NO: 9109

SEQ ID NO: 9920 - DNA, 3450 bp, Vibrio cholerae; identical to SEQ ID NO: 9118

SEQ ID NO: 9921 - DNA, 2064 bp, Vibrio cholerae; identical to SEQ ID NO: 9169

SEQ ID NO: 9922 - DNA, 735 bp, Vibrio cholerae; identical to SEQ ID NO: 9108

SEQ ID NO: 9923 - DNA, 1452 bp, Vibrio cholerae; identical to SEQ ID NO: 9109

SEQ ID NO: 9924 - DNA, 3450 bp, Vibrio cholerae; identical to SEQ ID NO: 9118

SEQ ID NO: 9925 - DNA, 1596 bp, Vibrio cholerae
atgaaaaatggcgttgctggagttataaatggtgcaaaaatcgcatttatgacatcggtttggggcgtgctactcagtgttgcatttaatttcattgagaagatacttgagcaaattattagaaagaaaattaagtctttgcaaaaccgtattgacaggatgttccctcgattaagtgcggaatatcaactgcaatctattgcaaataacagccagcaatctcgagaaagcctacaaggacttgctgagaaaataggcgagaaaatgcaggagtcactcattcaggcaactcagggtattcaacaaggtctcgagagtagtctggaaaaaatcatggctccggctatcaataagctcgttgacgaaacatctgacgggaatcaaaaagcactggaaagcgttcttcaatctttcatggagggttttggtcaacaaggcgaacagcaacgtgtcgcgatggactctgcgtctcaaaacgtaaataagacgctagaatcaatgagcgttttgatggctgctttcgtcaataagttggaagttcagcaaaacgcatcttcagaaagagagaaagaactgatctcaactatttcagttcaagtttctgagctagttactcagggtaatgagcagaagcgtgttctaacagagtttgtagaaaaacaagtctcagagttaggtgagcagcttactaaaagagaattagctgcttctgaacgtgaacagaaattggcttcctcaatggaaagtacgattaaagatttagtagaaaatgtttcagcacaaagccaagtcttgaccgattttgttcagaatcaagttgtccaacttacccaaacgttctccgaacgagatggaatggcaagtcagatggaaaaagagcgtaatgatatatttgtgaatcaaacgcaggcgatgaaagctggaacggatgagcttcttgctcaagtgaaagcggcgactgaatcacaacaaatcacaactaatagtattattgagcaaggtaaacaattacaaaatagtatcgattcctctgtttcggcatctgctcgagctacggagagtatgcagcagtcggcgaatgagttacgagttgccgctgatagtatgaatgtgtttggttccaacatcaaagatgcgggcaacaaactatctggtgctgttactgaagcggttaacagcacgaaggatttagcggaacaaaaccatctaggcgcagtgaaagttcaagcgttgagggagcagttgctggaagatacaagtaagtttagcgcgattgcagatcagataaacaatatgctgattagtgcagaacagtcgtttagcacgcttcgtactacccaaaatgagttccttgcagaacaaaaaggtaatctaaacgaactcacttcagaaatgaaacgtaatgtgaaagagttgacggagcaaatggctcaactgcttgaagattacgcagagcaagccaatggacaaaccgccgagcacctcaaagtttgggccaatagtagcacacaatatgcagagagcatgaatacagcagttagagctatttctagtgttgtcgatgaaattcaagataaagtgagccaacatgcgtag

SEQ ID NO: 9926 - DNA, 735 bp, Vibrio cholerae; identical to SEQ ID NO: 9108

SEQ ID NO: 9927 - DNA, 1452 bp, Vibrio cholerae; identical to SEQ ID NO: 9109

SEQ ID NO: 9928 - DNA, 3450 bp, Vibrio cholerae; identical to SEQ ID NO: 9118

SEQ ID NO: 9929 - DNA, 2064 bp, Vibrio cholerae; identical to SEQ ID NO: 9169

SEQ ID NO: 9930 - DNA, 735 bp, Vibrio cholerae; identical to SEQ ID NO: 9108

SEQ ID NO: 9931 - DNA, 1452 bp, Vibrio cholerae; identical to SEQ ID NO: 9109

SEQ ID NO: 9932 - DNA, 3450 bp, Vibrio cholerae; identical to SEQ ID NO: 9118

SEQ ID NO: 9933 - DNA, 2064 bp, Vibrio cholerae; identical to SEQ ID NO: 9169

SEQ ID NO: 9934 - DNA, 735 bp, Vibrio cholerae; identical to SEQ ID NO: 9108

SEQ ID NO: 9935 - DNA, 1452 bp, Vibrio cholerae; identical to SEQ ID NO: 9109

SEQ ID NO: 9936 - DNA, 3450 bp, Vibrio cholerae; identical to SEQ ID NO: 9118

SEQ ID NO: 9937 - DNA, 2064 bp, Vibrio cholerae; identical to SEQ ID NO: 9169

SEQ ID NO: 9938 - DNA, 735 bp, Vibrio cholerae; identical to SEQ ID NO: 9108

SEQ ID NO: 9939 - DNA, 1452 bp, Vibrio cholerae; identical to SEQ ID NO: 9109

SEQ ID NO: 9940 - DNA, 3450 bp, Vibrio cholerae; identical to SEQ ID NO: 9118

SEQ ID NO: 9941 - DNA, 2064 bp, Vibrio cholerae; identical to SEQ ID NO: 9169

SEQ ID NO: 9942 - DNA, 735 bp, Vibrio cholerae; identical to SEQ ID NO: 9108

SEQ ID NO: 9943 - DNA, 1452 bp, Vibrio cholerae; identical to SEQ ID NO: 9109

SEQ ID NO: 9944 - DNA, 2064 bp, Vibrio cholerae; identical to SEQ ID NO: 9169

SEQ ID NO: 9945 - DNA, 735 bp, Vibrio cholerae; identical to SEQ ID NO: 9108

SEQ ID NO: 9946 - DNA, 1452 bp, Vibrio cholerae; identical to SEQ ID NO: 9109

SEQ ID NO: 9947 - DNA, 3450 bp, Vibrio cholerae; identical to SEQ ID NO: 9118

SEQ ID NO: 9948 - DNA, 2151 bp, Vibrio cholerae
  modified_base (1974)..(2019): a, c, t, g, unknown or other
atgaccgatagccttaatctttccagtttatggccagacttgagcagtctaaatgtaatgccacctcaaactcctgagcaattgagtgctttgtttgtggttattttatggggtgtcgctctatttttcttaatttggtcagttgctgcatttattcgcgcaagacaacgagtagtttggcttaacaaatctttggatgatgcggagaaatcgactctgtcaggtgttcgaaatgatttaatttctagagctgaacaaaaaaaagattcagtagggcatttatggctcgagtttgatgaaacattgcttgaagtaaaaggtgctgatgacgttgttcgattgcataacacatttgatgctgactatttttttaatagttctagtttagctggtggtagtactgaaaacagaatgattgcggtggttccaggctttttaacggctctgggtgttattggtacttttgtcggtttacagctaggactttcagatctcaatatcgcgggcaacgttgatgtcaatgaaatgaaaaatggcgttgctggagttataaatggtgcaaaaatcgcatttatgacatcggtttggggcgtgctactcagtgttgcatttaatttcattgagaagatacttgagcaaattattagaaagaaaattaagtctttgcaaaaccgtattgacaggatgttccctcgattaagtgcggaatatcaactgcaatctattgcaaataacagccagcaatctcgagaaagcctacaaggacttgctgagaaaataggcgagaaaatgcaggagtcactcattcaggcaactcagggtattcaacaaggtctcgagagtagtctggaaaaaatcatggctccggctatcaataagctcgttgacgaaacatctgacgggaatcaaaaagcactggaaagcgttcttcaatctttcatggagggttttggtcaacaaggcgaacaacaacgtgtcgcgatggactctgcgtctcaaaacgtaaataagacgctagaatcaatgagcgtttcgatggctgctttcgtcaataagttggaagttcagcaaaacgcatcttcagaaagagagaaagaactgatctcaactatttcagttcaagtttctgagctagttactcagggtaatgagcagaagcgtgttctaacagagtttgtagaaaaacaagtctcagagttaggtgagcagcttactaaaagagaattagctgcttctgaacgtgaacagaaattggcttcctcaatggaaagtacgattaaagatttagtagaaaatgtttcagcacaaagccaagtcttgaccgattttgttcagaatcaagttgtccaacttacccaaacgttctccgaacgagatggaatggcaagtcagatggaaaaagagcgtaatgatatatttgtgaatcaaacgcaggcgatgaaagctggaacggatgagcttcttgctcaagtgaaagcggcgactgaatcacaacaaatcacaactaatagtattattgagcaaggtaaacaattacaaaatagtatcgattcctctgtttcggcatctgctcgagctacggagagtatgcagcagtcggcgaatgagttacgagttgccgctgatagtatgaatgtgtttggttccaacatcaaagatgcgggcaacaaactatctggtgctgttactgaagcggttaacagcacgaaggatttagcggaacaaaaccatctaggcgcagtgaaagttcaagcgttgagggagcagttgctggaagatacaagtaagtttagcgcgattgcagatcagataaacaatatgctgattagtgcagaacagtcgtttagcacgcttcgtactacccaaaatgagttccttgcagaacaaaaaggtaatctaaacgaactcacttcagaaatgaaacgtaatgtgaaagagttgacggagcaaatggctcaactgcttgaagattannnnnnnnnnnnnnnnnnnnnnnnnnnnnnnnnnnnnnnnnnnnnnggacaaaccgccgagcacctcaaagtttgggccaatagtagcacacaatatgcagagagcatgaatacagcagttagagctatttctagtgttgtcgatgaaattcaagataaagtgagccaacatgcgtag

SEQ ID NO: 9949 - DNA, 735 bp, Vibrio cholerae; identical to SEQ ID NO: 9108

SEQ ID NO: 9950 - DNA, 1452 bp, Vibrio cholerae; identical to SEQ ID NO: 9109

SEQ ID NO: 9951 - DNA, 3450 bp, Vibrio cholerae; identical to SEQ ID NO: 9118

SEQ ID NO: 9952 - DNA, 2064 bp, Vibrio cholerae; identical to SEQ ID NO: 9652

SEQ ID NO: 9953 - DNA, 735 bp, Vibrio cholerae; identical to SEQ ID NO: 9108

SEQ ID NO: 9954 - DNA, 1452 bp, Vibrio cholerae; identical to SEQ ID NO: 9109

SEQ ID NO: 9955 - DNA, 3450 bp, Vibrio cholerae; identical to SEQ ID NO: 9118

SEQ ID NO: 9956 - DNA, 2064 bp, Vibrio cholerae; identical to SEQ ID NO: 9169

SEQ ID NO: 9957 - DNA, 735 bp, Vibrio cholerae; identical to SEQ ID NO: 9108

SEQ ID NO: 9958 - DNA, 1452 bp, Vibrio cholerae; identical to SEQ ID NO: 9113

SEQ ID NO: 9959 - DNA, 3441 bp, Vibrio cholerae; identical to SEQ ID NO: 9114

SEQ ID NO: 9960 - DNA, 2064 bp, Vibrio cholerae; identical to SEQ ID NO: 9169

SEQ ID NO: 9961 - DNA, 735 bp, Vibrio cholerae; identical to SEQ ID NO: 9108

SEQ ID NO: 9962 - DNA, 1452 bp, Vibrio cholerae; identical to SEQ ID NO: 9113

SEQ ID NO: 9963 - DNA, 3450 bp, Vibrio cholerae
gtggagttaacctctttaatcagcaagttcttctctagctcagataaaacgtctcagtttgaactcatttgtgatgatagtcttgattttgcaacttccagaaaaactctagagaaaattaaagctggtaaagctgatgagtggataacagcgcagtatgttgcacttaaaatgcttgaagagcagggggatgtaagctcatttccagatggcttcattatgcctgccgatacagctgtcagactcgattctgagttgagggatttgtttagtttgcccccggtttggaaaggagtcattgacgctgatattcaaggaaaagctagtacacccacctttaaaattgatctttcggtcacaaccaaacaaggtcgaacaacactaaattacactgtggatgggcctttcattcggtttagtcaaaatgagcagtacctgctaacacccgagcagcttatggtatttattgcgcataaaacccatgtaaggtctgataggtctgaatatgataacttactgtacttacactctttgcaagaggcccaaaagaatggttgtaagctgaatctaaagcactttgaaaggctaagaatattgacaccaaataaaatcacagtagaagcagaattgaattctcaaggcgagctaatattgacgccaaacatggggcaaagtgcgagtcatgagtcgattcaaaaggttttggggcagttgcaaagcgacaacgcagttactctgaaagtgggtgatgaaatagtcttattttctgaagaaaagctaatggctgtaaaagaagttattagcaacagggtaattccccaacagcaagttaaagcgttcctggaaaaccctacagcatatattgatgcgagtttagtcgatcttgatttaggtttttctatcagagttcatggtgcgacagtttttaaacatgcttattttggagaaacggacgagtcaggtatagattggttcggagcctcccccacatctgatttgattaatccaatatccaagctgactgatagagttcgcgataaaacaactcttgaggacgtagctaagaagattgaagatgcacgacaaaccggagcaaccgtttttgattatgaaggacaatcatacgatatcagcgatcctgcagctgttgaaaaagttctaaacgaaataggtcacaagatatctagccctaatacagatctttctagctacggagaggcagaagacgccgagactgaatcagaaggctcagaaatacatgttgttgatattgatctaaatgacgaagagctgtctgaaaattctcctaaagttgaacaactgatttctgatatttcatgggatggtgagttaaattgggaaaaccacaagcggacaccattcccacaccaggatattggtgttcgttggattttaggcgttgaacaaaaaagcttatcagactcgaaagttagtggagccttgctagctgatgacatggggttaggtaagacttttatggccctctcagcaatagaacatatttatcaacgacaacaaattagtggtgaaacgaagaaacctgcgttgatagttgctcctttgagtttattggaaaactggaaggatgaggtagataaaacctttaaacactcaccattcaaagatgtagttattttgcaatcatccgctgagttaaatgagtatcgcatggggggcgtagagattcgaggccagagcgcatctgatgattgtttagaacccaaatattctttgaaagttgggaaatactttggtcctagccgtttagatctaccagagcgattggtaatcactacttatcaaactttgcgcgattaccagttctccatgtgtttgattgattgggggatcgtggttttcgatgaagcccagaacattaaaaatccaaatgcacttcaaactcgtgctgcgaaaggcctaaaagcggatttcaaactagtggctacgggtacgcctgtagaaaacagcttagccgatttttggtgtttaatggatacagcttgcccaggacatctgggtagctatcaagaatttcgtgctcgttatatctcaccaattcttaaagctgctggtgatgaagttgaagaaataagagctaggcttggaagagaacttcgtatagctgtcggggcattgatgcttaggcgcattaaagaggacaaccttaaagggttacctctaaaacatatgtatgctggtggagaatttgaaaactggaagtatttagaagaacttaagtcgacaatggttggctaccagagagatgtttacgaaggagcgattagccatcaactcgagaatgaagaaagtcacgcgcttaccactttgatgcggctaagagatagttcgttacatcctcggttaagtgatggaggtcgccttgatattcccaaaaatgcaaaatcagctagagctctatacggagaatcaggaaaattagtttccttgcttgagactttagacagagtacgaagcaaacaagaaaagtgcattatttttgcggttaacaaacgactgcaaagtttcttaagtgtgactttggggcagatctataacctaggtccgctctcagttattaatggtgatgcaaaagccgtagcaaagcgtaaatctgtcccaactcgaaaatcaatgatttcagacttcgaagtaaaagaaggctttaatctaattgtaatgtctccagtcgcggctggtgtcggtttaactgtggtcggtgcgaatcatgtggttcatttagagcggtactggaacccagctaaagaagctcaagctacggatagggtttatcgtatcggacaggaaaaagaggttcatatctacatccctctgttgcatcaccctgaatttgaatcatttgatgtaaacctacataggctacttacccaaaaaacgttgctgaaggatgctgttgttacaccagaagatgttattccacagccagcaggtgtcgggggagtagtttctggtgatttgattgataaacgtattacagcggctgaacttgataagttaagttggcagcaatttgaagcgttatgtgtagaattgcttgcaaagattacggatagtgaaagcgcttggttgacgaacaatggtgctgatcatggtgctgatggtgtactacttaataacagtggtaatattttgcttcaggctaagtttacgcaacgacaatatgatggttataaagggatacaggagattcattctgctaaacctatttatgaatcagcaatgagaagttcttttgggcgtttgatttttgttactaattcacctttgttagctaagcgaactcatgaaattgctgccacatgtggtattgaagttttgggcagaacacagctgttaacttaccttgaagaatatgacattacactgaaagacattctgtcaaggttggggaaagatcgattaagagtttaa

SEQ ID NO: 9964 - DNA, 1737 bp, Vibrio cholerae
  modified_base (1697)..(1730): a, c, t, g, unknown or other
atgaccgatagccttaatctttccagtttatggccagacttgagcagtctaaatgtaatgccacctcaaactcctgagcaattgagtgctttgtttgtggttattttatggggtgtcgctctatttttcttaatttggtcagttgctgcatttattcgcgcaagacaacgagtagtttggcttaacaaatctttggatgatgcggagaaatcgactctgtcaggtgttcgaaatgatttaatttctagagctgaacaaaaaaaagattcagtagggcatttatggctcgagtttgatgaaacattgcttgaagtaaaaggtgctgatgacgttgttcgattgcataacacatttgatgctgactatttttttaatagttctagtttagctggtggtagtactgaaaacagaatgattgcggtggttccaggctttttaacggctctgggtgttattggtacttttgtcggtttacagctaggactttcagatctcaatatcgcgggcaacgttgatgtcaatgaaatgaaaaatggcgttgctggagttataaatggtgcaaaaatcgcatttatgacatcggtttggggcgtgctactcagtgttgcatttaatttcattgagaagatacttgagcaaattattagaaagaaaattaagtctttgcaaaaccgtattgacaggatgttccctcgattaagtgcggaatatcaactgcaatctattgcaaataacagccagcaatctcgagaaagcctacaaggacttgctgagaaaataggcgagaaaatgcaggagtcactcattcaggcaactcagggtattcaacaaggtctcgagagtagtctggaaaaaatcatggctccggctatcaataagctcgttgacgaaacatctgacgggaatcaaaaagcactggaaagcgttcttcaatctttcatggagggttttggtcaacaaggcgaacaacaacgtgtcgcgatggactctgcgtctcaaaacgtaaataagacgctagaatcaatgagcgtttcgatggctgctttcgtcaataagttggaagttcagcaaaacgcatcttcagaaagagagaaagaactgatctcaactatttcagttcaagtttctgagctagttactcagggtaatgagcagaagcgtgttctaacagagtttgtagaaaaacaagtctcagagttaggtgagcagcttactaaaagagaattagctgcttctgaacgtgaacagaaattggcttcctcaatggaaagtacgattaaagatttagtagaaaatgtttcagcacaaagccaagtcttgaccgattttgttcagaatcaagttgtccaacttacccaaacgttctccgaacgagatggaatggcaagtcagatggaaaaagagcgtaatgatatatttgtgaatcaaacgcaggcgatgaaagctggaacggatgagcttcttgctcaagtgaaagcggcgactgaatcacaacaaatcacaactaatagtattattgagcaaggtaaacaattacaaaatagtatcgattcctctgtttcggcatctgctcgagctacggagagtatgcagcagtcggcgaatgagttacgagttgccgctgatagtatgaatgtgtttggttccaacatcaaagatgcgggcaacaaactatctggtgctgttactgaagcggnnnnnnnnnnnnnnnnnnnnnnnnnnnnnnnnnngatttag

SEQ ID NO: 9965 - DNA, 735 bp, Vibrio cholerae; identical to SEQ ID NO: 9108

SEQ ID NO: 9966 - DNA, 1452 bp, Vibrio cholerae; identical to SEQ ID NO: 9109

SEQ ID NO: 9967 - DNA, 2394 bp, Vibrio cholerae
  modified_base (19)..(26): a, c, t, g, unknown or other
atgcacgacaaaccggagnnnnnnnnaaaacccggagcaaccgtttttgattatgaaggacaatcatacgatatcagcgatcctgcagctgttgaaaaagttctaaacgaaataggtcacaagatatctagccctaatacagatctttctagctacggagaggcagaagacgccgagactgaatcagaaggctcagaaatacatgttgttgatattgatctaaatgacgaagagctgtctgaaaattctcctaaagttgaacaactgatttctgatatttcatgggatggtgagttaaattgggaaaaccacaagcggacaccattcccacaccaggatattggtgttcgttggattttaggcgttgaacaaaaaagcttatcagactcgaaagttagtggagccttgctagctgatgacatggggttaggtaagacttttatggccctctcagcaatagaacatatttatcaacgacaacaaattagtggtgaaacgaagaaacctgcgttgatagttgctcctttgagtttattggaaaactggaaggatgaggtagataaaacctttaaacactcaccattcaaagatgtagttattttgcaatcatccgctgagttaaatgagtatcgcatggggggcgtagagattcgaggccagagcgcatctgatgattgtttagaacccaaatattctttgaaagttgggaaatactttggtcctagccgtttagatctaccagagcgattggtaatcactacttatcaaactttgcgcgattaccagttctccatgtgtttgattgattgggggatcgtggttttcgatgaagcccagaacattaaaaatccaaatgcacttcaaactcgtgctgcgaaaggcctaaaagcggatttcaaactagtggctacgggtacgcctgtagaaaacagcttagccgatttttggtgtttaatggatacagcttgcccaggacatctgggtagctatcaagaatttcgtgctcgttatatctcaccaattcttaaagctgctggtgatgaagttgaagaaataagagctaggcttggaagagaacttcgtatagctgtcggggcattgatgcttaggcgcattaaagaggacaaccttaaagggttacctctaaaacatatgtatgctggtggagaatttgaaaactggaagtatttagaagaacttaagtcgacaatggttggctaccagagagatgtttacgaaggagcgattagccatcaactcgagaatgaagaaagtcacgcgcttaccactttgatgcggctaagagatagttcgttacatcctcggttaagtgatggaggtcgccttgatattcccaaaaatgcaaaatcagctagagctctatacggagaatcaggaaaattagtttccttgcttgagactttagacagagtacgaagcaaacaagaaaagtgcattatttttgcggttaacaaacgactgcaaagtttcttaagtgtgactttggggcagatctataacctaggtccgctctcagttattaatggtgatgcaaaagccgtagcaaagcgtaaatctgtcccaactcgaaaatcaatgatttcagacttcgaagcaaaagaaggctttaatctaattgtaatgtctccagtcgcggctggtgtcggtttaactgtggtcggtgcgaatcatgtggttcatttagagcggtactggaacccagctaaagaagctcaagctacggatagggtttatcgtatcggacaggaaaaagaggttcatatctacatccctctgttgcatcaccctgaatttgaatcatttgatgtaaacctacataggctacttacccaaaaaacgttgctgaaggatgctgttgttacaccagaagatgttattccacagccagcaggtgtcgggggagtagtttctggtgatttgattgataaacgtattacagcggctgaacttgataagttaagttggcagcaatttgaagcgttatgtgtagaattgcttgcaaagattacggatagtgaaagcgcttggttgacgaacaatggtgctgatcatggtgctgatggtgtactacttaataacagtggtaatattttgcttcaggctaagtttacgcaacgacaatatgatggttataaagggatacaggagattcattctgctaaacctatttatgaatcagcaatgagaagttcttttgggcgtttgatttttgttactaattcacctttgttagctaagcgaactcatgaaattgctgccacatgtggtattgaagttttgggcagaacacagctgttaacttaccttgaagaatatgacattacactgaaagacattctgtcaaggttggggaaagatcgattaagagtttaa

SEQ ID NO: 9968 - DNA, 2064 bp, Vibrio cholerae; identical to SEQ ID NO: 9169

SEQ ID NO: 9969 - DNA, 735 bp, Vibrio cholerae; identical to SEQ ID NO: 9108

SEQ ID NO: 9970 - DNA, 1452 bp, Vibrio cholerae; identical to SEQ ID NO: 9113

SEQ ID NO: 9971 - DNA, 3450 bp, Vibrio cholerae; identical to SEQ ID NO: 9118

SEQ ID NO: 9972 - DNA, 2064 bp, Vibrio cholerae; identical to SEQ ID NO: 9173

SEQ ID NO: 9973 - DNA, 735 bp, Vibrio cholerae; identical to SEQ ID NO: 9108

SEQ ID NO: 9974 - DNA, 1452 bp, Vibrio cholerae; identical to SEQ ID NO: 9109

SEQ ID NO: 9975 - DNA, 3450 bp, Vibrio cholerae; identical to SEQ ID NO: 9118

SEQ ID NO: 9976 - DNA, 1716 bp, Vibrio cholerae
  modified_base (1686)..(1713): a, c, t, g, unknown or other
atgaccgatagccttaatctttccagcttatggccagacttgagcagtctaaatgtaatgccacctcaaactcctgagcaattgagtgctttgtttgtggttattttatggggtgtcgctctatttttcttaatttggtcagttgctgcatttattcgcgcaagacaacgagtagtttggcttaacaaatctttggatgatgcggagaaatcgactctgtcaggtgttcgaaatgatttaatttctagagctgaacaaaaaaaagattcagtagggcatttatggctcgagtttgatgaaacattgcttgaagtaaaaggtgctgatgacgttgttcgattgcataacacatttgatgctgactatttttttaatagttctagtttagctggtggtagtactgaaaacagaatgattgcggtggttccaggctttttaacggctctgggtgttattggtacttttgtcggtttacagctaggactttcagatctcaatatcgcgggcaacgttgatgtcaatgaaatgaaaaatggcgttgctggagttataaatggtgcaaaaatcgcatttatgacatcggtttggggcgtgctactcagtgttgcatttaatttcattgagaagatacttgagcaaattattagaaagaaaattaagtctttgcaaaaccgtattgacaggatgttccctcgattaagtgcggaatatcaactgcaatctattgcaaataacagccagcaatctcgagaaagcctacaaggacttgctgagaaaataggcgagaaaatgcaggagtcactcattcaggcaactcagggtattcaacaaggtctcgagagtagtctggaaaaaatcatggctccggctatcaataagctcgttgacgaaacatctgacgggaatcaaaaagcactggaaagcgttcttcaatctttcatggagggttttggtcaacaaggcgaacaacaacgtgtcgcgatggactctgcgtctcaaaacgtaaataagacgctagaatcaatgagcgtttcgatggctgctttcgtcaataagttggaagttcagcaaaacgcatcttcagaaagagagaaagaactgatctcaactatttcagttcaagtttctgagctagttactcagggtaatgagcagaagcgtgttctaacagagtttgtagaaaaacaagtctcagagttaggtgagcagcttactaaaagagaattagctgcttctgaacgtgaacagaaattggcttcctcaatggaaagtacgattaaagatttagtagaaaatgtttcagcacaaagccaagtcttgaccgattttgttcagaatcaagttgtccaacttacccaaacgttctccgaacgagatggaatggcaagtcagatggaaaaagagcgtaatgatatatttgtgaatcaaacgcaggcgatgaaagctggaacggatgagcttcttgctcaagtgaaagcggcgactgaatcacaacaaatcacaactaatagtattattgagcaaggtaaacaattacaaaatagtatcgattcctctgtttcggcatctgctcgagctacggagagtatgcagcagtcggcgaatgagttacgagttgccgctgatagtatgaatgtgtttggttccaacatcaaagatgcgggcaacaaactatctggtgctgtnnnnnnnnnnnnnnnnnnnnnnnnnnnntga

SEQ ID NO: 9977 - DNA, 735 bp, Vibrio cholerae; identical to SEQ ID NO: 9108

SEQ ID NO: 9978 - DNA, 1452 bp, Vibrio cholerae; identical to SEQ ID NO: 9113

SEQ ID NO: 9979 - DNA, 3441 bp, Vibrio cholerae; identical to SEQ ID NO: 9114

SEQ ID NO: 9980 - DNA, 2121 bp, Vibrio cholerae; identical to SEQ ID NO: 9107

SEQ ID NO: 9981 - DNA, 735 bp, Vibrio cholerae; identical to SEQ ID NO: 9108

SEQ ID NO: 9982 - DNA, 1452 bp, Vibrio cholerae; identical to SEQ ID NO: 9109

SEQ ID NO: 9983 - DNA, 2454 bp, Vibrio cholerae
ttgattaatccaatatccaagctgactgatagagttcgcgataaaacaactcttgaggacgtagctaagaagattgaagatgcacgacaaaccggagcaaccgtttttgattatgaaggacaatcatacgatatcagcgatcctgcagctgttgaaaaagttctaaacgaaataggtcacaagatatctagccctaatacagatctttctagctacggagaggcagaagacgccgagactgaatcagaaggctcagaaatacatgttgttgatattgatctaaatgacgaagagctgtctgaaaattctcctaaagttgaacaactgatttctgatatttcatgggatggtgagttaaattgggaaaaccacaagcggacaccattcccacaccaggatattggtgttcgttggattttaggcgttgaacaaaaaagcttatcagactcgaaagttagtggagccttgctagctgatgacatggggttaggtaagacttttatggccctctcagcaatagaacatatttatcaacgacaacaaattagtggtgaaacgaagaaacctgcgttgatagttgctcctttgagtttattggaaaactggaaggatgaggtagataaaacctttaaacactcaccattcaaagatgtagttattttgcaatcatccgctgagttaaatgagtatcgcatggggggcgtagagattcgaggccagagcgcatctgatgattgtttagaacccaaatattctttgaaagttgggaaatactttggtcctagccgtttagatctaccagagcgattggtaatcactacttatcaaactttgcgcgattaccagttctccatgtgtttgattgattgggggatcgtggttttcgatgaagcccagaacattaaaaatccaaatgcacttcaaactcgtgctgcgaaaggcctaaaagcggatttcaaactagtggctacgggtacgcctgtagaaaacagcttagccgatttttggtgtttaatggatacagcttgcccaggacatctgggtagctatcaagaatttcgtgctcgttatatctcaccaattcttaaagctgctggtgatgaagttgaagaaataagagctaggcttggaagagaacttcgtatagctgtcggggcattgatgcttaggcgcattaaagaggacaaccttaaagggttacctctaaaacatatgtatgctggtggagaatttgaaaactggaagtatttagaagaacttaagtcgacaatggttggctaccagagagatgtttacgaaggagcgattagccatcaactcgagaatgaagaaagtcacgcgcttaccactttgatgcggctaagagatagttcgttacatcctcggttaagtgatggaggtcgccttgatattcccaaaaatgcaaaatcagctagagctctatacggagaatcaggaaaattagtttccttgcttgagactttagacagagtacgaagcaaacaagaaaagtgcattatttttgcggttaacaaacgactgcaaagtttcttaagtgtgactttggggcagatctataacctaggtccgctctcagttattaatggtgatgcaaaagccgtagcaaagcgtaaatctgtcccaactcgaaaatcaatgatttcagacttcgaagcaaaagaaggctttaatctaattgtaatgtctccagtcgcggctggtgtcggtttaactgtggtcggtgcgaatcatgtggttcatttagagcggtactggaacccagctaaagaagctcaagctacggatagggtttatcgtatcggacaggaaaaagaggttcatatctacatccctctgttgcatcaccctgaatttgaatcatttgatgtaaacctacataggctacttacccaaaaaacgttgctgaaggatgctgttgttacaccagaagatgttattccacagccagcaggtgtcgggggagtagtttctggtgatttgattgataaacgtattacagcggctgaacttgataagttaagttggcagcaatttgaagcgttatgtgtagaattgcttgcaaagattacggatagtgaaagcgcttggttgacgaacaatggtgctgatcatggtgctgatggtgtactacttaataacagtggtaatattttgcttcaggctaagtttacgcaacgacaatatgatggttataaagggatacaggagattcattctgctaaacctatttatgaatcagcaatgagaagttcttttgggcgtttgatttttgttactaattcacctttgttagctaagcgaactcatgaaattgctgccacatgtggtattgaagttttgggcagaacacagctgttaacttaccttgaagaatatgacattacactgaaagacattctgtcaaggttggggaaagatcgattaagagtttaa

SEQ ID NO: 9984 - DNA, 1818 bp, Vibrio cholerae
ttgcttgaagtaaaaggtgctgatgacgttgttcgattgcataacacatttgatgctgactatttttttaatagttctagtttagctggtggtagtactgaaaacagaatgattgcggtggttccaggctttttaacggctctgggtgttattggtacttttgtcggtttacagctaggactttcagatctcaatatcgcgggcaacgttgatgtcaatgaaatgaaaaatggcgttgctggagttataaatggtgcaaaaatcgcatttatgacatcggtttggggcgtgctactcagtgttgcatttaatttcattgagaagatacttgagcaaattattagaaagaaaattaagtctttgcaaaaccgtattgacaggatgttccctcgattaagtgcggaatatcaactgcaatctattgcaaataacagccagcaatctcgagaaagcctacaaggacttgctgagaaaataggcgagaaaatgcaggagtcactcattcaggcaactcagggtattcaacaaggtctcgagagtagtctggaaaaaatcatggctccggctatcaataagctcgttgacgaaacatctgacgggaatcaaaaagcactggaaagcgttcttcaatctttcatggagggttttggtcaacaaggcgaacaacaacgtgtcgcgatggactctgcgtctcaaaacgtaaataagacgctagaatcaatgagcgtttcgatggctgctttcgtcaataagttggaagttcagcaaaacgcatcttcagaaagagagaaagaactgatctcaactatttcagttcaagtttctgagctagttactcagggtaatgagcagaagcgtgttctaacagagtttgtagaaaaacaagtctcagagttaggtgagcagcttactaaaagagaattagctgcttctgaacgtgaacagaaattggcttcctcaatggaaagtacgattaaagatttagtagaaaatgtttcagcacaaagccaagtcttgaccgattttgttcagaatcaagttgtccaacttacccaaacgttctccgaacgagatggaatggcaagtcagatggaaaaagagcgtaatgatatatttgtgaatcaaacgcaggcgatgaaagctggaacggatgagcttcttgctcaagtgaaagcggcgactgaatcacaacaaatcacaactaatagtattattgagcaaggtaaacaattacaaaatagtatcgattcctctgtttcggcatctgctcgagctacggagagtatgcagcagtcggcgaatgagttacgagttgccgctgatagtatgaatgtgtttggttccaacatcaaagatgcgggcaacaaactatctggtgctgttactgaagcggttaacagcacgaaggatttagcggaacaaaaccatctaggcgcagtgaaagttcaagcgttgagggagcagttgctggaagatacaagtaagtttagcgcgattgcagatcagataaacaatatgctgattagtgcagaacagtcgtttagcacgcttcgtactacccaaaatgagttccttgcagaacaaaaaggtaatctaaacgaactcacttcagaaatgaaacgtaatgtgaaagagttgacggagcaaatggctcaactgcttgaagattacgcagagcaagccaatggacaaaccgccgagcacctcaaagtttgggccaatagtagcacacaatatgcagagagcatgaatacagcagttagagctatttctagtgttgtcgatgaaattcaagataaagtgagccaacatgcgtag

SEQ ID NO: 9985 - DNA, 735 bp, Vibrio cholerae; identical to SEQ ID NO: 9108

SEQ ID NO: 9986 - DNA, 924 bp, Vibrio cholerae; identical to SEQ ID NO: 9654

SEQ ID NO: 9987 - DNA, 720 bp, Vibrio cholerae
gtggtcggtgcgaatcatgtggttcatttagagcggtactggaacccagctaaagaagctcaagctacggatagggtttatcgtatcggacaggaaaaagaggttcatatctacatccctctgttgcatcaccctgaatttgaatcatttgatgtaaacctacataggctacttacccaaaaaacgttgctgaaggatgctgttgttacaccagaagatgttattccacagccagcaggtgtcgggggagtagtttctggtgatttgattgataaacgtattacagcggctgaacttgataagttaagttggcagcaatttgaagcgttatgtgtagaattgcttgcaaagattacggatagtgaaagcgcttggttgacgaacaatggtgctgatcatggtgctgatggtgtactacttaataacagtggtaatattttgcttcaggctaagtttacgcaacgacaatatgatggttataaagggatacaggagattcattctgctaaacctatttatgaatcagcaatgagaagttcttttgggcgtttgatttttgttactaattcacctttgttagctaagcgaactcatgaaattgctgccacatgtggtattgaagttttgggcagaacacagctgttaacttaccttgaagaatatgacattacactgaaagacattctgtcaaggttggggaaagatcgattaagagtttaa

SEQ ID NO: 9988 - DNA, 2064 bp, Vibrio cholerae; identical to SEQ ID NO: 9173

SEQ ID NO: 9989 - DNA, 735 bp, Vibrio cholerae; identical to SEQ ID NO: 9108

SEQ ID NO: 9990 - DNA, 1452 bp, Vibrio cholerae; identical to SEQ ID NO: 9109

SEQ ID NO: 9991 - DNA, 3450 bp, Vibrio cholerae; identical to SEQ ID NO: 9118

SEQ ID NO: 9992 - DNA, 2064 bp, Vibrio cholerae; identical to SEQ ID NO: 9169

SEQ ID NO: 9993 - DNA, 735 bp, Vibrio cholerae; identical to SEQ ID NO: 9108

SEQ ID NO: 9994 - DNA, 1452 bp, Vibrio cholerae; identical to SEQ ID NO: 9109

SEQ ID NO: 9995 - DNA, 3450 bp, Vibrio cholerae; identical to SEQ ID NO: 9118

SEQ ID NO: 9996 - DNA, 2064 bp, Vibrio cholerae; identical to SEQ ID NO: 9169

SEQ ID NO: 9997 - DNA, 735 bp, Vibrio cholerae; identical to SEQ ID NO: 9108

SEQ ID NO: 9998 - DNA, 1452 bp, Vibrio cholerae; identical to SEQ ID NO: 9109

SEQ ID NO: 9999 - DNA, 3450 bp, Vibrio cholerae; identical to SEQ ID NO: 9118

SEQ ID NO: 10000 - DNA, 2064 bp, Vibrio cholerae; identical to SEQ ID NO: 9169

SEQ ID NO: 10001 - DNA, 735 bp, Vibrio cholerae
atgcgtagaggtgttcgttcgcatacacaaaactcagtagatgaagaaaatccctactgggtttcattttccgatctaatgtctgctttgcttgttatatttatacttgcagctgttgctctgattattgaattaactcaaaagaccaatgatgtcgaagctggtattgaagagcttaagcaagctgagttagcaagaaagaatataatttatgatgttcgagacgaactggctaaaagaaacgtaattgttgaaattgctgataacgatacggtaattcggattccagaaagcacactgacgtttgcatcaggtaaatcatcaattccgaacgatgcaacaatacagcaagcagttaaggacataggtgttgttcttcattctgcaattcagaagaaagaccgatttcaatatctcgataccatttttattgaggggcataccgatagcgatagtatccattacagaggaaaagggaattgggggttatctactgatcgagcaatatctgtctggaatgtctggcaaaatgaactgagcttaacgcctaaactcggtgacttagaaaacgcttatcatgcaaagctgttctctgttagtggttatgcggcgacaagacgtgccaatctacatgaggcgaatcagcaagaaaagagccagaataggtgcattgatattcgatttacagttaagaaaccatctattgctgagctcgagaggattgttggaccgtga

SEQ ID NO: 10002 - DNA, 1452 bp, Vibrio cholerae; identical to SEQ ID NO: 9113

SEQ ID NO: 10003 - DNA, 3441 bp, Vibrio cholerae; identical to SEQ ID NO: 9114

SEQ ID NO: 10004 - DNA, 2064 bp, Vibrio cholerae; identical to SEQ ID NO: 9169

SEQ ID NO: 10005 - DNA, 735 bp, Vibrio cholerae; identical to SEQ ID NO: 9108

SEQ ID NO: 10006 - DNA, 1452 bp, Vibrio cholerae; identical to SEQ ID NO: 9109

SEQ ID NO: 10007 - DNA, 3450 bp, Vibrio cholerae; identical to SEQ ID NO: 9118

SEQ ID NO: 10008 - DNA, 2064 bp, Vibrio cholerae; identical to SEQ ID NO: 9169

SEQ ID NO: 10009 - DNA, 735 bp, Vibrio cholerae; identical to SEQ ID NO: 9108

SEQ ID NO: 10010 - DNA, 1452 bp, Vibrio cholerae; identical to SEQ ID NO: 9109

SEQ ID NO: 10011 - DNA, 3450 bp, Vibrio cholerae; identical to SEQ ID NO: 9118

SEQ ID NO: 10012 - DNA, 2139 bp, Vibrio cholerae
  modified_base (1681)..(1719): a, c, t, g, unknown or other
atgaccgatagccttaatctttccagtttatggccagacttgagcagtctaaatgtaatgccacctcaaactcctgagcaattgagtgctttgtttgtggttattttatggggtgtcgctctatttttcttaatttggtcagttgctgcatttattcgcgcaagacaacgagtagtttggcttaacaaatctttggatgatgcggagaaatcgactctgtcaggtgttcgaaatgatttaatttctagagctgaacaaaaaaaagattcagtagggcatttatggctcgagtttgatgaaacattgcttgaagtaaaaggtgctgatgacgttgttcgattgcataacacatttgatgctgactatttttttaatagttctagtttagctggtggtagtactgaaaacagaatgattgcggtggttccaggctttttaacggctctgggtgttattggtacttttgtcggtttacagctaggactttcagatctcaatatcgcgggcaacgttgatgtcaatgaaatgaaaaatggcgttgctggagttataaatggtgcaaaaatcgcatttatgacatcggtttggggcgtgctactcagtgttgcatttaatttcattgagaagatacttgagcaaattattagaaagaaaattaagtctttgcaaaaccgtattgacaggatgttccctcgattaagtgcggaatatcaactgcaatctattgcaaataacagccagcaatctcgagaaagcctacaaggacttgctgagaaaataggcgagaaaatgcaggagtcactcattcaggcaactcagggtattcaacaaggtctcgagagtagtctggaaaaaatcatggctccggctatcaataagctcgttgacgaaacatctgacgggaatcaaaaagcactggaaagcgttcttcaatctttcatggagggttttggtcaacaaggcgaacagcaacgtgtcgcgatggactctgcgtctcaaaacgtaaataagacgctagaatcaatgagcgttttgatggctgctttcgtcaataagttggaagttcagcaaaacgcatcttcagaaagagagaaagaactgatctcaactatttcagttcaagtttctgagctagttactcagggtaatgagcagaagcgtgttctaacagagtttgtagaaaaacaagtctcagagttaggtgagcagcttactaaaagagaattagctgcttctgaacgtgaacagaaattggcttcctcaatggaaagtacgattaaagatttagtagaaaatgtttcagcacaaagccaagtcttgaccgattttgttcagaatcaagttgtccaacttacccaaacgttctccgaacgagatggaatggcaagtcagatggaaaaagagcgtaatgatatatttgtgaatcaaacgcaggcgatgaaagctggaacggatgagcttcttgctcaagtgaaagcggcgactgaatcacaacaaatcacaactaatagtattattgagcaaggtaaacaattacaaaatagtatcgattcctctgtttcggcatctgctcgagctacggagagtatgcagcagtcggcgaatgagttacgagttgccgctgatagtatgaatgtgtttggttccaacatcaaagatgcgggcaacaaactatctgggnnnnnnnnnnnnnnnnnnnnnnnnnnnnnnnnnnnnnnnagcacgaaggatttagcggaacaaaaccatctaggcgcagtgaaagttcaagcgttgagggagcagttgctggaagatacaagtaagtttagcgcgattgcagatcagataaacaatatgctgattagtgcagaacagtcgtttagcacgcttcgtactacccaaaatgagttccttgcagaacaaaaaggtaatctaaacgaactcacttcagaaatgaaacgtaatgtgaaagagttgacggagcaaatggctcaactgcttgaagattacgcagagcaagccaatggacaaaccgccgagcacctcaaagtttgggccaatagtagcacacaatatgcagagagcatgaatacagcagttagagctatttctagtgttgtcgatgaaattcaagataaagtgagccaacatgcgtag

SEQ ID NO: 10013 - DNA, 735 bp, Vibrio cholerae; identical to SEQ ID NO: 9108

SEQ ID NO: 10014 - DNA, 1452 bp, Vibrio cholerae; identical to SEQ ID NO: 9109

SEQ ID NO: 10015 - DNA, 2709 bp, Vibrio cholerae; identical to SEQ ID NO: 9715

SEQ ID NO: 10016 - DNA, 2121 bp, Vibrio cholerae; identical to SEQ ID NO: 9107

SEQ ID NO: 10017 - DNA, 735 bp, Vibrio cholerae; identical to SEQ ID NO: 9108

SEQ ID NO: 10018 - DNA, 1452 bp, Vibrio cholerae; identical to SEQ ID NO: 9109

SEQ ID NO: 10019 - DNA, 3450 bp, Vibrio cholerae; identical to SEQ ID NO: 9118

SEQ ID NO: 10020 - DNA, 2121 bp, Vibrio cholerae; identical to SEQ ID NO: 9107

SEQ ID NO: 10021 - DNA, 735 bp, Vibrio cholerae; identical to SEQ ID NO: 9108

SEQ ID NO: 10022 - DNA, 1452 bp, Vibrio cholerae; identical to SEQ ID NO: 9109

SEQ ID NO: 10023 - DNA, 3450 bp, Vibrio cholerae; identical to SEQ ID NO: 9118

SEQ ID NO: 10024 - DNA, 2064 bp, Vibrio cholerae; identical to SEQ ID NO: 9173

SEQ ID NO: 10025 - DNA, 735 bp, Vibrio cholerae; identical to SEQ ID NO: 9108

SEQ ID NO: 10026 - DNA, 1452 bp, Vibrio cholerae; identical to SEQ ID NO: 9109

SEQ ID NO: 10027 - DNA, 3450 bp, Vibrio cholerae; identical to SEQ ID NO: 9118

SEQ ID NO: 10028 - DNA, 2064 bp, Vibrio cholerae; identical to SEQ ID NO: 9652

SEQ ID NO: 10029 - DNA, 735 bp, Vibrio cholerae; identical to SEQ ID NO: 9108

SEQ ID NO: 10030 - DNA, 1452 bp, Vibrio cholerae; identical to SEQ ID NO: 9109

SEQ ID NO: 10031 - DNA, 3450 bp, Vibrio cholerae; identical to SEQ ID NO: 9118

SEQ ID NO: 10032 - DNA, 735 bp, Vibrio cholerae O1 biovar El Tor; identical to SEQ ID NO: 9108

SEQ ID NO: 10033 - DNA, 1452 bp, Vibrio cholerae O1 biovar El Tor; identical to SEQ ID NO: 9109

SEQ ID NO: 10034 - DNA, 3450 bp, Vibrio cholerae O1 biovar El Tor; identical to SEQ ID NO: 9118

SEQ ID NO: 10035 - DNA, 2121 bp, Vibrio cholerae O1 biovar El Tor; identical to SEQ ID NO: 9137

SEQ ID NO: 10036 - DNA, 735 bp, Vibrio cholerae O1 biovar El Tor; identical to SEQ ID NO: 9108

SEQ ID NO: 10037 - DNA, 1452 bp, Vibrio cholerae O1 biovar El Tor; identical to SEQ ID NO: 9109

SEQ ID NO: 10038 - DNA, 3450 bp, Vibrio cholerae O1 biovar El Tor; identical to SEQ ID NO: 9118

SEQ ID NO: 10039 - DNA, 2121 bp, Vibrio cholerae O1 biovar El Tor; identical to SEQ ID NO: 9107

SEQ ID NO: 10040 - DNA, 735 bp, Vibrio cholerae O1 biovar El Tor; identical to SEQ ID NO: 9108

SEQ ID NO: 10041 - DNA, 1452 bp, Vibrio cholerae O1 biovar El Tor; identical to SEQ ID NO: 9109

SEQ ID NO: 10042 - DNA, 3450 bp, Vibrio cholerae O1 biovar El Tor; identical to SEQ ID NO: 9118

SEQ ID NO: 10043 - DNA, 2121 bp, Vibrio cholerae O1 biovar El Tor; identical to SEQ ID NO: 9107

SEQ ID NO: 10044 - DNA, 735 bp, Vibrio cholerae O1 biovar El Tor; identical to SEQ ID NO: 9108

SEQ ID NO: 10045 - DNA, 1452 bp, Vibrio cholerae O1 biovar El Tor; identical to SEQ ID NO: 9109

SEQ ID NO: 10046 - DNA, 3450 bp, Vibrio cholerae O1 biovar El Tor; identical to SEQ ID NO: 9118

SEQ ID NO: 10047 - DNA, 2121 bp, Vibrio cholerae; identical to SEQ ID NO: 9107

SEQ ID NO: 10048 - DNA, 735 bp, Vibrio cholerae; identical to SEQ ID NO: 9108

SEQ ID NO: 10049 - DNA, 1452 bp, Vibrio cholerae; identical to SEQ ID NO: 9109

SEQ ID NO: 10050 - DNA, 3450 bp, Vibrio cholerae; identical to SEQ ID NO: 9118

SEQ ID NO: 10051 - DNA, 2121 bp, Vibrio cholerae O1 str. KW3; identical to SEQ ID NO: 9137

SEQ ID NO: 10052 - DNA, 735 bp, Vibrio cholerae O1 str. KW3; identical to SEQ ID NO: 9108

SEQ ID NO: 10053 - DNA, 1452 bp, Vibrio cholerae O1 str. KW3; identical to SEQ ID NO: 9109

SEQ ID NO: 10054 - DNA, 3450 bp, Vibrio cholerae O1 str. KW3; identical to SEQ ID NO: 9118

SEQ ID NO: 10055 - DNA, 2121 bp, Vibrio cholerae; identical to SEQ ID NO: 9111

SEQ ID NO: 10056 - DNA, 735 bp, Vibrio cholerae; identical to SEQ ID NO: 9108

SEQ ID NO: 10057 - DNA, 1452 bp, Vibrio cholerae; identical to SEQ ID NO: 9113

SEQ ID NO: 10058 - DNA, 3441 bp, Vibrio cholerae; identical to SEQ ID NO: 9114

SEQ ID NO: 10059 - DNA, 735 bp, Vibrio cholerae; identical to SEQ ID NO: 9108

SEQ ID NO: 10060 - DNA, 1452 bp, Vibrio cholerae; identical to SEQ ID NO: 9117

SEQ ID NO: 10061 - DNA, 3450 bp, Vibrio cholerae; identical to SEQ ID NO: 9118

SEQ ID NO: 10062 - DNA, 2121 bp, Vibrio cholerae O1 biovar El Tor; identical to SEQ ID NO: 9107

SEQ ID NO: 10063 - DNA, 735 bp, Vibrio cholerae O1 biovar El Tor; identical to SEQ ID NO: 9108

SEQ ID NO: 10064 - DNA, 1452 bp, Vibrio cholerae O1 biovar El Tor; identical to SEQ ID NO: 9109

SEQ ID NO: 10065 - DNA, 2121 bp, Vibrio cholerae O1 biovar El Tor; identical to SEQ ID NO: 9107

SEQ ID NO: 10066 - DNA, 735 bp, Vibrio cholerae O1 biovar El Tor; identical to SEQ ID NO: 9108

SEQ ID NO: 10067 - DNA, 1452 bp, Vibrio cholerae O1 biovar El Tor; identical to SEQ ID NO: 9109

SEQ ID NO: 10068 - DNA, 3450 bp, Vibrio cholerae O1 biovar El Tor; identical to SEQ ID NO: 9118

SEQ ID NO: 10069 - DNA, 2121 bp, Vibrio cholerae; identical to SEQ ID NO: 9107

SEQ ID NO: 10070 - DNA, 735 bp, Vibrio cholerae; identical to SEQ ID NO: 9108

SEQ ID NO: 10071 - DNA, 1452 bp, Vibrio cholerae; identical to SEQ ID NO: 9109

SEQ ID NO: 10072 - DNA, 3450 bp, Vibrio cholerae; identical to SEQ ID NO: 9118

SEQ ID NO: 10073 - DNA, 2121 bp, Vibrio cholerae; identical to SEQ ID NO: 9107

SEQ ID NO: 10074 - DNA, 735 bp, Vibrio cholerae; identical to SEQ ID NO: 9108

SEQ ID NO: 10075 - DNA, 1452 bp, Vibrio cholerae; identical to SEQ ID NO: 9117

SEQ ID NO: 10076 - DNA, 3450 bp, Vibrio cholerae; identical to SEQ ID NO: 9118

SEQ ID NO: 10077 - DNA, 2121 bp, Vibrio cholerae O1 biovar El Tor; identical to SEQ ID NO: 9137

SEQ ID NO: 10078 - DNA, 735 bp, Vibrio cholerae O1 biovar El Tor; identical to SEQ ID NO: 9108

SEQ ID NO: 10079 - DNA, 1452 bp, Vibrio cholerae O1 biovar El Tor; identical to SEQ ID NO: 9109

SEQ ID NO: 10080 - DNA, 3450 bp, Vibrio cholerae O1 biovar El Tor; identical to SEQ ID NO: 9118

SEQ ID NO: 10081 - DNA, 2187 bp, Haemophilus paraphrohaemolyticus HK411
gtggacgcattattagcttttttttcaaaattctttccgggtctgccctattcaattaacccacaaacaggagagtggattatagatcaatctgctcaatctaatcttttaacgttaattatcttaattattcttgttatttgtttttttatatactggtgtaaagtccaatcccaatataaagattctgtaaaaggcattcaattttacgaaaagtatattactggagttgaacaagacaaagaacaaaatcagttagctgaaaaacgaagagaattattagaacaagcaaaagagagtaaaaaatttggtgcaatttggcaagaatttaatgaatcgcttgttgaagttgaaattacgaaagataaacgaaaactttataacactgcggatgctgcttatttctttaataatcatactttagcaggtggtttaaccgaaaatcgcctattttccgctgtacctggttttctaactgcgattggtgttttaggtacattcttaggactaacctttggtttgggtggcttaagtgagcattttaaagaaggtgctactcccaaagaaataatggaaggtattaacttaatggttagtggggctagtacagcatttattacctccctttatggtgttatcacaagtttaatttttaactggaaagaaaaagcccttgaacgcaaggtaaaaaatcgaatcactaaactacaagtacgcattgatgctattttccctcgaattgttgcggaacaaactttaaccgagattaaagcaataaatcgtgacacggaaacgcatttggctagcttaagtgaaaaaattggcgagcaaatgcaaaaggtaatgaaagatatttcctctgaaattagcagaagtattactgatagccttaaagaatctcttgcaccagcggtaactaacatgatggaaaattcccgtgaaggttcggaaaaaatggtggaggttttacttcaggaatttattagcaaaattggcaatgcaggcgaaatgcaaaaaaatgcaatgaacaatgccagccaagcatttgcggaaagttcaacccagatgatgtctcgtctttctatctttgttgaacaattagatgccaaagtgaccgaagtacgtgacggtactcgccaaatgttggaacaaatgcaacagcatttcagcacccaaattggcgatatgcaatcgcaaactcaacagcagaatgaacaagcagtggaatttatgcaaaccctttcaagttcgatgattgaatttaatcagcataaccaatccatgttttcttctatgcaaactatgttaagtgaaaaagctgaagaacaatctcttcagtttgcaaaacgagaacaagatctcaccgtttcaaccaacaattttatggaaaaattgactcaagcgattgaaactttgaacaataacaatagccagatgttaaaagcgatggagtcaggattaactgaacgaatcaatacccaagcagaggctgataaagcacgatctgaagattttatccaacaagcagaaaaagggcgtcaaacacaacaaatcttgacggatagcgtgaaagaagtgttggcaacacaaggcaaacaaaatgatgaactctctttacaactgactacactggcaaattcgtttgagcgtgttgctcaagctcataaagcaagttcagaatcgatggaaaatgcatcagccaagattaacagtagtgcgacaggctttgataatgtggcaacccgcttaaaagcagcattgactgagtttgatacaaaactagccacaatgcttattaatgtagaaaaagttacgcgtgaaaatagcaatacagccactttatttaatgcctcaaccagtcgtttagaaacgtcaggcgtattcttagaaaaaacggcggataatttaagtgacacagcacacacgactaaagccgcatttgaaagtatgcaaaccaacttcaatcaatttgcattgcaattaagaacgcatattgaagccttaaatgcagaggtgagtaaattgcttgtggattacagtaaacaggttcaaagccaaactaataatcgtttgaatgagtggaataaccaaactcgtgaatacactaccaatatggtgaatgcggtgaaagccttaagcgatacagtggatgaaattgaaactaaactaccacatagaggtgcataa

SEQ ID NO: 10082 - DNA, 792 bp, Haemophilus paraphrohaemolyticus HK411
atgagatggtgtaatccaaactcatctgcttcaacagatgaagaaaacccgtattggatgtcattctccgatatgatggcaagtttattggtaatctttatgttggcagctgcagcattgatgttgcagttggtaataaaaaccgaagatttagaaaagaaaagccaaaaggtggataaacaggttgatgaagtcgcaagggctgaaaaagttcgaaaacagattattgatgaaattgtcgatgaattaaagcaaaagcaaattgtagttgaaaagtcagataatgataccgtgttacatattcctgagagttcgcttcggtttgcatcgggtagctcagatattccagaatcgttgcaagctaatgtccgagaaattggcaatgttttgtatgaggctttaaatagagatattgagagtcaaaataaagaaaaacgggctcgttttacattattagatacggtcttcattgaagggcataccgataacaacttctataaaaatccaatgctacgtggaaactgggggttatctgcaatgcgtgctatttcagtttggcaattttgggctgatgatccgaatcaagtaagcaatggattaagtcaaatgattaaccatgctaatgaggcattattttcagtcagtggatatggcgatactcgtccacgtgatgatgctaaacattgtgaaaaaaatgatgatatttgccatagcaaaaaccgccgtattgatattcggattactgtgaaaaaaccaagcatcaaagatttagaagagattaagggaaaataa

SEQ ID NO: 10083 - DNA, 1524 bp, Haemophilus paraphrohaemolyticus HK411
atgagtgatgaactaaaattaccttgtattagtttaccttcaattacctttactttacctgaacgagaaatcaatcttactaaagaagtgaaaaaattagcccaactgacaaaaagagcagggatgggatccgatgtttttaaaacaaattttttgcggatctctagtgctttagaaaaaggggaattttccccttttatgctacaaacacctaaccaagtgagagcttatttgacgattgcaacatcaaatgaggtcaaagacgaggtaaaaaagcaggtacatttaagtcccgaattgattgatcagtttgcagccgtgcgttcaccgatgagccgcctttctttgatgatgttaattcagctctattttgatcgatttgacaccttagaaagcggtgaaaattttgaaaatttatgcaaatttttaaaaaaccaagtcaataagctagataaaattcgtcagagaaaagaagcagttgatcttgttaaaagtgatttagctcgttataccgaatttgcttctcagctttttagcccaacggctccacataagattgtaaaaatggcccggcagaatcagcaggattttactcatactttgcaagatatggggatagttgcatttaaaaatgggcgattattacaaattagtcaatccatttactatatcgaaactctgaaaaccattcctttgggcgaatatcaccagatttttgaagaagtaaccaaagccgatattattcaagtgcaatacgataaacattattggattggacataaagtggtggaaattttgattgatcgcaccgcaaaagaggggggagagatttccgaagtatggcagaatgtgattttagatattgccgatgatccacgtattgcctctgaaattaacctaaatcaatggtggctgccattaggtgaaaaacgcgtagaacaaatgcgttcttggttaagtcgccacgatcttaaattattcctaaaattattggaacaaagtgcaattgatctcggtaaagcaaaaatggaaaggatgtttgcggacagaaaacgttttttagaagcgttatttgataaagatttgattcgacactctcgactgttctttactcgagaggctgcaaattatttacgttaccattatgcggaaccacatcgcctagatgcctatgcaagggtttcgggtgaagcgtctgttatctatttacagttaaaaaatggctggcatttagtagaaggcacacatagctttagagttcgctatttccatcaaattcctaaacattctaggatcgccgattatcagcatcgtttttatgaacgagatgagttatcaggtggcttggaaggctggtatagattaaattttggcaaacagatgtatagtacggctcatgatgtgcattccagctggaagtttaagttattagattggtttaagaaaacaggtattaacctacctgctgatgaagtattagactcttgggaatactaccgttatcgtgagaaaaatggagcataa

SEQ ID NO: 10084 - DNA, 3000 bp, Haemophilus paraphrohaemolyticus HK411
atggggttattagatttaatcaaatcgttcatttcaacgagtaaaattgaagagaaaatccagtggaaaatcaatgcttttgaagatattgagtttatctttcctccacaagcggttgaaaatccagaatcttttgcaaaaaacaatcctttttttgcgttgcaatatggctatttgaaggccttgcaagatagctattcaattaatcgagtttcagatggttttattgttccttccatcattttgcctgatttaggcgaagattttattcatctttttgaaatgccaccgcattttacagggagttatcaaatcgatattcgaggcaacacgaccagaaccgatttctccgtgaatcttaaactccttatgcccgatggtagcacagtgttccaacctcaacgcttgggggcttttttatctttaactaacaaagagaagtattctttaacacctgcagaatatcaggcattgaaagccttagagcgccatcaagaactaagagaaaaagatcgttctgaatatgaaaataattggttgatgttccaactacaaacggcaaaagtggttggaatgcctattgatcttgctcatttcaatcaaggaaatttgaatttagttaaacctgaaacgatcggtgtggcggtaaatcaattagcgaatggcgatattgagttgattcctgcgattaaaggcgttgcaccagaggatattagagagcgattagggcagttagataagcaagataaacgaattttgcgagtaaaaaaacagtttgtcttgtttgatgaaaagactatctcagctattaacgaaatcttccccgtagatgaaaacggagaaagtcgccatattcgccgtataaacaaagcggaagtggcaaatttcttgaaaaatcctaccgcttatttgaatggagcagtggtagatttagatacgggcttttctcttcgcgtggcaggggctgaaaaattcgtgtataaatattttggtggtgaacaagagtcgggtattgattggcttggcgatcagcattttatcaattcgccaattgcctttgaggagattattcgttctgaggctgagttagaagaggttaaagcactgattgaaaatgctcgcaacgtaggagcttcggttatccaagtcggagaagcctccattgatatttcagatactgaaacggttgaaaccattttagcgaaaattactcaatctattcaaaatcaggatgaagatgaagaaaatggcattccatcagatacagataatgcagaacaaagtgaaaaagcagttgttgatattgaagataatgatgaagaaaaccgattcaagcggtttgtttctttgttaaatttacaagaaattccaccgcttgatcaggaaaatctaaaacggctaccttatcctcatcagcaagaaggcatccattggattctttcgcatctaaaaacgattgaacaggagcaaactgagagtggtgcattgttagctgatgatatgggactaggtaaaacctatatgacgttagtgtcgattgctgaatattatcgtcgccagaatgagctttcaaaaacactgaaaccaattttagttgttgctcctctgagtttattagaaaactggcaagctgagcttgatgaaacctttaaacaactgccgtttgatgatgtgattgttttacaagggcaaggattgaaaaagtatcgacttagtggcagtgaaattaaacaacatcttcataacgatgtggcttcggcagatgaaattcggtactccttgaaagtgggaaacaattataagcaagatcgtttagatatgcctgcacgtttggtgttaaccacctatcaaacgttgcgtgattatcaattctcactctgtcggattgactggggcatggttatttttgatgaggctcagaacttaaaaaatccaaatacattagcaactcgagcagcaaaaggtttaaaatcagagtttaaactgctcgcaacagggacacctgtggaaaatagcttaaaagatttttggtgtttaatggataccgcaacaccaggtttactaggttcttggcgggaatttagagaaacctatattacgccaattcttaaggcagatgagtcagaaacagatgagaaaaaatatgaaatagggcgtattttacgggaaaaagtcgatcgctttatgttaagacgcaccaaagctgaaaaattgaaaggcttacctgaaaaagttatttattcaggatgtcgctccgatcaacattatttgcctcaacttgaagccttgatgaaaggtgtccagcttcaaagctataatgatgttgttactcggatacgtaatgctacaaataaacagggtttgatgttggcgtcattgcgagatctgaagatgattagtattcatcctcagattcgagatttagaaagtaaaaattatttacctgatgccaatctttccgccaaaattggatctttactcagtattataaaagaaattaaacaacgacaagaaaaggttattatttttgctgagagtaagttggttcagtcctatttaattgcattgatgatgatcgattatggcatcagtgttgatgtgatcaatggtgaaacggcggcggtagcgacctcaaaaaatacacgttctcgcaaaaatattattgatgcatttcaagctcaacaaggatttggtgtactgattatgtcacctgttgcagctggcgttggattaacggtaacaggagcgaataatgttattcatttagagcgtcattggaatccagctaaagaagcccaagcaacagatcgggtgtatcgaatcggtcagcaaaaacaggttaatgtctatttaccgatggcagttcatccagaaattcgatcttttgatttacagctacatcaattgcttaataataaggttgatttaagtgaagcggttgtggaaaaccctgatattgagtcagaacagatgatgagtatgtttaattaccagtattag

SEQ ID NO: 10085 - DNA, 2034 bp, Gallibacterium anatis
gtgtcttttgaagccatacttcgtaaatatcaaggtcagtttgccgagcatttggatgatgatatgacggaggagattaaacagttaaatgctccccgcatttcagttgcttgggaagagttccaaaaacacttggtgcgaggtcgtaatttttttaatcaacctgaattgcgaagcgtagttggtgcagagtatttctttaacagtactaatttggtgagtagggcaggatcgaaactttattcagccgtgccttctatattgttggggattggactaatcggtactttcttcggcctatattatgggctgatgcgtgtagattttaaagatgcagcatctatgcaagttctgcttcaagcggcaggagcaaaatttgttgcctctatttgggggttggtattgtcacttgttttcactggttatgagaaaaataaagagcaaaaattagatgagcagttagtccgtattcaaaatctaatcaatcatgagattcctcgtcaattatccgagcaaagcttggttgaattagaaatttatgcttctgaacaacgagatcaacttaatagtttaagtttaaatattgccgaggctttaggtgaaaaaattacagcttctttagttgataatctattagtgcctatccaaaatatggctcgtaatttgggtggtaccccagaaaatacattgtatgatcgcttatctgtgttggcaggagggattggtgataacttctctagaaatatggatgaattactccgcaatgtgattaaagaaattagcagtaccgttggtgcggatgcggataagttaaaacaaactttgcagtcacttgaagaatcgttggctgggttaaaagcgacatttgaatcacaacaaaaacagatgtcagacaatacctctcatcacctcaaaactttaggggagtctattaaaacaatgacagaggggatagaaaatcaaaatagagagcttaaacaatcattagcaggcttaagtcatacgatgtcagaacagacatctgagttaagccaatctttatcagtactttctcttcaaatgaatagacaaagtgaagtattagaacagtctatagaaaagattgcccaaggtgcacaactgtctcagcaaaatatcactgatagtagcaagaatgttgttgatttattaaatcaacaagcaggtaaagtatctgaacagattgaaggtaaagcaactgaagccttaggtcgcattgaacagacaatgcttgatcaagctaaacattttgaaacggcgttagctgggttgaaagtccagatgactgaacaaagtcatttattaaaagaagtggtagatgaaattggtaaaaatgcaggtattgctaatgaaaaattagccagtggcagccaagcggcatttattcagattcaacaggcattacaagacgtgcgagagactattactgattctcagaaaaaactacaagatattccagatcacttggagagatttcatacttcgacacaaacgttgggtaatatggcggacagcaccaaagatgcttctcttcgccttcaacaagtggtggaaggacttcaggatagtcaaagtaaatggcatagtgccatacagcaatcgattacttcttttgctcaatcgctttctacatttggcggaagtttatctagccaagagcaacaattatcgcgcatttcccagcagttaaataccatcgtacgagatactcaaaatgtatgtcaacaattagcatcatcttatgaagaaataattggtaccaatagtgagagcgcacagcaattgcgtgaacagttagatggatatctatcggcatttattcaaaaaattaaaaatattcaagacgaaatgaatcaacgttgtgaggattcatacgcacaaatgagtgaacatttccaagatgcactggcaaaattagagcaaccattggagagttttggcaaagcggtctctgatgcatgttcagaacttaatgattcgattcatgagcttagtgtacctcgtcataaatcataa

SEQ ID NO: 10086 - DNA, 897 bp, Gallibacterium anatis
atgagaagactaagtatgcgaactaagctagatgtaaaagaagaaaatcattattggatatccatatctgacttgatgacttctttgttgtttatctttattttggcttttgcttataccgttaaaagtattcaagaagaggtacctaacatagaagaactggagcgattgcgacaagagaatatcacgctcaagatgagggtcgcagaactgacacaggaaaacttgatcctttctgagaaagtaactgcattaacaaaagaaaatcaaacactaaaagatgaattgaagctgttgagggaggaaaatcaatcactcaaagaacaattggttgatttgaaagcacaaagtcttgtggctggcgaaaacttcacgcaaagggctcagttgttgttattagttcaacaaaagctgaaagagaaaaacattgatgtggatattgatcctaaaaatggcaatatgcggattaattcagaagtactttttgagagtggttcagcgattcttaaagaaaatgggaaacaggtgattggtgaaatagccattcaaattaaagaaaaactcgctaataatgagaagtatcgccgggctattgatactatttttattgaaggacatacggatagtacgccgtttaatagaggatattgctttggcagaccttgctccaatatggagttgtcttctcaacgagcgattaatacgtatatttacatggatgaagctgccaatattgctttgatgaagaatgcattaggaaaacaattattttcgtatagtggttatgctgatactcgcccaattgaaggaaatgataattcgactcctgaaaatcgggcaaaaaatcgtcgcattgaactcttttttgctttgcataatcctcagaataaaggttaa

SEQ ID NO: 10087 - DNA, 1440 bp, Gallibacterium anatis
gtgagtatccatcatggtttcgaccgataccctactaagaaatttttaaatggattagaaaaatcgacaaagcaacttgttcaaattgctaatggaagtggaagtaatttagaagaagagtaccaaaaaatgcgtgtggctatgtggcagtttatacggcaagagaataccacattatcattatcgactttgagagagaaaaagcttgctctattggtgttaagaaatgaaaaatataaagtaggtcaggagagtagagattgcctttcgctgttatggcaaagtaagaaatggatgacgttttttgatcttatccagctcaatatcagtataggagctgagtcactttgtaaacgcttgctgagactttattatcaacattatttgtttttttggaataataagtatgattcagatggacaggggagaagcgaggctgaaaaattaacttgttttttcaaagtactcagatactgtgcagacagagctcctggtaagcaaacatcagtccaggcagtaaagcaataccctcagctgattttagatgataataaacatttatcgttgcttgatagtgatgaaccgatggaagaccttcagaagcgctttggttgggaggatggcgataatattgtcgcttttgtgcagttacgtcgattattgcaagaagtgaagacatggtctgcgaatgaatataatgctcgaattcaaatgactttagaagaggtattgcgatataaagatgctcatatcaatagtggacgtaccttattggaagaggtagtgcgagagatgcttgtaaaatgcaaatcgataaatcagataagggcaaggtgggaaaatttcattattttaaatgttggcgatccacgtaatagtcgtgctttgtctgcttggcggcgtatcggagaagaataccgaaaatggttatattctcacctatcacgtggagatttaagagagttcttggagaacttaaccagtgcagggggagatgagatttttaaatatcgacgaaaattttggttgcagtatatcgattatcttgtttacgccaagattatgctgggtgaaaatgattacttaaaattacaaagagaaaaccctgagtttgcacgtcgatttgatgaacatccagagacgtatggacgtatgaaagatagtgataaatcgtgtatctatatgcagataaggaatttacacattatcgagggaacgtttagtgcaaaagttcgtttttatgcaaaaattccaattaatttgtcacatagagattataagtatgccgatttttactcagcacagaccaggcgtaaggcaagattgattgacgagtatgttcataatgcttctgactcctatcattggcagcgtatcttaattaaagacatcaataggttgacaggtattcgtatgtcgctgcaggatgtgatgctttaa

SEQ ID NO: 10088 - DNA, 3102 bp, Gallibacterium anatis
atgttaaccattacactaaaagataattacgaaaaatttgtcgctaagcgattatttgatgatgggcttgttcagtcattcgatggtaaagatactatggtgatgacggatgaacaggtctatcatcttttagaagaggaagatagtgtactagatagatttagtcttcctgaggtgtttaatggttatcttggtatccaaatgcgaggattacctatacagccttcttgtcagtttctggttacttttgttgatgagcgtgggcgagccatgatgggggctaaacagtcggggtgcttgcttctacttggtaatagcaaacagtatcttttgccgcgtcatttttttgatttattgagcttacaacagcaattaatgcattcatacaatgaggcattgtgttggaaaattattgagattgcgaaaaatgatgtaagtaaaaaaatcatttttaaggggcttcctgaaaatgatgttgtgacggatgtacattatgtctctattgacctacagttacatgatgatggttctgccacacctaagccacgcattcaaaatctttctcaacaaactcaagcagttgcagatgttaaattattaaatccagattgtttattgcttgttattagccatgttcaggatggtcatcaaatacgttatattgcacagaaagatgtgattatggcgtatcgacgtatccaaaatattggcacgctatccaaagaaaatctcattaaatttcaagaaaaccctattgcttttgtgttagaggaagatgagtcagaaaatgattttccaattaattttgactcatttcgcattattggagcaggggaaccttatgttgggtattttggctccaaaaatctggattctcccattgccgctgctttattttctgatgataagcagattaaaaaacaagtctctgaaaaagtgaataaggtctgtcagtcagcttcaacagaggagttagagacatacattcagagaattcaggaagcacaacaaaatcatctcgctgaagttgattttggtggtgaaaagctctatccagtggagtatgcgtctgcattggatttgctagaaaaaatgaaaaaggaagagatgattggaggggctctttacgctgatgctgagaatgactcctcacttgtcttgcaaatacaacccaatgatgaagagacttttaagtttagagaaaaagaattagaaaaattagccgccattaataccgccaatgataatcccggtgatttatttgaccacttggcttttcctcctaagtcatatcaggttgctggagtgaattggctagttgatctttatcagcaaggatttaagggaggtattttggctgatgatatggggctaggaaagacgtatcaattaatcagctttatctattttctacttagacgtacagagttccaagcggaagggaaaaagagaatattaatcgtggctcccacaattcttttggataattggcaaaacgaatttgctaagtttttaccaccagaagtacatcagaaattagtcattcagacgttgaaagcagggcatctcagccgaatcaaaagagaagaacataaccaacagggaaaatacaacacgtttgatgttgataagtttttatcgaagaatcaggacattattatcacatcttatgaaaccttagccaattatcagtttgcttttgttgatgaacggtttaattttgggtgcattatttttgatgaggcacataagattaaaaatcctaatgccaaaatttctcaagcagcaagagcgattggtagtttgattaaattctgtgtactgctgacgggtacaccgattgaaaatgaactaagagatttatgggctttgtttgatgtatttgctcctgagcattttggtagttggaagtcctttagagaagaatttattaatgttgcggaagagggcttagataaaaagctaagagagtgttgctctaattatttgttgagacgactgaaaaaagattatttagggcatgagttacctcaaaaaattgagaaaacctatgaggttgttttttcgggagaagaggttgcacaatatcatcagtatcgtcattctgggctagatgctatcaccaaattgcataaattaaaaagtttttctttgcaccgccaattagccaatggggaggttagcaatattcgtttggatgatttctcgaaatcgaaaaagttaattgaggtgttagagcaaattcgtcagaaacaagaaaaagtgattatttttgtgatgaggcgtgcggcacaggatttgcttcgctatggattaaatcagcattttggtcttgatattcagattattaatggcgataacaacaaaaatgcagaacatttattgcatcgctttagaacctcacaagggtttgatgttattatcttgtctactttagcagcaggagtaggtttgacgctgacagaggccaatcacgttattcattatgaacggtggtggaatgcttctaaagaggatcaagcaagtgatcgcgtatatagaattggtcaagcgaaagatgtttttattcatcatattttaggcactatgcctaatgatgagataagcattgataaggcaattcatcagttgatttcacaaaaacgtactacggcaggattcttaattccacccaaaagcgtgtctaccaatgaggtgggaacaatggttattccttcattaagtttggaagagaagttgggattgttagaatggactgaattcgagaaattggtggcaactctttatcgtcgtctgggatatactgtagaacttaccccttctgattctcgggattatggtgcagatgttattgcgtataaaggatcggaaaaacttgcaattcaatgtaagcattcgagtaatgcgcaggcaaaaaatcaggaggcagtttaccagctagtcactgaggcgaaggattactattctcctacgcatttaatcgctatttgcaataccaaatttactaagacgactcatacacttgcccagcaacatggtattcagttaatagaaaaagagggtttgattgatttgatagagaaaacggagctgagcatttga

SEQ ID NO: 10089 - DNA, 2034 bp, Gallibacterium anatis
gtgtcttttgaagccatacttcgtaaatatcaaggtcagtttgccgagcatttggatgatgatatgacggaggagattaaacagttaaatgctccccgcatttcagttgcttgggaagagttccaaaaacacttggtgcgaggtcgtaatttttttaatcaacctgaattgcgaagcgtagttggtgcagagtatttctttaacagtactaatttggtgagtagggcaggatcgaaactttattcagccgtgccttctatattgttggggattggactaatcggtactttcttcggcctatattatgggctgatgcgtgtagattttaaagatgcagcatctatgcaagttctgcttcaagcggcaggagcaaaatttgttgcctctatttgggggttggtattgtcacttgttttcactggttatgagaaaaataaagagcaaaaattagatgagcagttagtccgtattcaaaatctaatcaatcatgagattcctcgtcaattatccgagcaaagcttggttgaattagaaatttatgcttctgaacaacgagatcaacttaatagtttaagtttaaatattgccgaggctttaggtgaaaaaattacagcttctttagttgataatctattagtgcctatccaaaatatggctcgtaatttgggtggtaccccagaaaatacattgtatgatcgcttatctgtgttggcaggagggattggtgataacttctctagaaatatggatgaattactccgcaatgtgattaaagaaattagcagtaccgttggtgcggatgcggataagttaaaacaaactttgcagtcacttgaagaatcgttggctgggttaaaagcgacatttgaatcacaacaaaaacagatgtcagacaatacctcttatcacctcaaaactttaggggagtctattaaaacaatgacagaggggataggaaatcaaaatagagagcttaaacaatcattagcaggcttaagtcatacgatgtcagaacagacatctgagttaagccaatctttatcagtactttctcttcaaatgaatagacaaagtgaagtattagaacagtctatagaaaagattgcccaaggtgcacaactgtctcagcaaaatatcactgatagtagcaagaatgttgttgatttattaaatcaacaagcaggtaaagtatctgaacagattgaaggtaaagcaactgaagccttaggtcgcattgaacagacaatgcttgatcaagctaaacattttgaaacggcgttagctgggttgaaagtccagatgactgaacaaagtcatttattaaaagaagtggtagatgaaattggtaaaaatgcaggtattgctaatgaaaaattagccagtggcagccaagcggcatttattcagattcaacaggcattacaagacgtgcgagagactattactgattctcagaaaaaactacaagatattccagatcacttggagagatttcatacttcgacacaaacgttgggtaatatggcggacagcaccaaagatgcttctcttcgccttcaacaagtggtggaaggacttcaggatagtcaaagtaaatggcatagtgccatacagcaatcgattacttcttttgctcaatcgctttctacatttggcggaagtttatctagccaagagcaacaattatcgcgcatttcccagcagttaaataccatcgtgcgagatactcaaaatgtatgtcaacaattagcatcatcttatgaagaaataattggtaccaatagtgagagcgcacagcaattgcgtgaacagttagatggatatctatcggcatttattcaaaaaattaaaaatattcaagacgaaatgaatcaacgttgtgaggattcatacgcacaaatgagtgaacatttccaagatgcactggcaaaattagagcaaccattggagagttttggcaaagcggtctctgatgcatgttcagaacttaatgattcgattcatgagcttagtgtacctcgtcataaatcataa

SEQ ID NO: 10090 - DNA, 897 bp, Gallibacterium anatis
atgagaagactaagtatgcgaactaagctagatgtaaaagaagaaaatcattattggatatccatatctgacttgatgacttctttgttgtttatctttattttggcttttgcttataccgttaaaagtattcaagaagaggtacctaacatagaagaactggagcgattgcgacaagagaatatcacgctcaagatgagggtcgcagaactgacacaggaaaacttgatcctttctgagaaagtaactgcattaacaaaagaaaatcaaacactaaaagatgaattgaagctgttgagggaggaaaatcaatcactcaaagaacaattggttgatttgaaagcacaaagtcttgtggctggcgaaaacttcacgcaaagggctcagttgttgttattagttcaacaaaagctgaaagagaaaaacattgatgtggatattgatcctaaaaatggcaatatgcggattaattcagaagtactttttgagagtggttcagcgattcttaaagaaaatgggaaacaggtgattggtgaaatagccattcaaattaaagaaaaactcgctaataatgagaagtatcgccgggctattgatactatttttattgaaggacatacggatagtacgccgtttaatagaggatattgctttggcagaccttgctctaatatggagttgtcttctcaacgagcgattaatacgtatatttacatggatgaagctgccaatattgctttgatgaagaatgcattaggaaaacaattattttcgtatagtggttatgctgatactcgcccaattgaaggaaatgataattcgactcctgaaaatcgggcaaaaaatcgtcgcattgaactcttttttgctttgcataatcctcagaataaaggttaa

SEQ ID NO: 10091 - DNA, 1440 bp, Gallibacterium anatis
gtgagtatccatcatggtttcgaccgataccctactaagaaatttttaaatggattagaaaaatcgacaaagcaacttgttcaaattgctaatggaagtggaagtaatttagaagaagagtaccaaaaaatgcgtgtggctatgtggcagtttatacggcaagataataccacattatcattatcgactttgagagagaaaaagcttgctctattggtgttaagaaatgaaaaatataaagtaggtcaggagagtagagattgcctttcgctgttatggcaaagtaagaaatggatgacgttttttgatcttatccagctcaatatcagtataggagctgagtcactttgtaaacgcttgctgagactttattatcaacattatttgtttttttggaataataagtatgattcagatggacaggggagaagcgaggctgaaaaattaacttgttttttcaaagtactcagatactgtgcagacagagctcctggtaagcaaacatcagtccaggcagtaaagcaataccctcagctgattttagatgataataaacatttatcgttgcttgatagtgatgaaccgatggaagaccttcagaagcgctttggttgggaggatggcgataatattgtcgcttttgtgcagttacgtcgattattgcaagaagtgaagacatggtctgcgaatgaatataatgctcgaattcaaatgactttagaagaggtattgcgatataaaggtgctcatatcaatagtggacgtaccttattggaagaggtagtgcgagagatgcttgtaaaatgcaaatcgataaatcagataagggcaaggtgggaaaatttcattattttaaatgttggcgatccacgtaatagtcgtgctttgtctgcttggcggcgtatcggagaagaataccgaaaatggttatattctcacctatcacgtggagatttaagagagttcttggagaacttaaccagtgcagggggagatgagatttttaaatatcgacgaaaattttggttgcagtatatcgattatcttgtttacgccaagattatgctgggtgaaaatgattacttaaaattaaaaagagaaaaccctgaatttgcccgtcgatttgatgaatatccagagacgtatggccgtatgtatggccgtgataaatcgtgtatctatatgcagataaagaatttacatattatcgagggaacgtttagtgcaaaagttcgtttatatgaagaaaggccaattgatttgtcgcatagatattatgagtatactgatttttactcagcacagaccaagcgtaaggcaagattgattgacgagtatgttcataatgcttctgactcctatcattggcagcgtatcttaattaaagacatcaataggttgacaggtattcgtatgtcgctgcaggatgtgatgctttaa

SEQ ID NO: 10092 - DNA, 3102 bp, Gallibacterium anatis
atgttaaccattacactaaaagataattacgaaaaatttgtcgctaagcgattatttgatgatgggcttgttcagtcattcgatggtaaagatactatggtgatgacggatgaacaggtctatcatcttttagaagaggaagatagtgtactagatagatttagtcttcctgaggtgtttaatggttatcttggtatccaaatgcgaggattacctatacagccttcttgtcagtttctggttacttttgttgatgagcgtgggcgagccatgatgggggctaaacagtcggggtgcttgcttctacttggtaatagcaaacagtatcttttgccgcgtcatttttttgatttattgagcttacaacagcaattaatgcattcatacaatgaggcattgtgttggaaaattattgagattgcgaaaaatgatgtaagtaaaaaaatcatttttaaggggcttcctgaaaatgatgttgtgacggatgtacattatgtctctattgacctacagttacatgatgatggttctgccacacctaagccacgcattcaaaatctttctcaacaaactcaagcagttgcagatgttaaattattaaatccagattgtttattgcttgttattagccatgttcaggatggtcatcaaatacgttatattgcacagaaagatgtgattatggcgtatcgacgtatccaaaatattggcacgctatccaaagaaaatctcattaaatttcaagaaaaccctattgcttttgtgttagaggaagatgagtcagaaaatgattttccaattaattttgactcatttcgcattattggagcaggggaaccttatgttgggtattttggctccaaaaatctggattctcccattgccgctgctttattttctgatgataagcagattaaaaaacaagtctctgaaaaagtgaataaggtctgtcagtcagcttcaacagaggagttagagacatacattcagagaattcaggaagcacaacaaaatcatctcgctgaagttgattttggtggtgaaaagctctatccagtggagtatgcgtctgcattggatttgctagaaaaaatgaaaaaggaagagatgattggaggggctctttacgctgatgctgagaatgactcctcacttgtcttgcaaatacaacccaatgatgaagagacttttaagtttagagaaaaagaattagaaaaattagccgccattaataccgccaatgataatcccggtgatttatttgaccacttggcttttcctcctaagtcatatcaggttgctggagtgaattggctagttgatctttatcagcaaggatttaagggaggtattttggctgatgatatggggctaggaaagacgtatcaattaatcagctttatctattttctacttagacgtacagagttccaagcggaagggaaaaagagaatattaatcgtggctcccacaattcttttggataattggcaaaacgaatttgctaagtttttaccaccagaagtacatcagaaactagtcattcagacgttgaaagcagggcatctcagccgaatcaaaagagaagaacataaccaacagggaaaatacaacacgtttgatgttgataagtttttatcgaagaatcaggacattattatcacatcttatgaaaccttagccaattatcagtttgcttttgttgatgaacggtttaattttgggtgcattatttttgatgaggcacataagattaaaaatcctaatgccaaaatttctcaagcagcaagagcgattggtagtttgattaaattctgtgtactgctgacgggtacaccgattgaaaatgaactaagagatttatgggctttgtttgatgtatttgctcctgagcattttggtagttggaagtcctttagagaagaatttattaatgttgcggaagagggcttagataaaaagctaagagagcgttgctctaattatttgttgaggcgactgaaaaaagattatttagggcatgagttacctcaaaaaattgagaaaacctatgaggttgttttttcgggagaagaggttgcacaatatcatcagtatcgtcattctgggctagatgctatcaccaaattgcataaattaaaaagtttttctttgcaccgccaattagccaatggggaggttagcaatattcgtttggatgatttctcgaaatcgaaaaagttaattgaggtgttagagcaaattcgtcagaaacaagaaaaagtgattatttttgtgatgaggcgtgcggcacaggatttgcttcgctatggattaaatcagcattttggtcttgatattcagattattaatggcgataacaacaaaaatgcagaacatttattgcatcgctttagaacctcacaagggtttgatgttattatcttgtctactttagcagcaggagtaggtttgacgctgacagaggccaatcacgttattcattatgaacggtggtggaatgcttctaaagaggatcaagcaagtgatcgcgtatatagaattggtcaagcgaaagatgtttttattcatcatattttaggcactatgcctaatgatgagataagcattgataaggcaattcatcagttgatttcacaaaaacgtactacggcaggattcttaattccacccaaaagcgtgtctaccaatgaggtgggaacaatggttattccttcattaagtttggaagagaagttgggattgttagaatggactgaattcgagaaattggtggcaactctttatcgtcgtctgggatatactgtagaacttaccccttctgattctcgggattatggtgcagatgttattgcgtataaaggatcggaaaaacttgcaattcaatgtaagcattcgagtaatgcgcaggcaaaaaatcaggaggcagtttaccagctagtcactgaggcgaaggattactattctcctacgcatttaatcgctatttgcaataccaaatttactaagacgactcatacacttgcccagcaacatggtattcagttaatagaaaaagagggtttgattgatttgatagagaaaacggagctgagcatttga

SEQ ID NO: 10093 - DNA, 2034 bp, Gallibacterium anatis 7990; identical to SEQ ID NO: 10085

SEQ ID NO: 10094 - DNA, 897 bp, Gallibacterium anatis 7990; identical to SEQ ID NO: 10086

SEQ ID NO: 10095 - DNA, 1440 bp, Gallibacterium anatis 7990
gtgagtatccatcatggtttcgaccgataccctactaagaaatttttaaatggattagaaaaatcgacaaagcaacttgttcaaattgctaatggaagtggaagtaatttagaagaagagtaccaaaaaatgcgtgtggctatgtggcagtttatacggcaagagaataccacattatcattatcgactttgagagagaaaaagcttgctctattggtgttaagaaatgaaaaatataaagtaggtcaggagagtagagattgcctttcgctgttatggcaaagtaagaaatggatgacgttttttgatcttatccagctcaatatcagtataggagctgagtcactttgtaaacgcttgctgagactttattatcaacattatttgtttttttggaataataagtatgattcagatggacaggggagaagcgaggctgaaaaattaacttgttttttcaaagtactcagatactgtgcagacagagctcctggtaagcaaacatcagtccaggcagtaaagcaataccctcagctgattttagatgataataaacatttatcgttgcttgatagtgatgaaccgatggaagaccttcagaagcgctttggttgggaggatggcgataatattgtcgcttttgtgcagttacgtcgattattgcaagaagtgaagacatggtctgcgaatgaatataatgctcgaattcaaatgactttagaagaggtattacgatataaagatgctcatatcaatagtggacgtaccttattggaagaggtagtgcgagagatgcttgtaaaatgcaaatcgataaatcagataagggcaaggtgggaaaatttcattattttaaatgttggcgatccacgtaatagtcgtgctttgtctgcttggcggcgtatcggagaagaataccgaaaatggttatattctcacctatcacgtggagatttaagagagttcttggagaacttaaccagtgcagggggagatgagatttttaaatatcgacgaaaattttggttgcagtatatcgattatcttgtttacgccaagattatgctgggtgaaaatgattacttaaaattacaaagagaaaaccctgagtttgcacgtcgatttgatgaacatccagagacgtatggacgtatgaaagatagtgataaatcgtgtatctatatgcagataaggaatttacacattatcgagggaacgtttagtgcaaaagttcgtttttatgcagaaattccaattaatttgtcacatagagattataagtatgccgatttttactcagcacagaccaagcgtaaggcaagattgattgacgagtatgttcataatgcttctgactcctatcattggcagcatatcttaattaaagacatcaataggttgacaggtattagtatgtcgctgcaggatgtgatgctttaa

SEQ ID NO: 10096 - DNA, 3102 bp, Gallibacterium anatis 7990
atgttaaccattacactaaaagataattacgaaaaatttgtcgctaagcgattatttgatgatgggcttgttcagtcattcgatggtaaagatactatggtgatgacggatgaacaggtctatcatcttttagaagaggaagatagtgtactagatagatttagtcttcctgaggtgtttaatggttatcttggtatccaaatgcgaggattacctatacagccttcttgtcagtttctggttacttttgttgatgagcgtgggcgagccatgatgggggctaaacagtcggggtgcttgcttctacttggtaatagcaaacagtatcttttgccgcgtcatttttttgatttattgagcttacaacagcaattaatgcattcatacaatgaggcattgtgttggaaaattattgagattgcgaaaaatgatgtaagtaaaaaaatcatttttaaggggcttcctgaaaatgatgttgtgacggatgtacattatgtctctattgacctacagttacatggtgatggttctgccacacctaagccacgcattcaaaatctttctcaacaaactcaagcagttgcagatgttaaattattaaatccagattgtttattgcttgttattagccatgttcaggatggtcatcaaatacgttatattgcacagaaagatgtgattatggcgtatcgacgtatccaaaatattggcacgctatccaaagaaaatctcattaaatttcaagaaaaccctattgcttttgtgttagaggaagatgagtcagaaaatgattttccaattaattttgactcatttcgcattattggagcaggggaaccttatgttgggtattttggctccaaaaatctggattctcccattgccgctgctttattttctgatgataagcagattaaaaaacaagtctctgaaaaagtgaataaggtctgtcagtcagcttcaacagaggagttagagacatacattcagagaattcaggaagcacaacaaaatcatctcgctgaagttgattttggtggtgaaaagctctatccagtggagtatgcgtctgcattggatttgctagaaaaaatgaaaaaggaagagatgattggaggggctctttacgctgatgctgagaatgactcctcacttgtcttgcaaatacaacccaatgatgaagagacttttaagtttagagaaaaagaattagaaaaattagccgccattaataccgccaatgataatcccggtgatttatttgaccacttggcttttcctcctaagtcatatcaggttgctggagtgaattggctagttgatctttatcagcaaggatttaagggaggtattttggctgatgatatggggctaggaaagacgtatcaattaatcagctttatctattttctacttagacgtacagagttccaagcggaagggaaaaagagaatattaatcgtggctcccacaattcttttggataattggcaaaacgaatttgctaagtttttaccaccagaagtacatcagaaattagtcattcagacgttgaaagcagggcatctcagccgaatcaaaagagaagaacataaccaacagggaaaatacaacacgtttgatgttgataagtttttatcgaagaatcaggacattattatcacatcttatgaaaccttagccaattatcagtttgcttttgttgatgaacggtttaattttgggtgcattatttttgatgaggcacataagattaaaaatcctaatgccaaaatttctcaagcagcaagagcgattggtagtttgattaaattctgtgtactgctgacgggtacaccgattgaaaatgaactaagagatttatgggctttgtttgatgtatttgctcctgagcattttggtagttggaagtcctttagagaagaatttattaatgttgcggaagagggcttagataaaaagctaagagagtgttgctctaattatttgttgagacgactgaaaaaagattatttagggcatgagttacctcaaaaaattgagaaaacctatgaggttgttttttcgggagaagaggttgcacaatatcatcagtatcgtcattctgggctagatgctatcaccaaattgcataaattaaaaagtttttctttgcaccgccaattagccaatggggaggttagcaatattcgtttggatgatttctcgaaatcgaaaaagttaattgaggtgttagagcaaattcgtcagaaacaagaaaaagtgattatttttgtgatgaggcgtgcggcacaggatttgcttcgctatggattaaatcagcattttggtcttgatattcagattattaatggcgataacaacaaaaatgcagaacatttattgcatcgctttagaacctcacaagggtttgatgttattatcttgtctactttagcagcaggagtaggtttgacgctgacagaggccaatcacgttattcattatgaacggtggtggaatgcttctaaagaggatcaagcaagtgatcgcgtatatagaattggtcaagcgaaagatgtttttattcatcatattttaggcactatgcctaatgatgagataagcattgataaggcaattcatcagttgatttcacaaaaacgtactacggcaggattcttaattccacccaaaagcgtgtctaccaatgaggtgggaacaatggttattccttcattaagtttggaagagaagttgggattgttagaatggactgaattcgagaaattggtggcaactctttatcgtcgtctgggatatactgtagaacttaccccttctgattctcgggattatggtgcagatgttattgcgtataaaggatcggaaaaacttgcaattcaatgtaagcattcgagtaatgcgcaggcaaaaaatcaggaggcagtttaccagctagtcactgaggcgaaggattactattctcctacgcatttaatcgctatttgcaataccaaatttactaagacgactcatacacttgcccagcaacatggtattcagttaatagaaaaagagggtttgattgatttgatagagaaaacggagctgagcatttga

SEQ ID NO: 10097 - DNA, 1755 bp, Fibrobacter succinogenes subsp. succinogenes S85
atgaatttcattggaaaaattatgggtgatacatgcaccctcgttgttctgattttcttgtttatcatatttgtctactatatttggaaagttattaaaatatgcaagattaccatctctcaaatagggaatgttgccaatcgaccgaatttgctggaataccttgaaaagccctatttggtgacgaggtttatctctaaagagtataaaagaacgatttgttttaaggaccgagatgattcgcttaaaacatcggaatttgcatcggactatttcaatttgggagccattctgacagctgctaaaattaatgtcaatgcaatgggcgctgctgctggcatccttgtcggtattggtgttctgggaacattcattggccttacgattggtcttggtgatattgatttgactcagataaaagacaatcctgaccaattaatcaaaggtgttggaggcttgattgcgggtatgaaaaccgcttttgtcacttctgtggctggtatgcttctttctacgatttataccttggctgaaaaatatagcttgaatattttgactaaaaagtgtgtcactatatcggacaagcttgatgaagtgtactatatctcggaacttgaaaaacagactattattcaggaacgtcaaaagaaggatatgtcctatcttgtcaagggccttgtttctgaaatgaacaagtctatggattctcagataaagtttgttgcggctgaaatgaccaaaaactttaccgcgatcgatggcaatggcaatacggtaacttcgggcaatatgctgaatgctgtgatgaaatcctgcgccgaacagaaatccatgattgaaggtgtgcttgaagaattctatgaccgcttgagcgatgggttgagagaaagcgctcttgaacctttgatgcaaaaattggatgaactgaccaaggcaattcagagccctgcggcatcgatggcaagtagcattggtgatgacttgcgcaggagcatcatggaaatgattgatgaacttaagaattctgtgtcaaatgcaactaccgaaagacttgaaattcttgggcgtcaattggataacgcatccgatacgatgtcaactttgcctgaaatcctccaaaaactgacagagaatattcaaaataatgtggggcagatgagcgaacagatttctgccgctaatgcacaaacggctcaagtgggtgcaaatttggttgaaaagcagtctcagatgaatgacaagtctgtggctcttatgcaggaatttgaaaagcaggcaaatgcatcgacagcaactctgaaagaaactgcagccttgcttacaaaatttgaacgattgcataagactgtggaatctgcggctagcaaattggaatctgcttctggtcatgttgaaaattctgctacgtcattgcaacaatcgcaagataatttggtgcagacttataagaaatccatcgaagaaacggatcatactttcaagcaaattgaagaatcgctggaccactcgaaggaagtttctgcgcaatatgctcaggaattctcggaaattagcgagtcgctagaaggtatcttcaaggaactgagtgatggcctgaatcagtattctgaaactgttgcgaagcggactaaagaatttttggatgcctacacgcagaatgtgaccaaggtttctgaaagtctttcaaatacttatggggaattgagtgatactttggaaaaactcccgaatgtgctgaatggagcaagaaagtaa

SEQ ID NO: 10098 - DNA, 732 bp, Fibrobacter succinogenes subsp. succinogenes S85
atggctagacgtcataaaataactttagatgcaggcggtgaccaaaatccgtttgcgatgtctacaggtgacatgatgtctggtttgatgtttgtctttgttcttttgattatcgcccttgtttggcagattacaaaacaggacaatattaaaaaacaggccattaacaagtatcaggatacaagagacgaaatatacaaggaattgaaatctacgtttaaagattctttgaatgtgtggggtgcagaattggattctgcaactttgaccgttcgtttcaatgaaattgcgttggatggaactccggtcctgtttgcttcgggggataccttgctcccgcctcggtataaatcgatgatgaagtttttctttccaaagtatcttgaaattttggatggcgaaaaattccgtgagcatattgaggaaattcgtattgaaggacatacggattcaactccctgctacagcttgtgcaaaactcttgaacgcaattatctgtacaatatgaacttgtcgcaagctcgtagccgaaatgtgctaagatatggacttacagaaacggatgtttccaaagataccacacttttggaatttgcgagaaaatatattattgcaacggggctttcttttagtcagcctagagcgacacaagaaaaatcgagacgtgttgaaatcagagtcaggaccaaggctcaggaacagattgaagaaattattaaaactttaaagtga

SEQ ID NO: 10099 - DNA, 1368 bp, Fibrobacter succinogenes subsp. succinogenes S85
atgatcaatctccctgatttcgacaagaaagcttttgtaaaaagagcgaagaatgtttttcctgctaagttagaagttctcttgaatgagcaccttcaaaaaatggaggcgcttgttgcaaaacttgatgttgtcgaagaaactgagatttcagaaagtgcggttcttgcgataaggcgtaaaattgtagcgtattttcgtaataccccagaacaggatccattctctattcgggaacgccgtctgatgtgctattttgcgggggatattgtcggtggacccgtgacttatgaaaaaattgcaacgataattaatactggctggggtgatcgctatttggctcctttgatgagagtttgccttaacaaatggaatagtgtatcggatgaaattgctccaatgcatgatctttttctgaaaaagttgaaagcttataaaggtcctcaatcccgttacaacgagtggaaagaaaaactggattattttaaagcggggaacacgagagtattaaatggtgctgtaaatcttgggaaaaatttgagaatgggttatgaatctcctttggattttaagtcagttatcgactttcccaaggatatgatccattcagaatatttccagaaagtcattcgtactttctatacagcggatgtcgggaaagggattccgcagtctcttgataacgtgcttgaagaacatggcaactctgatacgagcatgattgttctttctgattttataaggggttgtgaagaacgctcggtaaaacgcgatcaattgaaattacagtctatggcattgcgtcggattggtcatccggccgataaaggcaaatggactctatttgataagagagattccgagttgcagaaaaaagttgaaaatgcacggcaaatcgtgaatttttggctgattcaagaatatatcaacgaaattttccaaacgttgatcgttgacccgcggcgtaaagaattttggttacagttgactaagactatttcggatgttaaagtcattggacccgcagatggcaagaggcgcttgtcgcgaattgaatcgttgaaggattccttggattactgctttaaggttactgcgtcgcagaccagtgcgtatgcgtttgtaatgaccattggttcgtacaagtttattgaattttcggaaaagggaaatgccttgtacatctaccgaaatgatgaaaatgtggaccaactcctgggtgctaatcgcatatattcggtaaatgatttgaaaaagccttatcttccgaatatggatacttcttacgcttacagttgcagaatggtccataaatcgagtaactgggaatatcctcttcttatgtggatgaaacgatatgttagatag

SEQ ID NO: 10100 - DNA, 3138 bp, Fibrobacter succinogenes subsp. succinogenes S85
atgttagatagtatcaaaattacggaaacaagttttgtctttgataataccaacgctccttttttgaagacgttgacggataatggttttgccacgctacttgcggatggcggtatagatgttccctttgaaaatgtctatgagctaaatgaatttgaacgcgaaattgtggggcttccgccactctatccgtttgaaattcttgtttcccatcagggaattccctttacgcccgcattcacctatgaggtctcttacaagtcttttgctccgtgtggcgatgaacttcctaaaaaagagcagaaaggacctgtcgtttcgttgatagtcaaaggtgaacagattgaatatctgctgactctagaacaatatcgccttgtaaaagcgttggctgaatttaatggattgcagtctaaaagtaaattggagtcttacaagagctttgccgaaatcaaggagctgtctaaagaatctgcttcggcgcttgacgaaactttaaataacagaaatgtcgttttgccaaagaatgttcggcttgacatttcttataacaatggtgaacttgaaattactccctccattgatgattcatcaaatgatgaatttgttaaaaagtttgatggcagttcggaagtccatgaccattatccgatggcaaaaggggtacagaagactattgttgtcttggatactccggttcaggaatcgctcaagaaagtcaagcaaaaacgcaaagtcaaaaatccagaagaaatcaaggccattgtagaacatccggaagaattctttgatcccgaagtgactgatttgtctgctttttatagcgaccgagtgataggaaagggcttgtatgaaccgaaagtctatccgtttattacgccttataaatcgcagtggattccttctttcgaagttgaagaccgtacgaatggtacaacgaaaatcgccataaagaatgcaacggaactcgctgaatttagcgaagctatagctacggcaaagcgagaaaataaaccatattgcgaatacaagggcgcgaatatttccatcggtgaagccgagaaaatggaaaagtttgctaaagaacagcttcgtaaaaaagaagctgttaccgcgacaggcccgaattctattgaagagaaaaagaaacagcacgaagtgcttctgattgaagaaaatctggaagtgactggttacgatgtcaccaaggaacagaattatttgccaaagcatcttacgttggaagaaaatccttatcttcaaaaagaattcaagctaaaagaccatcaggttgaaggtattgcgtggttgcagaatttggctaaaaatgcaaaaggcgggcttttggccgatgatatggggcttggaaaaacccttcaagtgctttacatgctcgattggcattctcgatttaataatgctgcgaataaaccgtatctcattgttgctccggtgtctttgcttgaaaactgggttcgtgaatacaagcgattctttaaagaaggaatgaatattgaaattgtagagcgcattcctaatgaaaataagggctttgttgcatttcatgcctataagcatatcatggttgtggggtatgaggctatgcgccgtggacagtttactcttgctgcgattgattttgcggtaattgtgttggacgaagcgcaaaaagtgaaggcccctggtgctatggtgacgaatgcagcgaaagcattgaaaagcgatttgcgcatttcaatgacgggtactcctgttgaaaatacctacatggatttgtggtgcattatggattttgcagtaccgggattgcttggaaacgctaaggaatttgcccgaaagtaccaagacccgctcaaagatgctgaaaccgatatcgccatgttgggaaacaagttgaggcatgaattgggtggctacttccttcgccgcattaagtctgaagtgagtaaggacttgcccgaaaaacatgtggagtatcacaaagttcccatgccttctgaacaatacagccgctatgttgccgcaattaacttgggaataaagactcacgcccatccgtttgaacgcattcagagcttgagaaaaatcagtgaccatccgtatttggattttaaggatgtagaccacctttctgtagatgacttgattcgtagttctgcaaagttgtctgcaacgatgcggattcttgaagatattcgggcgaaaaacgaaaaggtgattatcttcacggaccgtcgcgatatgcaacggatgttccagcgtattttgctccaaaagtttggaatcgaggcgagtgtcatcaacggcgatacatcgacatctgacaggggcaataaagtctcgcgccaaaaaacggttgatattttccaggaaaaaagcggcttcaacgttatcattatgtcgcaacttgctgctggtgtcggcttgaatgtggtgggtgcaaaccatgtgattcattattcccgtcattggaatcctgcgaaggaaatgcaagcgacagatcgtgtttatcgtattgggcagaccaaggacgtctatgttcatttcccaatggctgtgtgtgataactttgattcgtttgatgttgtgctggatgctcttctacaaaataaaacgcaccttgcgtctgcatcattgtatcctaccgatcgtattgaagtggttcagaaggaacttgatggaaaactttttggtacgaccatggcggacgaccaatcctatgttgctctcgaggatattgatgatatgaatgaatatctgttcgaagcgtttgtggctgttttctatgctgcattagggtataagactgttgttactccgcgcagtggtgataagggcgtcgatgtgcttgcttttggttccaaagacaatttggctattcagtgcaaacattctcgtaacaaagtcggtgttgaagctttgggcgaagtggctgttggcgcaaatgtctacaaggaaaaatattcgggaaaggtttttaagcctgttgtttttaccaatagtgaatttggagtagatgctaaagaaagggctaaatcaagcgacataactcttgttgacggctcttcgctaagtaaatctttcaaatcgaatacatatcaatggaacgatgtatacatggccgattccaatagataa

SEQ ID NO: 10101 - DNA, 1755 bp, Fibrobacter succinogenes subsp. succinogenes S85; identical to SEQ ID NO: 10097

SEQ ID NO: 10102 - DNA, 732 bp, Fibrobacter succinogenes subsp. succinogenes S85; identical to SEQ ID NO: 10098

SEQ ID NO: 10103 - DNA, 1368 bp, Fibrobacter succinogenes subsp. succinogenes S85; identical to SEQ ID NO: 10099

SEQ ID NO: 10104 - DNA, 3138 bp, Fibrobacter succinogenes subsp. succinogenes S85; identical to SEQ ID NO: 10100

SEQ ID NO: 10105 - DNA, 1608 bp, Fusobacterium nucleatum subsp. animalis 7_1
ttggaatatttatttactttaccttattcaataaaaaaattaaaaaatcaagaaagaacgattaaagaattggatgatataaatatattttttgaagctgagaatttagcagataaaaatataactgaaaaagaaattttgaaaataaaaaatgaatttttttacaaggaagatgacatagaaaaatacccattactttcaaaagtttggaaagagtatagctcaacaatgttaaaaactgataaaaacaactattatcaaataattgatgctgaagatctatttaatgaaaattctctagtgaaagagaaaatgaatatgaaaatcttaaattatattcctcaactttttgtaggacttggtatttttggaacttttttaggtttatcgctaggtctatctcaaataaatttaaaagatactggagatttaggacaaattagtaacttaatagaaggagtacaaacatcattttatacaagtttatatgggatgtttttttctatttctataactttacttttcaacaactatatgagccaaattgaaaaaagaatatttatcttaagaaataaattaaacaatttatttttcctaaataatggtggagaacttatacaagatatgagaactgagttgaaagaaataagagcatataacagtgatatggctagtcaaataacaaatggaattaataaagaattagttcaaatgacctctgtccttgataataaaatatctggttttacaaatggaataacggggacattccaacaaacaatgagtgaaaatcttgaaaagatattttcagaagattttattaaggactttgcaaatataaaagatgagtttcttgaagcttcaagagaaaataataagtttatagctgaatataaagatgaaatgaaagaaatagttacaacaacgaaatcccttaaagatgaatttttagtttttgctgatgaaataaaccaaaaatataacgatacaaataaaaatctaaaagaaaattttgaaaagatttcaatagtattaaacgatataaaagaaatacacagtagtataaatgaatttacagaaaatgtccaatttatagcaactgaaaataaacaaataatatcagattttaaagatgtaagtctaaacttaaaagaatttgcaaaaggtcaggatacaatattagagctatgggaaggatataaagatagctttgctagttttgaagatagtatcaatagtaactttgaaaattatcaaagtatactagaagatgtatctgataaatacggaaatacaatagataaattaacaactgaatatgttaaaactatgaatatgggaatggaagatgtattcagaggctacgataatcacttaacagaaattatagaaaaattccaaggtgttttaagaagttttaaagaaaatcttgaactttcagatgaaaatttaaaagttaatgtagatttattacaagaaaatttagagaatcaatctatattaggtgaattaaataaggatatctctgaaaaaaatagaatattactagaaaaaattcaaaaaactcaacaacacctagaatttttagaaaaaaaaggtgatcaatag

SEQ ID NO: 10106 - DNA, 624 bp, Fusobacterium nucleatum subsp. animalis 7_1
atggcaagtatcctaatgatattcatgttgttattcattgttaaaactatagaaacagggcaagaattaagaaaaaaagaagaaattattgaaggttttactggattaaagaaaaatatcatatcaaaaattcaaaaagattttgaagaaagagggataaaagttgatctagatcctcaaacaggaacaataaagatagatgataaaatcctttttaatactggtgaatatctattaaaacctgaaggaaaaaaatatttgaatgaatttgttccaatttatataaatttattattaaatgatgagcaagtaaaaaaagaactatctcaaataataatagaagggcatactgatgatgtaggaagctacatttataatatggaattatctcaaaaaagagcttttgaagttataaaatacatttatgatgaaatgcctaattttaaaggaaaagaagaattaaaaagatatataactgctaatggaagaagcaatattaaggttttaagagataactctggaaatattgatagggataagagtagaagagttgagtttcaatttaaattaaaagaagatgaaactttaatgaaaattgaaaaaactttaaaagaaggaaattaa

SEQ ID NO: 10107 - DNA, 1209 bp, Fusobacterium nucleatum subsp. animalis 7_1
atgaatgaaataaattttaaaaagttttatccagtaaatttagaaaaaaagaaagatgagataaataatttttggaatcaaatttttaaagtagtaagagatgaaaaaatatttgaattgatagaaagagttttaaaaaagaaaaacttaaaagtggatgaaataataatattactttttaacataaaaaaagttcatgattatttaattcataagaatgttgaacttgctgattttatcatgaatataaaatttgatttatctgaaaagaaggtaaaaagaaaagaatgtataatggatatttaccaagctattgtatcatactttaatgaaaatgatgtagagttagctttgaatctttttgttgatgaaaatattaattttgaaaaagaggatgaaagagaaattatccaagtatatcaagaatatagtaaatcaaaaaaagattatactttatttctatatgatgaaacagtcaaagctataaaaaataataagttaaaagatacccttgatagactttttataagtgaagaaagagaagtattcttagatataatgaataaagttttgtttgatatagtctattttgtgaaacttgaaaaagattacattaataaaatattagcagatttttttgatagagtaacacataaagtaagaattgaaagtttcaaaaaagttcttaactactatgttgaagaatatgaaaaaactgatgatattagtgtttgttctagagcaattatggaaaaaatccacgaatatttaaaagaccctcataaaaatagtccaaaatggcaatggggtgattttagtgaagcacaaatagaaattatgagaatctggcttgtaagtgcagatcttgaaaaatatttttcaattgaagtaaatgataaagtaaggttacaattctggagaagatatattaaatacatcaaagaagttagatattttgaaagactaaaacaagctattgtgatgttgacagatgagcacatatttatagagtttggagaaaaaggaaatgctgcttattgttataaaaaagactatataagttttagtgaaataaataatttatctacaaattttagattaaaaaatagagcaagtgctgaattttttatgtctcattcgggaaattgggaagttaaattaaagagtacactatacagattaggttatagtgtaaaagtatggagataa

SEQ ID NO: 10108 - DNA, 3492 bp, Fusobacterium nucleatum subsp. animalis 7_1
atgggaataatagagaggctttttaaaaaaacaaaagaaactgataaaaaactcaaactttcattagaatatgaagaaaaatatattaaaataatattaaaagttggagataaaataatatcattaaaagacttaaaagacgaagtagatatttcaagtctttcaaaatctgatatatttgaagtagatgaaaatggtgatatcttattattggactatgatgaaatatatagtttagatagaagtacattaaaacttttgaaattgcctaacttctttcctggtgtagtctatatagataacaaaggatattttggtagttctaaggtagaatttcattataaaataagttttggtttagatgaatatcatatagtaaatgctaactatgtagaaagtataagtagttcagaaagatacattctaacaaaagagcagtatgatttaataaaactaataaatcaatataataatgatgatagtaaaaataaagaagctaatgaacaatatagaatgttaaatgctataaaagatgtctctcacaaaacaaaccttttacttaatgagactataaaaaaagaagatgacctagttttattagaaaatatagagttagactttttagaaagtgacgaagattatttagaagttgttccccaatcttcacaactttcaaaggaacaaaatgaaagtttaaaaaaagcttttaaaaatgcaaatttatctcaaaatttttatttactaaatatagataataaaaaagtaaaagttgtagtaaatagagagctaaaagatgctttaaaagttgtaaaaaataatgaaaaaataagtaaaaaagattttgtaaaaagggaatctccaatctttgatgatattgattctgaaaaagttgaatttaactatggaccaagagttattggcttaggatacttaaattatagaccttcaccaacaccaaatatttctgaaatagattggttctcaaaagaatttcctaaaattatgacagatacacctatcacattaaaacctgagcatctaggatatatgcaaggtaaatttaatgatttagatgagtttgaagaaactgagctgaaatttgatgttgaaggtgaagagaaaaaattttttatatcaaaagaaaatttagctaatgaaataaaaaaattagaaacttctataaaagatataacagactataataaatcaaaagcattggatgaaataattgaattggcagaagcttataattataaaccagattacattgaatataaaggaaattatataaaaaaatttgataaagaagtagctgagcaatatagagatgatttaagagcaattgaaattgaaaaaagagaagagaaaaaaaattcaaaaaaagaaaaagagaaagttttacttacagaagataatttaaatgaagaaggttatgcagaaggaactgagcaaataactcaagaagaagaagttgaacttcctaaatctcttagatactctgaaggtatagacttaaaagaacatcaaaaagaaggtcttttaagaatgcagtctttgtataaaaaatcaaatgtaaatggtttattactttgtgatgatatgggtttaggtaaaactatacaaatcctctcttttttagcttggttaaaagaaaaagatgccttaaaaccttcattattaattatgcctacttctttaataacaaattggtatgacgagaaaaatattggtgaaattcaaaagttctttttagatggtacatttaaagtaaaaatattagatggtaaaaaaacaagagatgaaatttttgagttaagaaattatgacttggtactaacatcttatgaatctttaagaattaaccataaagaaacaggatatattgagtggaaagttgttgtttgtgatgaagctcaaaaaatgaaaaaccctaaaacacttttaacaagagcaattgaatcacaaaatgcactttttaaaatagcttgtagtgcaacaccaatagaaaacagtgtattggacttgtggtgcctaacagactttgttaaaccaggtctattaggaagtcaaaaagatttttctcaaaaatatatgaaacctttatcttcaaataatataaatgatgaaaagaggcaagaaattaataatgaattaagtgataaacttggtgatttctatataagaagagagaaagaaaaagttctaacatcagacttccctaaaaaaatagttatatacgataaaataagaccttcaagtcaacaagaagatataatagaaaatttaaaaaatactggaaaagctgcactagcgataatccaaggaatgataatgacttgtagccatccacaactcgtagatagagatgtagatgaagttccccttggaagtgaagaaagtctaatagaagaagcatacaaactagaacatatttatactatattgacagaagtaaaaaagaaaaatgaaaaagccattatttttacaaaatataagaaaatgcaaaaaatcttatggaatgttataaaatattggtttgatatagaagttggtatagtaaatggagatgcagataaaacttcaagaagaagaatattagacgattttagaaaaaaagaaggttttaatgttataatcttatctccagaagcagcaggagtcggacttaatattgttgaagcaaatcatgttattcattatactaggcattggaatcctgcaaaagaagagcaagctacagatagagcatatagaataggacaaaaaaaagatgtatatgtttattatcctattatctctaatgttgaaaatatagaaagagaagaatatcatactgttgatgagtggataagaaaacaattggaaatagatatgactgacagttcgccagaagaaaaattaaatagaataatcataaaaaagaaaagaatgttaaaagatttctttttaacttgtggtggagaatttgatgatgatatagcaaaagaatttgcagctatgtcaaatggaatagaaaaagatttaagtattgaaatgattgacaatattccttatcaagagtttgaaaaattagcagttgtattattggaaaaagaatacaatagcaaatatggaatagtaactgttgaaagtggagataaaggaatagatggtcttattttctcagaaaatggaaatattttaattcaagcaaaacacacaaaaagattagattctaacgctgctggagacttatttagaggtgaaaaattttactctgatgagttaaataaggactttcctaaactaatagtttttacttcagcttctaaaaataatataagtgaagatattaaaaaattagagaaaatgggaaaagtagaaatatattatagagaaaaagttacagaattattaaataaatatcctactaaaattacagaattaatagatagagatataaggtattctattgaggatataaaaagttatgtaaaaactatgaatatttaa

SEQ ID NO: 10109 - DNA, 1608 bp, Fusobacterium nucleatum subsp. polymorphum F0401; identical to SEQ ID NO: 10105

SEQ ID NO: 10110 - DNA, 624 bp, Fusobacterium nucleatum subsp. polymorphum F0401; identical to SEQ ID NO: 10106

SEQ ID NO: 10111 - DNA, 1209 bp, Fusobacterium nucleatum subsp. polymorphum F0401; identical to SEQ ID NO: 10107

SEQ ID NO: 10112 - DNA, 3492 bp, Fusobacterium nucleatum subsp. polymorphum F0401; identical to SEQ ID NO: 10108

SEQ ID NO: 10113 - DNA, 1752 bp, Fusobacterium nucleatum CTI-1
atgaaaaatgagaagaaatttatttgttttttatttgctataacatgcatattaagcttaggaggacaattctatttaatgaattttaaaatattggaaatgttcaacttttttaatataaatgttgtatttttttggttaatttttggaatatttatttactttaccttattcaataaaaaaattaaaaatcaagaaagaacgattaaagaattggatgatataaatatattttttgaagctgagaatttagcagataaaaatataactgaaaaagaaattttgaaaataaaaaatgaatttttttacaaggaagatgacatagaaaaatacccattactttcaaaagtttggaaagagtatagctcaacaatgttaaaaactgataaaaacaactattatcaaataattgatgctgaagatctatttaatgaaaattctctagtgaaagagaaaatgaatatgaaaatcttaaattatattcctcaactttttgtaggacttggtatttttggaacttttttaggtttatcgctaggtctatctcaaataaatttaaaagatactggagatttaggacaaattagtaacttaatagaaggagtacaaacatcattttatacaagtttatatgggatgtttttttctatttctataactttacttttcaacaactatatgagccaaattgaaaaaagaatatttatcttaagaaataaattaaacaatttatttttcctaaataatggtggagaacttatacaagatatgagaactgagttgaaagaaataagagcatataacagtgatatggctagtcaaataacaaatggaattaataaagaattagttcaaatgacctctgtccttgataataaaatatctggttttacaaatggaataacggggacattccaacaaacaatgagtgaaaatcttgaaaagatattttcagaagattttattaaggactttgcaaatataaaagatgagtttcttgaagcttcaagagaaaataataagtttatagctgaatataaagatgaaatgaaagaaatagttacaacaacgaaatcccttaaagatgaatttttagtttttgctgatgaaataaaccaaaaatataacgatacaaataaaaatctaaaagaaaattttgaaaagatttcaatagtattaaacgatataaaagaaatacacagtagtataaatgaatttacagaaaatgtccaatttatagcaactgaaaataaacaaataatatcagattttaaagatgtaagtctaaacttaaaagaatttgcaaaaggtcaggatacaatattagagctatgggaaggatataaagatagctttgctagttttgaagatagtatcaatagtaactttgaaaattatcaaagtatactagaagatgtatctgataaatacggaaatacaatagataaattaacaactgaatatgttaaaactatgaatatgggaatggaagatgtattcagaggctacgataatcacttaacagaaattatagaaaaattccaaggtgttttaagaagttttaaagaaaatcttgaactttcagatgaaaatttaaaagttaatgtagatttattacaagaaaatttagagaatcaatctatattaggtgaattaaataaggatatctctgaaaaaaatagaatattactagaaaaaattcaaaaaactcaacaacacctagaatttttagaaaaaaaaggtgatcaatag

SEQ ID NO: 10114 - DNA, 624 bp, Fusobacterium nucleatum CTI-1; identical to SEQ ID NO: 10106

SEQ ID NO: 10115 - DNA, 1209 bp, Fusobacterium nucleatum CTI-1; identical to SEQ ID NO: 10107

SEQ ID NO: 10116 - DNA, 3492 bp, Fusobacterium nucleatum CTI-1; identical to SEQ ID NO: 10108

SEQ ID NO: 10117 - DNA, 1752 bp, Fusobacterium periodonticum 2_1_31
atgaaagacgagaaaaagtttatctattttttatttattgcaacatgtatattaggattagtaggacaattatttttaatgaattttaaaatattacaattgttcaacttttttaatataaatgttgtatttttttggctaatttttggaatatttatttatttcaccttatttaataaaaaaattaaaaatcaagaaagaactattaaggaactagatgatattaatacattttttgaaactgaaaaattattagataaaaatataactgaaaaagaaattttgaaaataaaaaatgaattttttagtaaggaagaagatatagaaaaatatccattactttcaaaagtttggaaagaatatagctcaagctttttaaaaactgatgaaaatagctactaccaaataattgatgctgaagatctatttaatgaaaattctctagtaaaagagaaaatgaatatgaaaatcttaaattatattccacaactttttgtaggacttgggatttttggaacttttttaggtttatcattaggtctatctcagataaatttaagagatactggagatttaggacaaattagtaatctaatagagggagttcaaacatctttttacacaagtttatatgggatgtttttttctatttctataacattacttttcaataactatatgagccaaattgaaaaaagaatatttattttaaagaataaattgaataacttatttttcctaaataatggtggaaaaattatacaagatatgaaaaatgaattaaaagaaattagagcctataacagtgatatggctagtcaaataacaaatggaataaacaaagaattgatacaaatgacttctgttcttgacaataaaataggtggtatctcaagtggtataacaggaacgttccaacaaacaatgagtgaaaaccttgaaaagattttttcagaagattttattaaaaattttgagaatataaaagatgaattacttgaaacatcaagagaaaataataagtttatagctgaatataaagatgaaatgaaagaaatagttacaacaacaaaatctctaaaagatgaatttttaattttttctgatgaaataaatcaaagatatagtgatacaaatgagaatttaaaagaaaattttgaaaaaatttcaatagtattaaacgatataaaagaaatacacagtagtataaatgaattcacaggagatgttcaatttatagcaactgaaaataaaaaaataatatcagattttaaagatgtaagtcttaacttaaaagaatttgcaaaaggtcaggatacaatattagagctatgggaaggatataaagatagctttgctggttttgaagatagtatcaatactaactttgaaaattatcaaagtatattagaagatgtatcggataaatatggaaatacaatagataaattgacaactgaatatgttaagactatgaatatgggaatggaagatgtgttcagaggctacgacaatcacttaacagaaattatagaaaaattccaaggagttttaagaagttttaaagaaaaccttgaactttcagatgaaaacttgaaagttaatatagatttattacaagaaaatttagaaaaccaatctatattaggtgaactaaataaggatatctctgaaaaaaatagaatattattagaaaaaatccaaaagactcaacaacacctagaatttttagaaaaaaaaggtgatcaatag

SEQ ID NO: 10118 - DNA, 699 bp, Fusobacterium periodonticum 2_1_31
gtgttttttataaataaaaagaaaaaggaaatacaaatagaagaaaccaattattggttatctataggagacttaatggcaagtatcctaatgattttcatgttgttattcattgttaaaactatagaaacaggacgtgaattaagaaaaaaagaagaaataatagaaggctttactggtttgaagaaaaatatcatatcaaaaattcaaaaagattttgaagaaagaggaataaaggtcgatatagatcctcaaacaggaacaattaaaatagacgataaaatactatttaatactggtgagtatcttttaaaacctgaaggaaaaaaatatttaaatgattttgttccaatctacataaatttattattaaatgatgaagaagtaaaaaaagaactatctcaaataataatagaagggcatactgatgatgtaggaagctatatttataacatggagttatctcaaaaaagagcttttgaggttataaaatatatctatgatgaaatgcctaattttaaaggaaaagaagaattaaaaagttatataactgctaatggtagaagtaatatcaaagttttaagagataactctggaaatattgacagagataaaagtagaagagttgaattccaatttaaactaaaagaagatgaaactttgatgaaaattgaaaaaactttaaaagaaggaaattaa

SEQ ID NO: 10119 - DNA, 1206 bp, Fusobacterium periodonticum 2_1_31
atgaatgaaataaattttaaaaaattttatccaataaatttagaaaaaaagaaagatgaaataaatgatttttggaatcaaatttttaaagaagtaagagatgaaaaaatatttgaactaatagaaaaagtcttaagaaataaaagtttaaaagttgatgaagtaataatattactttacaatataaaaaaagttgatgagtatttaattcgtaagaatactgaactttctgattttattatcagtataaaatttgatttatctgaaaaaaaagaaaaaagaaaagaatgcctaatggatatctatcaagcaatagtttcatattataataaaaacgaagtagaaacagctttaaatttcttggttgaagataatattgatcttaaaaaagaagaaagtgagatagctcaagtataccaagaatacagtagtagtaaaaaggattatattttattcctatatgatgaaacaataaaagctataaaaaataataaattaaaagaaactttagaaaaattttatgtaagcgaagaaagagaggtattctcatatataatggaaaaagttttacttgacatagtatattatgtaaaacttgaaaaaccttatattgaacaaatcttagctgatttttttgacagagtaaaacacgaagtaagaatagaaagttttaaaagaattcttagctattatgttgaagaatatgaagaagatgaagacataagtatttgttctcgggtaattatggaaaaaattcatgaatatttaaaagatcctcataaaaatagtccaaaatggcaatggggtgattttagtgaagctcaaatagaaattatgagaatctggcttgtaagtgctgatcttgaaaaatatttttcaattgaagtaaatgataaaataaggttacaattctggagaagatatattaaatacatcaaagaagttagatattttgaaagactaaaacaagctattgtgatgttgacagatgagcacatatttatagaatttggagaaaaaggaaatgctgcttattgctataaaaaagactatataagttttagtgaaataaataatttatctacaaattttagattaaaaaatagagcaagtgctgaattttttatgtctcattcaggaaattgggaagttaaattaaagagtacactatacagattaggttatagtgtaaaagtatggagataa

SEQ ID NO: 10120 - DNA, 3489 bp, Fusobacterium periodonticum 2_1_31
atgggaattatagagagactttttaaaaaaacaaaagaaactgataaaaaactcaaactttcattagaatacgaagaaaaatatatcaaaataatattaaaaattggagataaaacaatatcgttaaaagacttaaaagatgaaatagatatttcaagtctttcaaaatctgatatatttgaagtagatgaaaatggtaataccttactactggactatgatgaaatatatagtttagatagaagtaccttaaaacttttaaaattgcctagcttcttccctggtatagtctatatcgataacaaaggatattttggtagttccaaggtagaatttagttataaaataagttttggtttagatgaataccatatagtaaatgctaactatgtagaaagtataagtagttcagaaagatacatcctaacaaaagagcagtatgatttaataaaattaataaatcaatataataatgatgatagtaaaaataaagaagctaatgaacaatataaaatgttaaatgctataaaagatgtttctcataaaacaaatcttttgcttaatgaaactattaaaaaagaggatgacttagttttattagaaaatatagaattagattttttagaaagtgacgaagattacttagaagttgttcctcaatcttcacaactttcagagaaacaaaataagagcttaagagaagcattcaaaaaagcaaatttatcgcaaaacttttatttactaaatatagataataaaaaagtaaaagttgtagtaaatagagaattgaaagatgctttaaaagttgtaaaaagtaatgaaaaaataagtaaaaaagattttgtaaaaagggaatctccaatctttgaggatattgattctgaaattgttgaatttaattatgggccaagagttataggtttaggatacttaaattatagaccatctcctgctcaaaatatgtcagagatggattggttcacaaaagaatttcctaaaattatgacagatacacctattaccttaaaacctgaacatttaaactatatgcaagataagtttaataatttagatgagtttgaagaaactgaattaaaatttaatcttgaaggtgaagaaaaaaaattatttatatcgaaggaaaatttagctaacgaaataaagaaattagaaaattctataaaggatataacagactataacaaatcaaaagcattggatgaaataatcgaattggcagaagctgataactatagtcaagattatattgcatataaaggaaattatataaaaaaattcgataaaaatgtcgctgagcaatatagagatgatttaagagcaattgaaattgaaaaaagagaagagaaaaaaaatactacaaaagagcaagaaaaagttttaatcccaaaagataatattgaaaaactagattatattgaagatatggaaaaaataactgaagaagaagttgaacttcctagttctctcagatattcagatggtatagaattaaaagagcatcaaaaagaaggtcttttaagaatgcagtctctatataaaaagtcaaatgttaatggtttactgctttgtgatgatatgggactgggaaaaactatacaaatactctcttttttggcttggttaaaagaaaaagaagctttaagaccttcgttactaataatgcctacttctttgataacaaattggtatgatgagaagaatataggtgaaattcaaaaattctttttagataacacatttaaagtaaaaatactagatggaaaaaaatcaagagatgaaatttctgagttgagaaactatgatttagtgctgacatcttatgaatccctaagaataaaccacaaagaaacaggttatattgagtggaaagttgtagtttgtgatgaagcacaaaagatgaaaaatcctaaaacacttttaaccacagcagttaaaacacaaaatgcactttttaaaatagcttgtagtgcaacacctatagaaaatactgttgtagacttatggtgtttaacagactttgttaagcctggtctattagaaactcaaaaagattttgaaaaaaaatatatgaaacctttatctgcaaatgatataaatgatgaaaaaagacaagaaattaacaataaattaagtgatctcttgggagaattttacttgagaagggaaaaagaaaaagttctaacatcagattttccaaaaaaaatagttatatatgataaaataaaaccttcaagtcaacaagaagatataatagaaaagttaaaaaacacgggaaaagctgcattagctataattcaaggaatgataatgacttgtagccatccacaactcgtagatagagatgtagatgaagttcctcttggaagcgaagaaagtttaatagaagaagcgtacaaactagaacatatttatactatattgacagaggttaaaaagaaaaatgaaaaagctattatttttacaaaatataagaaaatgcaaaaaatcttatggaatgttataaaatattggtttgatatagaagttggtatagtaaatggagatgcagataaaacttcaagaagaagaatattagacgattttagaaaaaaagaaggttttaatgttataatcttatctccagaagcagcaggagttggacttaacattgttgaagcaaatcatgttattcattatactaggcattggaatcctgcaaaagaagaacaagctacagatagagcatatagaataggacaaaaaaaagatgtatatgtttattatcctattatctctaatgttgaaagaatagaaagagatgaatatcggactgttgatgagtggataagaaaacaattggaaatagatatgactgatagttctcctgaagaaaaactaaatagaatcattgtaaaaaagaaaagaatgcttaaagatttcttcttgacttgtggtggagaatttgatgatgatatgaccaaagaattcgcagctatgtcaaatgaagttgaaaaagatttaagtattgaagttattgataatattgaccatatggaatttgaaaaattggcagtagtattattagaaaaagaagttaatagtaaatatggtttagtaactgttaaaagtggagataaaggaatagatggagttattttttcagaaagaggaaatattcttatccaaacaaagcacacaaaaaggttagattctaatgctgctggagacttatttagaggtgaaaaattttactctgatgagttaaataaggactttcctaaactaatagtttttacttcagcttctaaaaataatataagtgaggatattaaacaattagagaaaatgggaaaagtagaaatatattatagagaaaaagttacagagttattaaataaatatcctactaaaataacagaattggtggatagagataaaagatattctattgaagacataaagaattatataatagagagacatatataa

SEQ ID NO: 10121 - DNA, 1752 bp, Fusobacterium periodonticum ATCC 33693
atgaaagacgagaaaaagtttatctattttttatttattgcaacatgtatattaggattagtaggacaattatttttaatgaattttaaaatattacaattgttcaacttttttaatataaatgttgtatttttttggctaatttttggaatatttatttatttcaccttatttaataaaaaaattaaaaatcaagaaagaactattaaggaactagacgatattaatacattttttgaaactgaaaaattattagataaaaatataactgaaaaagaaattttgaaaataaaaaatgaattttttagtaaggaagaagatatagaaaaatatccattgctttcaaaagtttggaaagaatatagctcaagctttttaaaaactgatgaaaatagctactaccaaataattgatgctgaagatctatttaatgaaaattctctagtgaaagagaaaatgaatatgaaaatcttaaattatattcctcagctttttgtagggcttggtatttttggaacttttttaggtttgtcactgggtttatctcaaataaatttaaaagatactggagatttagggcaaattagtaatttaatagaaggagtacaaacatcattttatacaagtttatatgggatgtttttttctatttctataactttacttttcaataactatatgagccaaattgaaaaaagaatatttatcttaagaaataaattaaataacttatttttcctaaataatggtggagaaattatacaagatatgaggactgaattgaaagaaataagagcatataacagtgatatggctagtcaaataacaaatggaattaataaagaattagttcaaatgacttctgttcttgataataaaatatctggttttacaaatggaataacagggacattccaacaaacaatgagtgaaaatcttgaaaagatattttcagaagattttattaaggactttgcaaatataaaagatgagtttcttgaagcttcaagagaaaataataagtttatagctgactataaaaatgaaatgaaagaaatagttacaacaacaaaatctcttaaagatgaatttttagtttttgctgatgaaataaaccaaaaatataacaatacaaatgaaaacttaaaagaaaattttgaaaaaatttcaatagtattaaatgatataaaagaaatacacagtagtataaatgaatttacagagaatgtccaatttatagcaactgaaaataaacaaataatatcagattttaaagatgtaagtctaaacttaaaagaattttcaaaaggtcaggatacaatattagagctatgggaaggatataaagatagctttgctggttttgaagatagtatcaatagtaactttgaaaattatcaaagtatactagaagatgtatctgataaatatggaaatacaatagataaattaacaactgaatatgttaaaactatgaatatgggaatggaagatgtattcagaggctatgataatcacttaacagaaattatagaaaaattccaaggggttttaagaaattttaaagaaaatcttgaactttcagatgaaaatttgaaagttaatgtagagttattacaggaaaatttagagaatcaatctatattaggcgaattaaataaggacatctctgaaaaaaatagaatattactagaaaaaattcaaaaaactcaacaacaccttgaatttttagaaaaaaaaggtgatcaatag

SEQ ID NO: 10122 - DNA, 699 bp, Fusobacterium periodonticum ATCC 33693
gtgttttttataaataaaaagaaaaaggagatacaaatagaagaaacaaattattggttatccattggagacttaatggcaagtatcctaatgatattcatgttgttattcattgttaaaactatagaaacaggtcaagaattaagaaaaaaagaagaaattattgaaggttttactggattaaagaaaaatattatatcaaaaattcaaaaagattttgaagaaagagggataaaagttgatctagatcctcaaacaggaacaataaagatagatgataaaatcctttttaatactggtgaatatctattaaaacctgaaggaaaaaaatatttgaatgaatttgttccaatttatataaatttattattaaatgatgagcaagtaaaaaaagaactatctcaaataataatagaagggcatactgatgatgtaggaagctatatttataacatggaattatctcaaaaaagagcctttgaagttataaaatacatctatgatgaaatgccaaattttaagggaaaagaagaattaaaaagctatataactgctaatggaagaagcaatatcaaagttttaagagatgagtctggaaatattgatagggacaaaagtagaagagttgagtttcagtttaaattaaaagaagacgaaactttaatgaaaattgaaaaaactttaaaagaaggaaattaa

SEQ ID NO: 10123 - DNA, 1209 bp, Fusobacterium periodonticum ATCC 33693
atgaatgaaataaattttaaaaaattttatccagtaaatttagaaaaaaagaaagatgagataaataatttttggaatcaaatttttaaagtagtaagagatgaaaaaatatttgaattgatagaaagagttttaaaaaagaaaaacttaaaagtggatgaaataataatattactttttaacataaaaaaagttcatgattatttaattcataagaatgttgaacttgctgattttataatgaatataaaatttgatttatctgaaaaaaaagtaaaaagaaaagaatgtatgatggatatttaccaagctattgtatcatactttaatgaaaatgatctagagttagctttgaatctttttgttgatgaaaatattaattttgaaaaagaggatgaaagtgaaattatccaagtatatcaagaatatagtaaatcaaaaaaagattatactttatttctatatgatgaaacagtcaaagctataaaaaataataagttaaaagatacccttgatagactttttataagtgaagaaagagaagtattcttagatataatgaataaagttttgtttgacatagtctattttttgaaacttgaaaaagattacattaataaaatattagcagatttttttgatagagtaacacatgaagtaagaattgaaagtttcaaaaaagttcttaactactatgttgaagaatatgaaaaaactgatgatattagtgtttgttctagagcaattatggaaaaaatccatgaatatttaaaagaccctcataaaaatagtccaaaatggcaatggggtgattttactgaagcacaaatagaaattatgagaatctggcttgtaagtgcagatcttgaaaaatatttttcaatagaagtaaaagataaaataagactaaaattctggaaaagatatataaaatatattaaagaagttagatattttgaaagactaaagcaagctattgtgatgttgactgatgaacacatatttatagaatttggtgaaaaaggaaatgccgcttattgccatagaaaagactatataagttttaacgaaataaatagattatcaactaattcaaaattaaaggatagagacgaagctgtattttttatacctcattcaggaaattgggaaataaagttaaagactagactatacgaattaggctatcgtgtaaaaatatggagataa

SEQ ID NO: 10124 - DNA, 3501 bp, Fusobacterium periodonticum ATCC 33693
atggagataaaaatgggaataatagagagactttttaaaaaaacaaaagaaactgataaaaaactaaaactttctttggagtatggagaaaaatatatcaaaataatattaaaaattggagataaaacaatatcgttaaaagacttaaaagatgaagtagatatttcaagtctttcaaaatctgatatatttgaagtagatgaaaatggtgataccttactactagactatgatgaaatatatagtttagatagaagtaccttaaaacttttaaaattgcctagcttcttccctggtatagtctatatcgataacaaaggatattttggtagttccaaggtagaatttagttataaaataagttttggtttagatgaataccatatagtaaatgctaactatgtagaaagtataagtagttcagaaagatacatcctaacaaaagagcagtatgacttaataaaactaataaatcaatataataatgatgatagtaaaaataaagaagctaatgaacaatataaaatgttaaatgctataaaagatgtttctcataaaacaaatcttttgcttaatgaaactataaaaaaagaagatgacctagttttattagagaacattgaattagactttttagaaagtgatgaagattatttagaagttgttccccaatcttcacaactttcagagaaacaaaataagaacttaagagaagcatttaaaaaagcaaatttatcacaaaatttttatttactaaatatagataataaaaaagtaaaagttgtagtaaatagagagctaaaagatgccttaaaagttgtaaaaagcaatgaaaaaataagtaaaaaagattttgtaaaaagagaatctccaatctttgaggatattgattctgaaattgttgaatttaattatggcccaagagttataggtttaggatacttaaattatagaccatctcctgctccaaatatgtcagagatggattggttcacaaaagaatttcctaaaattatgacagatacacctattaccttaaaacctgaatatttaaactatatgcaagataagtttaataatttagatgagtttgaagaaactgaattaaaatttaatcttgaaggtgaagaaaaaaaattatttatatcgaaggaaaatttagctaacgaaataaagaaattagaaaattctataaaggatataacagactataacaaatcaaaagcattggatgaaataattgaattggcagaagctgataactatagtcaagattatattgcatataaaggaaattatataaaaaaatttgataaaaatgtcgctgaacaatatagagatgatttaagagcaattgaaattaaaaaaagagaagagaaaaaacatactacaaaagagcaagagaaagttttaattccaaaagataatattgaaaacctagattatattgaagatatggaaaaaataactgaagaagaggttgaacttcctagttctctcaaatattcagatggtatagaattaaaagaacatcaaaaagaaggtcttttaagaatgcagtctctatataaaaagtcaaatgttaatggtttactgctttgtgatgatatgggattgggaaaaactatacaaatactctctttcttagcttggttaaaagaaaaagaagctttaagaccttcattactaataatgcctacttctttgataacaaattggtatgatgagaagaatataggtgaaattcaaaaattctttttagatgacacatttaaagtaaaaatactagatggaaaaaaatcaagagatgaaatttctgagttgagaaactatgatttagtactgacatcttatgaatccctaagaataaaccataaagaaacaggttatattgagtggaaagttgtagtttgtgatgaagcacaaaagatgaaaaatcctaaaacacttttaaccacagcagttaaaacacaaaatgcactttttaaaatagcttgtagtgcaacacctatagaaaatactgttgtagacctatggtgtttaacagactttgttaagcctggtctattagaaactcaaaaagattttgaaaaaaaatacatgaaacctttatctgcaagtgatataaatgacgaaaaaagacaagaaattaacaataaattaagtgatctcttgggagaattttacttgagaagggaaaaagaaaaagttctaacatcagattttccaaaaaaaatagttatatatgataaaataaaaccttcaagtcaacaagaagatataatagaaaagttaaaaaatactggaaaagctgcactagctataattcaaggaatgataatgacttgtagccatccacaactagtagatagagatgtagatgaagttcctcttggaagcgaagaaagtttaatagaagaagcgtacaaactagaacatatttatactatattgacagaagttaaaaagaaaaatgaaaaagccattatttttacaaaatataagaaaatgcaaaaaatcttatggaatgttataaaatattggtttgatatagaagttggtatagtaaatggagatgcagacaaaacttcaagaagaagaatattagacgattttagaaaaaaagaaggttttaatgttataatcttatctccagaagcagcaggagtcggacttaatattgttgaagcaaatcatgttattcattatactaggcattggaatcctgcaaaagaagagcaagctacagatagagcatataggataggacaaaaaaaagatgtatatgtttattatcctattatctctaatgttgaaaaaatagaaagagatgaatatcggactgttgatgagtggataagaaaacaattggaaatagatatgactgatagttctcctgaagaaaaattaaatagaatcattgtaaaaaagaaaagaatgcttaaagatttcttcttgacttgtggtggagaatttgatgatgatatgaccaaagaattcgcagctatgtcaaatgaagttggaaaagatttaagtattgaagttattgataatattgaccatatggaatttgaaaaattggcagtagtattattggaaaaagaatttaatagtaaatatggtctagtaactgttaaaagtggagataaaggaatagatggagttattttttcagaaagaggaaatattcttatccaaacaaagcacacaaaaaggttagattctaatgctgctggagacttatttagaggtgaaaaattttactctgatgagttaaataaggactttcctaaactaatagtttttacttcagcctctaaaaataatataagtgaagatattaaacaattagagaaaatgggaaaagtagaaatatattatcgagaaaaagttacagagttattaaataaatatcctactaaaataactgaattgatagatagagataaaagatattctattgaagatataaaaaattatataatagatatacatatataa

SEQ ID NO: 10125 - DNA, 2034 bp, Desulfovibrio vulgaris DP4
atgaatacggacttttttggatgggtcgctcagcttatcaccagccccctcggcgcatgggcagcctgtggtatcatcattgctattgcgaacttttactggttgaaattcagaaaaagtatcaatcgacgtatcaaaaacctgcaagaagctatcatcaagcttaatgaaatggatgatatgaatggctttgcagcggactatcgcgatttttcagggtgggcgaaggcacactcgatgctgggtcatgcatggcgcgagttcgaagaatcgctcgttttccccgaccctacggatgaagagcaatacatctgcaacacgcaggatgcctgctgcttcttcaatgccgccctcatcgacgacaagacgaccaacctctctttctataaggccctccccaactatctgaccgggcttggcattctcggaaccttcctcggccttgtctgtggcatctacctcgccgggcatggtcttgcctccgaagaccccgccctgctgaaagatgcgcttcgccaactgcttgaaggcgcatctctcgccttctggacttccatcgccggacttgccacctccatgctcttttcagcctatgagaaacgcaaactcaatgaggtgaactccgcgctcgaagactggaacgaggcactcgacaagcgcatcaagcgcatcacaccggaatatctcgcgtcacagcagctcaagcaactcaaggagcagaccacccaccttgagaccttcgtcaaccagattgccgtcaacatcgccgacgcggtcgaccagcgtatgaacgggactctcgtgccggtgcttgaacggcttgccgacaccgtggattccatgcgcaccgaccacgccgaacacaacatgcccgttctggtgcgcctagccgacactgtcgaagccatgcgtgacaaccacgaagaacgcaacgaagacatgctgcgcgaagtggtggacaccttcaagacgaccatgaccggggccgcaggcagggagatggaagctctttcgggaacgctgaaccagctacagaccacgctcattcccatcattcaggaaatgcagaccgcacagacggcgatgcagaaggcttccggggatatgacggcccagatgaacagcttctatgagcaaagcaatcgtgaatttgcagctggcatagcacaggtcaccgaaaccatcggcgcctcggtgcgcgaagcgcgccagttgctgcacgacgacctctccactgccttcggacagaccgccacccgtatggaggaggcaaccacagccatcactgaacggcttggtgcatcctacgaggagtacaaccgtagcctttccggtaatatcgaggcttgcggccgcacacttgcaagcaatatcgaggaatgttcgcaatccctcaccgcaaacatggcagaagcctccgcacagattggcgaaacggtacgctcagcaggcgaactgctaggaggccagctgcaaggggcattcacgcaggcggctgaacggatgcatgaagccgtccgcgccatcgaaagcactgtcgagaaggttcgccagtccggtgaagccagcggcgatgccgccgaccggacaggagtcatgctcacgcaactttccgacctcatggagagactcggcgaccatcagcgcagtgtggaacaggcatcggcagccatacgccagacagcctcgtcgctgacggatacaggttcagcccttgcgcaggcagccagcaccaccacgggttccgccacggtactgcgttcggcctctgaacagattcgcgcaacccagcagacccttgaaggcgtctggaaggagtatgaacaacgcttcaagggcgtggatgaatcgctcgaaaaggtgttcgtccgcctttcagaaaaccataaggccttctgtgacagtaccaccgactacatgacccagctggatgccaatgtcggaaaaatctccagtgacatcggagcttccgtcaacgcctttggcgatagcatcgaggaactcgccgacgctctcaacaaggtacgccgctaa

SEQ ID NO: 10126 - DNA, 780 bp, Desulfovibrio vulgaris DP4
atgtcacgacgctcctctggcggcaatccgctcacgcgccccgaagaagagggcaactatcttgcctcgctcagcgacatgatgtcggggctgctcttcatcttcatcatcacgctcatcgtcttcgtcatcaacttcaacatggaacgcatcgaggcggcggaacagaaacaggaactcaccgaaaaatatgatgaactgaccaacgcccgcaagacacgggccgaaatgctcaccagcctcgaacgaagcctcaagatgaaaggtgtcgaagtctccatcgacaaggatcacgggctgttacacatccccgaaggcatccttttcgactctggcagtgccgcactaccccctgaaggcggcagaacgctcgacatcatcgccgaacagttgagcactctactgccctgctattccggcaaggctgacgcgcccgcccccgacgaatgccgcgacaactacaagccgggtcgtctcgaagccgtgttcgtggagggccacacggacaacgtccccatgcctccgcggggaggcattcaggacaactgggacctttccaccaagcgggcagtgaccacctacagacacctgctaggtcatgcccctacgcttgccgccttcgtcaatctggatggcgaccccctgtttggcgtcagcggctatgccgcatcacgcccgcgcaacccgcacgacacccccacgccggacgcccagaatcgccgcatcgacctgcgctttctgctggcggccccgcgggggcaggacaaggcaacgccatga

SEQ ID NO: 10127 - DNA, 1368 bp, Desulfovibrio vulgaris DP4
atgagccttcgttcgacagtgcaaacgtgggcccccccggcacgacgcatccccgaccagccggaacgcaccatcaaggcaatggtgaccgtggcagccctgctgggtaacggcacggtggcccaaccccagtcatgggacctcgaacgcatattcgacacccttcgcaaggccctgcagcgtgacggcaccatcgcccacgtggaggcccgaaccttgcgttacgcaccgtgggtgctctttcgctccttcaacggctatcagggcactctcggtgaacgccaagacgttgccaccgcctatgcggcgtggcttgaacagcaacacagcgcgcgccccgttctcactctgttgcatgtgctgctgcgcgattatcccaccacgttgcccacctttggcacatggtgccggatgacggaaaaagccctcgccgcctcgccatctcctcggctgaagacatggcgagaacgatgcaacacctatggactgctggctcctgacgggcctaaacgcgtggcgggcagacttgcagcgggccgcgccacaccgcacgaggtacttgccgaggcggggctggaaggcgaacttgcggtgggtggctttgcagaacaggccttcaggcaattgctgcaccagacgtcaggcatgctggaacagggaaaggtgggagacacgcttaccagactgacgcaactcgtcccccccgatgtaccaactcgaggccgcgccctgcgctttccggctcaggctgtggcattggccgacagtctgctcatgcccttcgtgaagagcaacaacgcagggccgttcaaaaagcaggtgcgacagcttctgcttgaccatctcggcgacccgcgcatcgaaaaacgcgtctggcccagtgtgcgagaagaggcacgcgcagtgctgctaggatggctcgtcgagcaaagcctcgaagccttcttccgcatcctcgacagcaccgcagaccccatatggcaataccgcaaggcattctggatgcgttatctcgaaaagggggtcatcaccgaagcgtgggtggcgctgggcagaaaggcgcaaaccctcgcccgtgaacacttcggtaagggctatgccaagcttgccggggccacatcagaccagtcggttctgctcatgcgcatcgggggtctgaccattgcagaatggagccataacggcacctgtcgcatctggcgcaccccgacctacaatacgcctgttttctaccagcagacctaccatggagccgatttacgaaccgactgcgatttttcagccgttcatatgggctccgagaaatgggcgtggcaacgaaagatagccgactacatcagaaacaccaccaacatcttatggcagtaa

SEQ ID NO: 10128 - DNA, 3396 bp, Desulfovibrio vulgaris DP4
atgactcgctcgcttgtctggcaacgtcagcagcacggtgtagccttcagcgccacggaggatgatgcgctccttccggtgggcacatgggcacgccagcccctttccctgcccaatggtcgcatcgcttcgacagggccgctgctacaccttctcgaagaagaaaaagtcacccttgatgcagctgaaacgaccctcactgtgcccgacgctgtgcttgcgaccttggacgcgtggcagaccgatgccttgggactacctgctcatgcaccggtgaggctcacgctctcggcacaagggacactggcgagcgcagccttccggctgcgctatggcttcaccttcgacgacgggttgccagccacaggtgcatccatcgatggcgtcttattccaccacggcaagcgtgactatctgctccccgaccctctctataccatcgtggcgcgcatcgacgcctacaatgccgcaccgcttcaggacatggacgagcgttttctgtggtggagtgaacttgccgccctgctgcctgatgccgcatcctttccgagtgagttcttccggcagatgcacaccgtccgtcccgattcgttcagtctcgactttcgcgaagagggcggacgtctgcgcatcctgccccgcttcgtccgcagtctgcatcgtgaagataacgattacggcggcgagctccatgaagacatcctgcctgccgcccccaatgaggacttccagcgccgcttcttcgggcaggtgcatcccggcgggcgttatgcccttcccggcaactggttcgtcgtgcttccccctccccttcgaagtgcccttgaggttgttcaccgcatcaacggggcaagcgaatctgaaaaacgccagttcctgcacaatccgcgtgccgctatccgggagcgtctcgaagcccactatggcgacaatgccgaagtcgtcatggacagcctctttcaggagacaccgctttttctgagcgaacgcatcaagcaccttggcgtatgggaacccaagggtggcttctacatcaagacgcagggcggagactggtttcccggcgacccaccgccacaaagcctccttctgccgatagggccacaaggcgcattggttgacgttcgccccgctgacatcgcaccgatcaaggcgtgcatcgccgatgccaagacccgggggcaaggtgcggcctcctacaacggaacgactgtcagcactggcgatgcggcattatcgcttctggaacgtgcggaacgcatgttcgtaccgcacgcccccgataacagcgccaccgacggccctgccgacaacagcgaagagatgtcggacgacgggcaggtcaacgcaaatgccgacgcacctgtcgtgcccatcatcttcgatcatatcgacgagacaggtgtccgaagagaggccgaaaacctgcggcagaccgtagctgcagcgcctttcctacgtcccggcatcgcacttcacgagcaccagcacgaagggcttgcttggctgcaggagcactggcggcactcgtcaccgggagccctccttgcagacgacatgggccttggcaagacgttgcagacactggcctttctcgcatgggtcagggcacagcagaaacacggcgtcgtgccaggacgcccttttctcatcgtggcccccacagggcttttgaagaactgggaagaagaagctgataaatttcttatggaaccgggccttggccccgtgttcagagcacacggcggagacctgcgggcactcatggcccgtggcacgatggcaacagcccgcgaatttgaaaacagcggacttgtcctgacaacctacgagacacttcgggacaagattgccgtcttcatcgccgtgcattggggcgttacggtcttcgacgaagcacagaagatcaagaaccccaaagcgatgatgacggacatggcgaaatcgctgaagtccgaattctccatcgctctcacgggcaccccggtggagaactctctggcagacctctggtgcatcatggatgctgtgcatcccatgcgtcttgaaacattcaaggcgttcaccggcacctacatgccagcaggtctgcactccaccgagacccttgccgcactcaaggatgaactggcaaaacccgaaggttttcccagccttttacgccgcatcaaggaacgcaactggaaagagcgtcccgccaagcaccagaatccagtgcgcatcaccatgccccccgaacaggcgcaggcttacaggcaagccctgaacaaggccgtggaggatgcgggacgccccggtgcgacccttgaagcgttgcagcatatccgcaccatcgccctgcatcccttcactccggcgtggggtaccatgacgcccgacgccttcgtcaatgcctcggcacgtctcatgggaacctttgaacttctcacagacatcaggagtaaaggggaaaaggctctcgtctttgtcgaagtgaaacacatgcagatgattcttgccgaactgctccagcaacgcttcgattgcgaacaggtgctcatcatcaacggcgaagtatccggccccaaacggcaggagagggtgcatgccttccagacccgcaagggatttgacgccattcttctctcgcccaaggctgcgggcgtgggcctgaccctgacagctgccacgcacgtcatccacctgaaccgctggtggaaccctgccgtggaagaccagtgtaccgaccgtgcctatcgtatcggccagcaacacgatgtcaccgtgcattacccgatggctatccatccacaacttggcgacgccagcttcgacgtcaaactgcatgaacttctcgagcgtaaacgaagtcttagtcgcgacctgcttaccccagcgcccgctgcggcgagcgaactcgacaggctgcttgccgatatcacggacggtgccgcccatcatgatgcagaccggaccgacaagggcgaagcgcgccttctggaatgtcttgaccagatggaaccactccggttcgaagcgtgggtcgccgaacgcctcgaacgcctcggtttttctgtccagctgaccccggcatccggcgatggcggtgccgatgtcatcgccacgtcgcgcacccccgctgtcctccccagcctggtcatccagtgcaagcacacccagtcaccagaacgacctttaggtgaagatggcatcattgaggtgctacgcgcgcaaaaacgctatacgctgcccggacagaccctgtgccttcttgtaaccaatgcgaaaaggctcacgtcttcggcagttgataaagcaaagggtggaggagtgggcgtgcttatgcgcagcgatatgtcggattttgaacgcgggggaatgcctcagattctggcagaaccacgctgcacaagatag

SEQ ID NO: 10129 - DNA, 1851 bp, Acidaminococcus fermentans DSM 20731
atggggaattggctgtcttggatttcagattttttctatttattatttattatagctgcaggtttctgtattctgtggtttttcagaatcagtaaagctggttcttttgtggaacagattatttctgttttgcagaattattctcgggaatccatcagggaaaattacggaaatcttcaggaagaaatggggcaggccccgtatgattcgatttggaagaaatttgaacggacgctgttcaaaagcaaagcagaaggggtgctgatgacccaggatccggaggctttttacaatgatcagactttgttggacaatctgcctctggacctattccatgccatgccgggaatttttaccggcttggggcttttggggacttttgccgggattaccgcaggaatcagcggcatcgacctgggtaatgtggaaactatgaaaagcgggattgaagtcctgctcagcgggacacaaacggcttttgtgacttctgtggttggccttatcctggcactggtgtacaacctcgttgacagctggatttaccgtccttacaccaaaaaactggacactctgatcgatcagctcaatacccttttcccctctaaaagcctggaagaatttctgtctcatcaggcggaacaggcagaagaccagacggatgccatgcgggaactgaatggggaactggtgggccgtctggaagacatgtttgtaaagctcagccagagcattgatgtggcactgaagaacaatttaacagaatccttcacccaaagcctggaaccggttttccaggatttgaaccagtccattgacaaactgggcagcagtgccggggataccctgtccaaatccatcgaacagggggccggggaccagatccagggcctggccgtgactcttcaggatttccaggggaaaatgggcagtatgatggaagtctctgaacggctgaatgcggaaaataccgcccggctccagggttcggtggaactgatggtaaccaaactgaacgaagccatggacgccaatatccagaaacaggctattaccagtgatgccagccagacggccatgaagcaactggtggaagagatgaataccaacctgaaagcggcactggaacagatggtggaagccggccggacagccaaccaggctttgctccagactacggaggctacccgggggaccatccaggagattacagataccatgagccggagcacccggacccagaaggaagaaatgattcaggtgacggccaatatgaaagattccgtactggaagtgctgaaacagctccagcacgatatgcaggaacggaaccggaccatggatgcctatatggccgggctgaaggaaatgctgggccacaaccgggaaatcatggcttcggccgggaaaacggcagacaagtttgctttggccagcacacccatgcagaaggtggcggataccctgggcagtcagctgaacctggtggtcagcgccagcaaccagttcaacagccatgtggatcagaacgtccagaagctggtccaggtcagccagagcagccagaaagacctggaactgatccgggactccatgagtaccatgcgcagtgcctgggaaaactatcagcagactttccagggagtcagccgggaaatgcgggatgctacggatactttggcccgtactctggaacagtacaatacttccaccagcaaatggctgtctgaaactcttggtcagtacgacaagagcatcaaagaggccatgaattctgtgtccaccatcaaccagagtctgagtgattccatccaggatctgtccgatgccatggacaagaacagacggcactaa

SEQ ID NO: 10130 - DNA, 708 bp, Acidaminococcus fermentans DSM 20731
atgtggaagaaaaagaaagaacagaaggcccaacagagcggtgatgcctttaccacctcggtcagcgacctgatggctgggctcttgagcatctttatcttggctctgtgctatttcatgctgaatttccagacggtgaccaacaaatatacagggaatacggaactgcggaatcagctgttgaaagatgtagggaaggatctccaagctcagggactccaggtgcggatcgacaccaagcagggggtgctgcggatcccagaaagtgtgttgtttgaatccggggaagccaatatcaaggaacagggccaggcggctgtgggcaagctgagtcagtccctgttgaaaaccatgacccgtccggaataccgggaagccctggaaacagttttcattgaaggccatacggacaatgttcccatccacaacgagtttttccagtccaactgggaactttccacacagcgggccatcaatacctggaaccttatgcggaatgatgtaccggaattcaactggctggtgaatccccggggagagcccattttctcctgctccggttatgcggaaacccggccggtacgggaaaacggactggatcccaattcggaagagggaagagccgccaatcggcgaatcgatatccgttttgttatgatgccgccccaggatcctggggaaaagccttcgggaggaagtcatggataa

SEQ ID NO: 10131 - DNA, 1404 bp, Acidaminococcus fermentans DSM 20731
atggataagtcgctgatgcacagtctggaacggctgaaatcttttaaaatccgcctccctgaagtctgtctgcatcccggaaggccggtggaactggaaaaatggctgaaaaagacagtgtccgattccggaagacggccagcactggatccggtgaccatggaagaactctataccaaggtgaaagtacaggaaagagggaagaaagtacagctagacctaaggcgggaggttcctttcctgccggtcctgctgacccgtgaaaaaaaagaaaaaccccgtttttatgaagtactgcttcaggacatcctgaaggtcattcaagagggaattccccgttccgcccggcggaacaccttccggaatctggtatttgcctacttcactgtatacggacagccttacaagggggaacggatgcagaaatgcatctccctgtttctccagaaagatccggaactgctgaaatcggtgctgtatctccggaaccggaaacagctgctgaaacccaacggacacaagctgctgacccgggaaatccagaaacagcgaagcttccggaaggcgctggaggaattctgctggccggtgaacctgtggtatggatccttttcacagtgggccgtcaaagattttttccagctggaggaagaggacgactgggatgaactgttcggcgtgctgaaagaaatttgtgaggacaaagcctgtgggaacatggtcccttatgctgcggaaaagatgatttatctgacggaccggttcggtgacggaaaccgggaaaaagaagtacggatcctgctgtttcaggcgctgggagatccccgggatccgggagccagcctgaactgggtggatgtggaggaaagagcccgggaaattttcctgtcctggttaaaaaagaacgatctgaacctgttctttaccattatttccaagacagtacgccaggttgccacatcggaaaatatgtggaaataccggaaaaacttttgggaaaagtatctggatgccatgtactatacccgggtgttcctgggccccgatgcggaacggatcgcctggcgcatggagctggccaaacagggaatgggctttggaaggctaaacgggtcgggagattcgatgagaagtctgctgatgttcagcattggagattatgtttttatagaagccagtcacaatggcaaactaagaatttggaaaaggggaaaagagcccttgcctttttatcaggcgaaatatacgtataaaggcttttcttattcggacgttacacaggcttccaatgtggagaaggattttgtccattccagttcagaaaccggttcctggcagcggaaggtcaatgaatgggtgcggagacactgtggagtacagcccaaagaaagccgatggaggtaa

SEQ ID NO: 10132 - DNA, 2910 bp, Acidaminococcus fermentans DSM 20731
atgaccaaccaccacttttggatagcccaagagaaaggatatttttatccctgtcaccaaacaaaacctacaggagattggcctctgatccagggacagctggaaatcctggcctctgaagggaaagtggaggaagaaccggaaggattcctgctgccccatgtccaggcggtggaccttgatccggaaatttcggaaattctggaactgccggattatttcccttatacaatcacccttcgcagtcatggcagcctgggctccccgtcctttcggtatgaggtggaatacctgcgcccggacgggacgcctttttatggcttggtagtacggggttcttacgtggagcttagccgggaaacctgttaccggttcaaccgtgaccagtatgatttgctgagcctggtggaagaaagcaaccgggagagccagaaaatccaggacagagggaaagtcagtcagtacaatactcttcagctggcccggatcaaggaacgggcggaaaaaatccatgccaccctggaccggttcatggaacggcagaaagttgttacggctgacaagctttccgtgcggctggaaaagaatccagacggttctttttccgtactgccggtcctcttgcggagggatggggattcctatacccggatcgaagcagattcgctggaccaggggtttcggagcaatccctacaacacacggaaaatctatgggccggacaagacccagtatgttttcactccagaacaggcggaaggcatccgtcaaatgcgccagtgccagcggctttctccagaggcggcccgacaggtggcagaacatccccgggaggttttcggttctgaagcctttgattttgatttgggtgtgtacggggacagggtggtttccattggggaattcctggctccggatctgcctttttctctcagctccggacggaaatggctgcctccggaaggaaccgttgaagaagatggccgggaaggttcagctcataagacggaaacatttcatctgaaggaaaaagactatccggaattgttcctgaaggtcagtgatgctctggaccggggagaaaaatggattgtcctgggcagtcaggaagtggaactgacgccagaatttttggactatgtggatcagctgaaggcaaaagctgcagaaaaacaaacggaccaggtgcagggaccagaaaataccggagaaaagaaaaaagacgcatctctgcaaatccaggaaaatttcctttctcaggaatatcattctcggaaagcaaaacgggaaaagcagctgggcgggaaccgtctgggaagttttctgggcaagggactcaaagagggtattcgccccatgccccatcagcaggtggggatggaacaactggcggcctgctgggagagtggttgtcatggggtgctgctggcggatgatatgggtctggggaaaaccctgcaggcttttggattcctgtcagcactgaagaaagcctatggcagcagggacatggcatcggtgctgattgtggcaccggtttccttgctccagaactggatggaagaataccggaaatttgtggcagaaggcgtattcgatagtattgtgcccatgtatggcagtgagctgaaaaaacactgggcccggaatccggacggaagccgctgttatttccggcccccggaccccaatctgaaggaagtctccatgttggattttcaggaccgggaacggcagattgattacagtcagaatcacttgatcctgaccacctacgaaacccttcgtgaacttcagctttcttttggacgggtggcctggagtgtcatgatcctggatgaagcccagaaaatcaaaaatccggccacccggacttctgtagcggcacgggccatgaactgcgatttcgggctggcactgacaggaactcccgtagaaaattcctggacggatctgtggaccattatggattttgtggaaccgggaaaactggaatccctgaaagatttcaacagccattatcagcatcagttgcagaatctggaaaacaaggggggacggctgaaagaactgggagaccagctgcggaagaatctggatccctgttttatccggcggctgaaggaggatgtgaatctgggactgcctgccaaagaaatcctccgcttcaaggatcccatgccggaagaacagcggaaactgtatggggaagtggtccgggaagcacaggcagggcagggagaaaaatccattaccatgctccaggccattgcccgtctccgggatatttctctttgccccagtcttggtgcggggaatggaaagagatattcgttgggtgatccagattgtttcttcggttcctctgccagactgatgcggacaagaacaatcctggatggagtgagaaccaagggggaaaaggccctgatttttgtggaaagcaggaagattcagctgctgctacggacttttctggaacaggtctacggcatccaggtgcagccgcccattaacgggaccacacaggctgtggcacggcagaaaatggtgaaccagttcaaccaggcctcagggttccaggtgctgttgctgtccccggaggctgccggtgtggggctgaacatcaccggagccaatcatgtaatccatctcagtcgctgctggaatccggccaaagaagaccaggccacggaccgggcttaccggattgggcagaaaaaggcggtaaccgtctatcttcccatggcagtggatacggattttccggaggaggcgtcttttgacctgaatttggatgctctgcttcagtacaaacgagatttgagccgaagtgccctgtatcctacggaagccagtgaagaaaacgctttggccatgctgaaacggattgaagaagcggcagggtga

SEQ ID NO: 10133 - DNA, 2046 bp, Rhodobacter capsulatus SB 1003
atgtcttcgattgccgatcttgttcttgaccatctgggccagcctgtcgaaacggctgtcttgtttctggccggtttgctgagatccgagggcacgcccggggtggtggtggtcttgctcttggcggcgatgctggggttccttgcctttggaattggccggatgagaggccaggcggtgctcttgcgtcggttcgcggaggttttggaccaggttccggtcgaggagattgcccaaggcgggcttgaacgcgtcgcgccagaacttggccgggtggctgcgggcaactccggcgcgaccttgcgcgaagcctgggacgagttcagcgagacgttgatcatcgacgaccgcgcagaaccgccggtcgtgcgcaacaccgcgcgcccgggggtgttcttcaacatcgaggatctgggctatggcccggggttcctgcgcatcctgccgggcatgttcgtctcggttggccttgcgctgacctttttgggcctgatcgccgccctgcatcagatgtcggatggccagatcacctctgccacgatgcaaaacctgctcaagatcgcctcggcgaagttcatcatgtcgctgaccggtctggtttgctcgatcgtgctgaccattcagctgcggatcagcatgggcggtgtcgaggccgcgttgcaccggctggtgcggcttttggaagagcggctcagctttgccagcctcgaacagatcgcgctggaacagttgcgtgcgcaaagcaaggccgaggaggcaaaccgcaagctgggctgggaactggtcgccgaattgggccgccccctgcgcgaggagctgccgttggcgatttccacctcgatcagcgaagcgatgcagccgattttggacaaggtcagcgcgcaaggcacttcaagcgtcagcacgatggcgcatgatctttcgcagcaggtgtcaaacggggtggagcgcgcgctcaccgtggccagcgaccggatcgcgcaggcgggtgatcggatcgcgcaactggcggaacggatggatcaatcctcgggccggatgggcaccgagatggatcaggcggtgcagcgggtggcgcaggctgtcgacgacttgcgcggtgcgatgagcgccacggcgcaatccaccagcggggcctttacccagggcgccgagcaactgctttcggtgatgaacgcgacgctggagggtattcgccagaacaccggcgaaggggcgcgggcgatgtcggaggcggcggcggacatgcgcagcgccgccagttcgatgcgggaggagatggaaggggcggcgcgcagcggggccgaggcagcgcaggcccggatgcaggcggcaggggtcgaagcgggcgcggccatcgacggcgccagccgttcggtgctggaggcctttgcctcggccagtggcaagatcaccacactgacagacgagatgttcgtcaaggcgggggcggaactcctctcgccgatctcgaatgccgccgagcagcttgatgcgttggtgggggcactggaagaaagcgcagccaatgcccgccagaccgccgagagtttgcgcgcgggcgcacaagccggggccgaggctgcgggcaccttccgcggcgcctcggccgatctggtagccgccgccggtccggttcgcgccaccaccgagcgcatcgagggcgcgatccgcacgctgtcggacagcacggcgcaggtggccggcacggtgagccgcagcgccgaggccacggcgacctcggcgcgccagacccttgaggccgcgcgcgaaactctcggggcgcagcagcgttcgatcgaggcggcgttgcagggggtggaatcgctcgtgcgccggatgcaggggcagggtgagcggcttgatacgctggacgaaaagctgggccgggccttcgagctttacgccaatcagaccgagggcgcgatgcagtcgatccgcgcgcatgtggtcgacatgtcgaaggggctcaatacggcgctggccaccctgcagacgatcgtcgatcagctgcaggagttccagccgcagcaggggcgtaggtga

SEQ ID NO: 10134 - DNA, 1005 bp, Rhodobacter capsulatus SB 1003
atgcgcttcgcgacccggcgccgtcgcgaggaggaagaggcggaatcggccttcgtgtcgatgaccgacatgaccgtcagctttctcttcatcgtgatgatcctgcttgccttttttgccagccaatacaacgacaaggaagttgtgccgcgccccgtccatgaaaccgtggtgcaggagcgagactcggctaggcaagacgtcgagcggttgttgctgtcgattgcccggcttcaggcacagatcgaagacctcaagcagacggtcgcgacaaaagatgcccgcatcgccgaacttgagcgtcaactggctgaagcgctggaaaagctgaagcagcgtgatccgctggaggcctatagcgcccgctctaccaaggcgcgccatgagatgatcgagcgtctggccagcgcggtgaaggaagatattgcccgcgagaagatcgaggggctcgatgtcagcgcgcaaggcgatgcgctgcggtttcagggttccgggctctttgcctcggggcagggcgggctgagcggcaattcgctgcggatcatccggcttctgggggcgcatctcgaggggcagctgccctgtttcacggtcgggccgcggggggcgattgccgcaagctgcaacccggatctggtgctgatcgagacggtgcaggttgaaggccataccgatgccgatgcctcgcaggcgtcgaaccttaccctgtcgatgctgcgcgcgacctcggccttcaacgcgatcgcgcccgatgcggcgcaggacgacgccccgccgatgctggcgttccagaacctgctcggtcaaccggttctggccgttgcgggttatggcgagatgcgcccgatcggccccaatgacagccccgagggcaaggcggccaatcgccggatcgacctgcgcttcatcatgtatgtgccgccgggccgcgatctgatcccgcagaccgtggccgatatcggccggatctcgaccgagttgcagcgccgccggggacaaccatga

SEQ ID NO: 10135 - DNA, 1335 bp, Rhodobacter capsulatus SB 1003
atgaccgggcaaaacggagggatttcgctctcggaggtattggcgtcgcggcgcagcctgcacctgccgcccgcgccctcgttcgagatccttgaccggacgatcgagcgggtgatcgaacgcttcggggcgcacgcgcagatcgccgagagggatccggagcgcttgatctccgagatgctggcccgtatccgggcctgggactggcaaaaggtgccgatgagacacgttaacgctgtcggtcggctggtatttgccgccccttggcgggaccgcccggattgcgacccgatccgaaccttcctgctcgacgaggtggcggtttccacccgctcggggttcctcaatccgctggtgcagacctacatcaccaccttctcgacgcaatcggcggcctgtcggcggctgggccaggctttggcgcgggcacgggagcggttgggggcgcagtggcgcgcgcttctgaccgaggtgccggagtttttcgatacggacagggcgccgcaagcgttggcgcgcaagatgatgcagatggaggatatatggcggggacttcgcaaactcgggctccgtcacttcaatgagctggggctgatggacgccgcgcatctggcttatctggaacagatcgggccgaagctgaccgaccgcgccgagatcgagcggcttctggcctggctgcgccccgcaggtcagccgccgcgcgccaccggcgccgccgaggcgatcgcggcgctgctccggccttgggccgggaaagccgttccggaggatctgcgcgcgttgatctgcgaacggttgatcgagatctacggcgatccgagaccggttccgaacgccacatggctggccgttggcgaggacaaccttgccctgttccggcgctggctgacgaaagcggaactgaccttctttatcggcgtcgtgaatgcaacccagaacagcgacatgtggcctccacgccgtgatttctgggaacttctctatcgtcagggccgcattgcggaggcgtgggtggcctttcccaagccggcccgggattacgcccggcgcaaccttcaactctggggacaggggaacgaccgcaggttcggtgagcagatcgcgggcggatcgcgcacgaatacctcgcttctgatcatgcggatcggcgacaagatcgtggtggacggatgccattcctacaagacccacatcttcgatgcgaaggatccgcaggcgccgaaactctatcaacgcaaatatgactgcgaggacattcggttgcgatcccgcgtctcgcgggcgcacaaccccatcccgaactggtccgactgggtcctgaggcatatctga

SEQ ID NO: 10136 - DNA, 3093 bp, Rhodobacter capsulatus SB 1003
atgaacctgaccttttcccatacccccgagcagatcaccctcaccgccacggcgtcccgcggcgggcttcttaaccggcttcgcgcccgcaaaccggccgatctgaccctgttgccgcccgaggaacggcgccttgccctggcgctcgccgatctgcgggcgctggccgacgaacaccacgagcccttgcagatcgaaagcgacggcattcgtctttcccatcgtcttgccgccgcgcttgatgccgatgccgccgaggcgctgggcctgccgccgctgaccgatctggtcttgcgcaccgatgtcgaggggatcgtcggcgaagccgggttccggttgcgggccgagtggatgcgcgcgggggtgcgcaagctgcctcgccgggtgggggcgatcctcgagaccgatcgtgggccgcagcggatcccgctctggatgatggaggcgctcgatctggccgaaagtcatcggtccggcgcgggggacgccgccgactgggaggcgctggcgcggtttcgtcgcgcgctcgatcccggtgtggtgcaggcaggcaatgtccgggcagcacggctgtcgctgaccgatttcctggccgggctcgaggtgtcgcttgcggatcgcttctcgatttcgcccaacgcctcgggcagcgatttcgaggtggtgccgttttccggccagcgcatcgcggatctcgaaacggtgcccgagaccatggccgagctgtccggcccggaacttggggattttcagcgcaagctgcgcatgcggggcgcgctgaacgcctttcggctggcgccggggcggtttctggtgatcgaccgcgccgccgcccccgtgctgggggtgatggccgagatgcagcgcgccccgcgcgaagagcgtgcggccttcatccgcaatccgcgtccgcgcctcaccgccgcgatcgaggcagcgcttgaggcgcgtggcgatctggccgggctcgatgatgccgcgcgcgaagacagcatcgaacgcgccgccgggccggtgctggtcgaaaccgcggaatacgaggcgttttccgctcgcgtcacgggaatcgagctgttcgaaaagccggcgctcgacctgttcaccggcagtggcaccacctggttgcccgaagtgtttgcggccgatgtcgcgcgccagatcgcggaactgccggtcgagcggctggaaacccttgcgcaggacctcgaacgggcgattgcggcgggagaagtcagcgtcgcggcgggcgatgtgcaggttccggcgcggccggaggcattggccgcagtgcaaggcgagatcatcgcgcgccgagggcaacccgagccgacagaagcggcgctgcaggagcacgctccggggccgctggttctgcagaccgccgacaacttcgaagagttgcattggcgccccgcgaccccgccccggtccgccgtccttcctttgcgtctgccccatactctgcgaacgccgttgaaggatcaccagatcgaggccttcgactggcagggacaggcctggcgagccggtctgcccggggtgctgaacgccgacgagcaggggctgggcaagaccttgcagacgatcgcctttctggtctggctgaacgaagagatgacggccaatccgatccgccgtggcccggttctggtggtggcaccgacctcgcttttgcagaactgggaacaggaagtggctcgccacgtcgacgctcccggccttggccacctgatccggctctacggcaccgggattggcgcgcggcgcaaggcggggcagcgcggcatggatacgcaatcgggcgaggcgctcttggattttgccgatctcgagcgggcggccgcggcgggggcggggcatctgacctgggttctgaccacctacaccacactcacgaactatcagcattctctggcccgtatcccctttgccgccgcggtcttcgacgagattcaggcgatcaagaatccggcctcgctacgggcggcggcggcccgcgcggtcaaggcggatttccgcatcggcctcaccggcacgccgatcgagaattccaccgtcgatctctgggcgatcatggatcaactcgcccccggggcgctgggcacgctgcgggagttccgcagccgttacggcgaaccggacgaggccaacatggccgagctgcacgcgcgggtattcacgccgcaaggcgggttgcctgcgctggccctgcggcggatgaaggacaaggtcgcccgcgatctgcccgcgaaaacgcgcgttctggttccgcgcgaaatgcccgcgctgcaggcgcaggtttacgatgccgcgcggcttcaacttgccagcggcacgcctggtgcggccttgaagctcttgcatcacatccgcaccgtctcggtgcatcccgcgctgggcagttacggcgcggatgcggagttcatcgccgcttcggcgcgcttgtccgcaaccttcgacatcctgcgtcagatccgggcgcggggcgaacgtgcgctggtcttcatcgagaaccggcagatgcaatatcgcttcatcgagatcgcccgcgccgaattcggccttgcccggatcgatctgatcaacggggataccccgattgcgcagcgccagcagatcgtcaaccgctttcaggcgcatcttgaggacgggggcgggtttgatcttctcgtgctggggccgaaggcggcgggcaccgggctgaccctgaccgctgcgacgcatgtgatccacctctcgcgctggtggaacccggcggtcgaagaacaatgcaacgaccgggtgcatcggttgggtcagacccgcccggtgcagatccatgtgccgatggcgatccatcccggctatcgcgcgcacagtttcgattgccttctgcacactctgatgcagcgcaaacgccgcatggccagcgccgcgctttggccgatgggagacaccgataccgacgcgcagcatctgcggggcatggtcgcgcaggacgtcatagggcagggtcgaggtcagatcgtcccgcaggccatggccgagacattcgcgcgggagggcgtcgcatgtccggagccgggtgagggcgggaggtacgctttcgagtag

SEQ ID NO: 10137 - DNA, 2046 bp, Rhodobacter capsulatus DE442; identical to SEQ ID NO: 10133

SEQ ID NO: 10138 - DNA, 1005 bp, Rhodobacter capsulatus DE442; identical to SEQ ID NO: 10134

SEQ ID NO: 10139 - DNA, 1296 bp, Rhodobacter capsulatus DE442
ttggcgtcgcggcgcagcctgcacctgccgcccgcgccctcgttcgagatccttgaccggacgatcgagcgggtgatcgaacgcttcggggcgcacgcgcagatcgccgagagggatccggagcgcttgatctccgagatgctggcccgtatccgggcctgggactggcaaaaggtgccgatgagacacgttaacgctgtcggtcggctggtatttgccgccccttggcgggaccgcccggattgcgacccgatccgaaccttcctgctcgacgaggtggcggtttccacccgctcggggttcctcaatccgctggtgcagacctacatcaccaccttctcgacgcaatcggcggcctgtcggcggctgggccaggctttggcgcgggcacgggagcggttgggggcgcagtggcgcgcgcttctgaccgaggtgccggagtttttcgatacggacagggcgccgcaagcgttggcgcgcaagatgatgcagatggaggatatatggcggggacttcgcaaactcgggctccgtcacttcaatgagctggggctgatggacgccgcgcatctggcttatctggaacagatcgggccgaagctgaccgaccgcgccgagatcgagcggcttctggcctggctgcgccccgcaggtcagccgccgcgcgccaccggcgccgccgaggcgatcgcggcgctgctccggccttgggccgggaaagccgttccggaggatctgcgcgcgttgatctgcgaacggttgatcgagatctacggcgatccgagaccggttccgaacgccacatggctggccgttggcgaggacaaccttgccctgttccggcgctggctgacgaaagcggaactgaccttctttatcggcgtcgtgaatgcaacccagaacagcgacatgtggcctccacgccgtgatttctgggaacttctctatcgtcagggccgcattgcggaggcgtgggtggcctttcccaagccggcccgggattacgcccggcgcaaccttcaactctggggacaggggaacgaccgcaggttcggtgagcagatcgcgggcggatcgcgcacgaatacctcgcttctgatcatgcggatcggcgacaagatcgtggtggacggatgccattcctacaagacccacatcttcgatgcgaaggatccgcaggcgccgaaactctatcaacgcaaatatgactgcgaggacattcggttgcgatcccgcgtctcgcgggcgcacaaccccatcccgaactggtccgactgggtcctgaggcatatctga

SEQ ID NO: 10140 - DNA, 3093 bp, Rhodobacter capsulatus DE442; identical to SEQ ID NO: 10136

SEQ ID NO: 10141 - DNA, 2046 bp, Rhodobacter capsulatus B6
atgtcttcgattgccgatcctgttcttgaccatctgggccagcctgtcgaaacggctgtcttgtttctggccggtttgctgagatccgagggcacgcccggggtggtggtggtcttgctcctggcggcgatgcttgggttccttgcctttggaattggccggatgagaggccaggcggtgctcttgcgtcggttcgcggcggttttggaccgggttccggtcgaggagattgcccaaggcgggcttgaacgcgtcgcgccagaacttggccgggtggctgcgggcaaatccggtgcgaccttgcgcgaagcctgggacgagttcagcgagacgctgatcatcgacgaccgcgccgagccgccggtcgtgcgcaacaccgcgcgcccgggggtgttcttcaacatcgaggatctgggctatggcccggggttcctgcgcatcctgccgggcatgttcgtctcggttggcctcgcactgacctttttgggcctgatcgccgccctgcatcagatgtcggatggccagatcacctcggccacgatgcagaacctgctcaagatcgcctcggcgaagttcatcatgtcgctgacgggtctcgtctgctcgatcgtgctgaccatccagttgcgcatcagcatgggcagtgtcgaggccgctttgcaccggctggtgcggcttctggaagagcggctcagctttgccagcctcgaacagatcgcgctggaacagttgcgtgcgcaaagcaaggccgaggaggcaaaccgcaagctgggctgggaactggtcgccgaattgggccgccccctgcgcgaggagttgccgttggcgatttccacctcgatcagcgaagcgatgcagccgatcctcgacaaggtcagcgcgcaaggcacatcaagcgtaagcacgatggcgcaggacctgtcgcagcaggtgtcaagcggggtggagcgcgcgctgaccgtggccagcgaccggatcgcgcaggcgggcgaccggatcgcgcaactggcggaacggatggatcaatcctcgggccggatgggcaccgagatggatcaggcggtgcagcgggtggcgcaggctgtcgacgacttgcgcggtgcgatgagcgccacggcgcaatccaccagcggggcctttacccagggcgccgagcaactgctttcggtgatgaacgcgacgctggagggtattcgccagaacaccggcgaaggggcgcgggcgatgtcggaggcggcggcggacatgcgcagcgccgccagttcgatgcgggaggagatggaaggggcggcgcgcagcggggccgaggcagcgcaggcccggatgcaggcggcaggggtcgaagcgggcgcggccatcgacggcgccagccgttcggtgctggaggcctttgcctcggccagtggcaagatcaccacactgacagacgagatgttcgtcaaggcgggggcggaactcctctcgccgatctcgaatgccgccgagcagcttgatgcgttggtgggggcactggaagaaagcgcagccaatgcccgccagaccgccgagagtttgcgcgcgggcgcacaagccggggccgaggctgcgggcaccttccgcggcgcctcggccgatctggtagccgccgccggtccggttcgcgccaccaccgagcgcatcgagggcgcgatccgcacgctgtcggacagcacggcgcaggtggccggcacggtgagccgcagcgccgaggccacggcgacctcggcgcgccagacccttgaggccgcgcgcgaaactctcggggcgcagcagcgttcgatcgaggcggcgttgcagggggtggaatcgctcgtgcgccggatgcaggggcagggtgagcggcttgatacgctggacgaaaagctgggccgggccttcgagctttacgccaatcagaccgagggcgcgatgcagtcgatccgcgcgcatgtggtcgggatgtcaaaggggctcaatgaagccttggcgaccctgcagacgatcgtcgatcagctgcaggagttccagccgcagcaggggcgtaggtga

SEQ ID NO: 10142 - DNA, 1005 bp, Rhodobacter capsulatus B6
atgcgcttcgcgacccggcgccgtcgcgaggaagaagaggcggaatcggccttcgtgtcgatgaccgacatgaccgtcagctttcttttcatcgtgatgatcctgcttgccttttttgccagccaatacaacgacaaggacgttgtgccgcgccctgtccatgaaaccgtggtgcaggagcgagactcggctaggcaagacgtcgagcggttgttgctgtcgattgcccggcttcaggcacagatcgaagacctcaagcagacggtcgcgacaaaagatgcccgcatcgccgaacttgagcgtcaactggctgaagcgctggaaaagctgaagcagcgtgatccgctggaggcctatagcgcccgctctaccaaggcgcgccatgagatgatcgagcgtctggccagcgcggtgaaggaagatattgcccgcgagaagatcgaggggctcgatgtcagcgcgcaaggcgatgcgctgcggtttcagggttccgggctctttgcctcggggcagggcgggctgagcggcaattcgctgcggatcatccggcttctgggggcgcatctcgaggggcagctgccctgtttcacggtcgggccgcggggggcgattgccgcaagctgcaacccggatctggtgctgatcgagacggtgcaggttgaaggccataccgatgccgatgcctcgcaggcgtcgaaccttaccctgtcgatgctgcgcgcgacctcggccttcaacgcgatcgcgcccgatgcggcgcaggacgacgccccgccgatgctggcgttccagaacctgctcggtcaaccggttctggccgttgcgggttatggcgagatgcgcccgatcggccccaatgacagccccgagggcaaggccgccaatcgacggatcgacctgcgcttcatcatgtatgtgccgccgggccgcgatctgatcccgcagaccgtggccgatatcggccggatctcgaccgagttgcagcgccgacggggacaaccatga

SEQ ID NO: 10143 - DNA, 1335 bp, Rhodobacter capsulatus B6
atgaccgggcagaacggggggatttcgctctcggaggtgctggcatcgcggcgcagcctgcacctgccgcccgcaccctcgttcgagatcatcgaccggacgatcgagcgggtgatcgaacgcttcggggcgcctgcgcagatcgcggagaaggatccggagcgcatgatctccgagatgctggtccggatccgggactggacctggcaaaaggtgccgatgagcttgattgcgcgcattggccggctggtgtttgccgccccctggcgggaccgcccggactgcgatccgatccgaactttcctgatcgacgaagtggcggtctccacccgctcggggtttctcaatccgctggtgcagacctacatcgccaccttctcggcgcaatcggcggcctgtcggcggctggggcaggcgctggagcgggcgcgggagcggttgggggcgcagtggcgcgcgcttctgaccgaggtgccggagtttttcgacgccgcgcgggcggcgcaggccctggcgcgcaagatggtgcagatggaggatatctggcgcggcttgcgggcgcttggtctgcgcgcaccgcatgggccggggctgatggatgccgcgcatctggcttatctggagcagatcgggccgaagctgaccgatcgcgccgagatcgagcggcttctggcctggctgcgccccgcaggtcaggcgccgcgacccaccggcgccgccgaggcgattacggcgctgctccggccctggaccgggaaagcggttccggaggatctgcgcgcgttgatctgcgagcggctgatcgagatctacggcgatccgcgaccggttccgaacgccacatggctggctgtcggagaggacaacctggccctgttccggcgctggctgacgaaagcggaattgaccttcttcatcggtgtcgtgaatgcaacccagaacagcgacatgtggcctccacgccgtgatttctgggaacttctctatcgtcagggccgtatcgccgaagcatgggtggcctttcccaagcccgcgcgggattacgcacggcgcaaccttcaactctgggggcaggcgaacgagcgcaggttcggcgaacagatcgcgggtggatcgcgcagcaatacctcgctgctgatcatgcgtatcggcgacaagatcgtggtggacggatgccattcctacaagacccacatcttcgatgtgaaggatccgcaggcgccgaaactttatcaacgcaaatatgactgcgaggacattcggttgcggtccaacctttcacgggcgcacaacccgattccgaactggtcagactgggtcttgaggaacatctga

SEQ ID NO: 10144 - DNA, 3090 bp, Rhodobacter capsulatus B6
atgaacctgaccttttcccatacccccgaaacgatcactctgaccgtcacgactccccgaggcggccttcttgaccggctgcgcgcccgcaaacccgcggatctgaccctcttgccgcccgaggagcgtcgcctagctctggcgctggccgatcttcgggcgctggccgacgaacaccatgaccccttgcggatcgagagcgacgaaatccgtcttggtcaccgccttgcggctgcacttgatgccgataccgccgaggtgctgggccttccgccgctgaccgatctggtcttgcgcacggatgtcgaggggatcgtcggcgaacccgggttccggctgcgggccgagtggatgcgcgcgggcgtgcggaagcttccccgccggatcggggcgatcctcgagacggatcgcgggctgcagcggatcccgctctggatgatggaagcgctggatctggccgaaagtcaccacgccggcgcgggtgacgccgccgattgggaggcattggcccggtttcgtcgcgcgcttgatcccggcgtggcggaagcgggcaatgcccgggccgcgcggctgtcgctgaccgattttctggccgggctagaggtgtcgcttgccgatcgcttctcgatttcgcccaacgccgcgggcagcgatttcgaggtcgtgcccttttccgggcagcgcatcgaggcgttggcaacggtgcccgaggctgcggccgagctttccggtcccgagcttggagattttcagcgcaagctgcgcatgcgcggcgctttgaacgcgtttcggctggcaccgggccgatttctggtgatcgaccgcgccgccgcccccgtgctggaggtgatggccgaaatgcagcgcgctccgcgagaggagcgctcggccttcatccgcaacccgcgtccgcgtatcagtgcggcgatcgaggccgcgcttgacgcgcggggcgatctggcgggtctcgacgatgccgcccgcgaagagagcatcgagcgcaccgccgggcctgtgctggtcgaatccgcagaatacgaagccttttcggcgcgtgtcacggggatcgagctgttcgaaaagccggcgctcgacttgtttgccggcagcggcaccacctggttgcccgaggtcttttcggccgatgtcgcgcgccatgtcgcggcgctcccgatcgggcggctggaaacccttgcgcgggatcttgaacgggcgatcgcggcgggggaacccggtgttgcggccggagaggttcaggtgcccgcgcggcccgagacgcttgccgcggtgaaaggcgagatcgccgcgcgcgggagggcgccggagccgacggcagagccgcaggggcccagcccggggccgctggtcctgcagaccgccgacaacttcgaagatctgcattggcgccccgcaacgccgccgcgggctgccatcctgccgttgcgtctgccccatgcgctgcgcacggcgctgaaggaccaccagaccgaggcctttgactggcagggcagggcctggagcgccggtctgcccggggtgttgaacgccgacgagcaggggctgggcaagaccttgcagacgatctcttttctggtctggctgaatgaggaaatggcggccaacccggcccgccgcggccctgtgctggtggtggcgccgacctcgctcttgcagaactgggaagcggaagtggcccgccatgtcgagtggcccggccttggccaactgatccggctttacggctcggggatcggcgcgcggcgcaaggcggggcagcgcggcatggatacgcaatcgggcgaggcgcttctggattttggcgatctcgagcgggcggctggcgcgggggcggggcatctgacctgggttctgacgacctacaccacgctgacgaattatcagcattctttggcccgcattccctttgccgcagcggtgttcgacgaaattcaggcgatcaagaacccggcgtcgctgcgggcggcggcggcgcgcgcgatcaaggcggatttccgcatcggcctgaccggcacgccgatcgagaattccaccgtcgatctttgggcgatcatggatcagcttgcccccggtgcgctgggcaccttgcgggaattccgcagccgttacggcgaaccggacgaggccaacatggccgagctgcacgcccgggtgttcacgccgcaaggcgggttgcctgcgcccgccttgcggcggatgaaggacaaggtcgcccgcgatctgcccgccaagacgcgcgttctggtgccgcgcgaaatgcccgcgctgcaggcgcaggtttacgatgccgcgcggctgcaactcgccagcggcaccccgggggcggccttgaagctcttgcatcacatccgcaccgtctcggtgcatcccgcgcttggcagtctcagtgcggatgcggagttcatcgccgcttcggcgcggctggccgcaaccttcgacatcttgcgccagatccgcgcaaagggcgaacgcgcgctggtgttcatcgagcaccgccagatgcaatatcgcttcatcgagattgcccgcgcggaattcggcctcgacctgatcgatctgatcaacggggagaccccgatcgcgcagcgtcagcagatcgtcaatcgctttcaggcacatctggagcaggggggcgggttcgatcttctggttctggggccgaaagcggcgggcaccggcttgaccctgaccgctgcgacgcatgtgatccatctctcgcgctggtggaacccggcggtggaagagcaatgcaacgaccgggtgcatcggctgggtcagacccgcccggtgcagatccatgtgccgatggcgatccatccgggctatcgtgcgcacagtttcgattgccttcttcacagcctgatgcagcgcaaacgccgcatggccagcgccgcgctttggccgatgggagacaccgatgccgacgcgcggcagcttcagggcatggtcgcgcgggaggtcacggggctggaacgcgggcagagcgttgcgcaggccatggccgagaccttcgctcgcgaaggcgtcgcatgtccggaaccgggtcagggaggggcttacgctttcgtttag

SEQ ID NO: 10145 - DNA, 2046 bp, Rhodobacter capsulatus R121; identical to SEQ ID NO: 10133

SEQ ID NO: 10146 - DNA, 1005 bp, Rhodobacter capsulatus R121; identical to SEQ ID NO: 10134

SEQ ID NO: 10147 - DNA, 1296 bp, Rhodobacter capsulatus R121; identical to SEQ ID NO: 10139

SEQ ID NO: 10148 - DNA, 3093 bp, Rhodobacter capsulatus R121; identical to SEQ ID NO: 10136

SEQ ID NO: 10149 - DNA, 2046 bp, Rhodobacter capsulatus Y262; identical to SEQ ID NO: 10133

SEQ ID NO: 10150 - DNA, 1005 bp, Rhodobacter capsulatus Y262; identical to SEQ ID NO: 10134

SEQ ID NO: 10151 - DNA, 1296 bp, Rhodobacter capsulatus Y262; identical to SEQ ID NO: 10139

SEQ ID NO: 10152 - DNA, 3093 bp, Rhodobacter capsulatus Y262; identical to SEQ ID NO: 10136

SEQ ID NO: 10153 - DNA, 2022 bp, Prochlorothrix hollandica PCC 9006
atgaatgaaatcgggatctggtttgaaaagattatttcccccaacttgcccctcattagctttattgttgtctttttcctcgtcggatgtggcgcggagttttattctttctggagaaattggggtaagcttaaacgcctcgatctcagcattgcatatctcacagatgccttacagggcggaaaacagcaaatttctaaacctcaacccgaatcccaggacgaacaacactacagttgggtgcgacaacatatagaagggattgagaaaatagcagagactgagaaaaaccggcgatatatctatcaactatcagtgggtagttctagccttccaatcctactgtcctaccccatagaactcgccaccatttcccgtagcaacttaaccgttatacctacaattttaaccgccctcggtattctcggaacattttggggtattacaacagggattcaaggggttgagattaactccagtaatgttgaagcatctttagacagtaccctaaaccttttagatggcatgggaacagccttctccacctccctcatgggactgtcgtgcagcttactcttttccttagtcattacggcctccaactatcagcgaagacgctattgctatgacttacgcgatcgattagggaaagttgccgccttaaaaccacccacccaatcgagtcaagaactctacagatcgagtcaagaactctacagcattgttgagggtctgccccaacgcattggtgaaactatcaacctcgatcccatgcaaaatgctgcccaggatatgcaaaaagccgctcggatattagctaggttttcccaacagctagagacccagtttaatgctgagaaaattggtcaagcggtgggcgggcaaatcgggattgtctttgaggatttgctagcgacccatttgcggcctgtttttgtacagattgaggaaagtcagacacggctagagggactcaatgccgatcagcaaactgtgctgcgtgatctgattggcaatatgcgaacggaactcattgaacccgttgccacccgcctagatactagcgccgacatgactgagcgggcttctcaagctgttgagcgcttgcatattgaactggcggatctggccgatcgccttgcccgatcaatcgccaccctcaccaacaccgtagaaacgatcgaaacctttcaaaacagaaccctagagcagcttcaacgctttacgcaacacctagaaattaccctcactgagtttcaaaccaacaccaaagaggtactccaagaaacagctaaggaaattcgcagcggcacgatcgacatccttcagcaagcagagataacattccaaaagcagtcggatacattagctgagatcggccaagaagcctccagtttaatggcaactgcacggatcgaactgatcaccagtcttgggagcattgatcagcgcttgcaagacatgagtgaagccacccaaaagcaactggaagcttttagactcgcttaccaagacaatctccaagacttttttacccagcaaaataaccttcttgaaggcaccctcggacagcagcgcaatagcttagcagcagtggtcgagaatctcaatctcgtatttcagcaagagtatgggcggcgcagcgaactgaatcaaggtctagacgatcggatcaaactgatcgccaaaaccatcaaggatgtcaacaagttagttgccacttcagagaccctttatacccaagacaagctcgacctcctccaaaccttggccgatcggctggcagaatccgatcgggaacttcaaaccatcgctaggcaaaatcagaaaatgcgggctgattggacccaggagctaaatcaatacgtggaaagtctcgcccaagaacgaaagcagttctttaatgatgcggatacagctatggctcaggtttctggcaagctcctagagaccgccaagctgatcgcagacctactgagtgaaatgcccactcagactacagacgggaaccaggagaactaa

SEQ ID NO: 10154 - DNA, 747 bp, Prochlorothrix hollandica PCC 9006
atgcagcttgattttgaccccagcgaaccccaaaccgaagaagataattctatcttcttaagtgtcggtgatttgatgtcaggattgctgatgatttttgccctactctttagcattgtttttattcagtaccaagtcgcaattcaagagcaaaagcggcttctgaaagaggcagaacaactcaagcaacaggtggagcagtatgaaaaagcctttcgggagttgcccctgctgctgcgcactcaactggaggcagaattgggcacgggaggatttgaagttgatccagagactggcgatctcattattgctgataaaattctctttgatgaaaatgtcaccaccctcaaacctgcgggccaagcttttttgcgtcagtttatcccggtctatagcaacatcatctttagcctaccgccagagattgctggccaaattacagccatttccctcgaaggttccacaagttcctctggtcccgaccaggacaatatggatgtcagcctcagccgcgcttcttcggtttatcaatatattttcaatgatccaacctttcccaactttccaaccaaggcccaactgcgccaacgaattctggtggctggtcgcggcgaaattgatgcgaaccaacaaaccattattgctagcgatcgacgggtcactttccaattccaagtccgtcccccaaccctagccgacttcacccaatcagccaccccccctgtccctgctccaacaaccccatga

SEQ ID NO: 10155 - DNA, 1467 bp, Prochlorothrix hollandica PCC 9006
atgattctttcccttcctcccctttcgccccagcgcccccaacaactcattgccctcgctcaacaacagcagagccaatttcagcaaatcccttcggtcgatcaagttctcgaaaaactgacccaagggcataccaatatcactccgttggaatggtattgctgtcttaaagctaaggcagaatgggatcaacagcagtctcccgatcagcaacggcactctgcaactttaatttggcgacaaattggccaagattcctggctttgcatttttttactgcgtcgtttgctcgatcagtgccaaagcagagagcaactttgccttgcaccttcaattttagatacagtagatacaatttataatcaagcttggctggggaatcaaaaagattttgttaacttagtctatgctgtctaccagaccttgggtaaagcagtagatcaaactacacagcacccggtctctgctcttgggcctgttgctgcacagtaccgcctcaataaaggtgactatattgctcagctatccaaaagattatccctctcttggcaggataccaacctgctaaatctacactttatcgaacaggctgcgatttattttaatcacaagatagaacataaaagctatcagagtagtgacgagaaatggatgacttcatgtttgaatgatcccgcagtttctaaggcagagcttgcgatcgggataactacaattcttgaagcggctccaactaatttttcatctacttgtccccagcttatagaactatttattcaactccgttggcagcagcccgagctatataatctccttggcgatcaagctaaaatcagactcaatgctttaatcggtgctgctaactataccctattctctgagttagtagacaccttactgaaatattctcccatttttcaagaaacagaaggttctgaaaataaagaacgtaatcgaattgatatgcggcgctatttttggtctaactatagcgatcgctttgaagcagttaagattttagtccctcccagttcttatcagattttagaacaagctaaccatgatatgaattacattgaaaagctagatgtatcgagtgttcccgcagaagaagaaacggagttctgcttctttgattttggtaattatattattgcagaaccgctacgaggaaccaaggatatgtatctatttcgagataaagtgggcaagatgctaatggaaaagccaaatctctccttaaagcagatgggttcagttgtctcttggagacatgaccacatgttgctgtggcaaaacttttgtgagcggtggttagctatacataaaatttttcctaatgacggaatcaccaagtttcgacaagattctgaaaactatcatccttatagtcgatcccagggaatgcctcgcccttcccaagaggggataaagaagcgagaagagcagttgagaagatacaagtaa

SEQ ID NO: 10156 - DNA, 2106 bp, Nitrosococcus oceani
atgaatccagaagaagaaaaattcgattgggcgggactcttaccggaccttgagacgctagggagttatcctgaaaccccggagcaactgagtgcgctgttcgtggtagttctcatggcggtagcatttttatttctctgcttttcactgtacaggctattcaaagcgtggtaccaaaccagccggattagcaagtttctgaagaacgaaacgtcaaagtccgtcctaatgaataggcaggatttgagggagaaagccagcagggtaaatgatgaagttgggcatttgtggaaggaatttgatgaaactctcgtcgaggcgagagcgggagatgacgttcgtctccacagcatttacgaggccagtcatttcttcaacggctcgacattggcgcggggtatcaccgagagccgcatgcttgcagccgttccagggtttttggcggcactcggcgttattggaacatttataggacttcaattggggctgtcggaactgaatattgggaacgaagcagccgtaaaagatatgaaggcgggcttagctcacgtaattagtggagcaaagattgctttcttgacctcggtttggggggtggggctaagtgtcgctttcaattttgtagaaaaattgctcgagtgctgtgctctatcaggtattcgtcagcttcaagactgtattgaccaattatttcctcgcttcagcgctgaagttcagcttcagaaaattgcggatgatggatctcaggcgcgagagtcgttgcagggaatggcggagcggattggcgacaaaatgcaggaatcgttgcttgaggcgacttctgggatacaacaagggctagaagcaagtcttgagaagatcatggctccggctatcaataagctggtcaacgaaaccaccgatggaagtcagaaggcgctggagaaactcgtcgaaggattcttggacaggtttggggagcagggagagatacagcgacaagcgatggataccgcgtcaaaaggggtgggggatgcgttggccgccatgaaccagacgttagaaggatttattcgagaactcgatcagaaccaagtggctgcggcggatcgcgagcagcaactgattaaacatatttctgagcgcgtagatgagctggccgaaaagaatactgagcatggacagcggcttgctactgccgctgagcagcaaatcgggaaaatcaccgaaactcttcagcattcccagcaagcgcaggaagagagggaaatacagctcgggaggaagttcagcagggttgttgcggatatggaccaaaccatagcgcagttgattaagcatatttctgagcgcgtagatgaactggccgaaaagaatattgagcatggacagcggcttgctattgccaatgagcagcagatcgggaaaatcgccgaaactcttcagcattcccagcaagcgcaggaagagagggagatacggctcggggagaagttcagcagggttgttgcggatatggaccagaccatagcgcagtacacgactgcctccaacgctttaatggagcagagtaaacagcttcaacagcaggtggcagctagtcaatcgaacttcgagagggtggcccacggtattaacgcgggggcagccgaattgcgctcggcggcaagtcagctcaaggattacggtgaaggggttaaacagtcgtccatgcaacttagtggcgcgatcaacgaggcggctaggtcaacagcgaaactggcggacgagaacaagaagtcttcggttaccgtcggccaggtacatcaggagatgtcgcacagtattgaaaaattgcaagcggtggccgtgcaactggaatctgttgtccaggcggctgattcgacatttaagtatatggaagtgcaccagaagagctatttggagtcactgaaacggaatgtgcaggaattgtcggaacagggcgctaaactgttgagtgattacgccgggcaagctaatgcgcaaacaacagaacatctgggtatatgggcgagacatacgactaattatgcagaacagatgaatggcgcggcgagagcattgtcgtccgtagttgatgaaatcgaagataagttgagtcactaa

SEQ ID NO: 10157 - DNA, 753 bp, Nitrosococcus oceani
atgcatgcgcttattcgaccaaaaccaagaagagtggacgaggagaatccttactggatttctttctcggatttaatgtccgcgttgctggtgatcttcattctggctgcggtggcgctgatcattgagttaactcaaacacagaaaaaaattgaaaaagacattgaccagctcaagaatgcggagcaggcaaggagggatatcctccacgaaatacgagatgagttggcgaagcgaaatatcgaaatcttgattgctgacaacgacactgttttgcgcattccagagagtacattggcgtttgcttctaatagctatgcgttgcctgctgacgaaaaggtacgttcatccgtggtagctatcggccaagtcttgcacgcggcgattaaccgatcttttaagcctggtgtctctgaaaagaggcggtttgactacctggatacggtgtttattgaaggccataccgatagtagacctacgaggcgtattaaagggaactggggactttcgacgttcagggctatttcgctctgggagtattgggacgatgtgctcgatgtttctccagcgctcacggatatgtcaaatgcttttggcgataagctattttcagttagtggctatgccgctacgagaagagtgaatgaggcagaaataacccgtgagggcaggagagagaatcgaaggatcgatattcgctttaccgttaagcggccccgtatttctgagctggaggatatcgtcgagcaatga

SEQ ID NO: 10158 - DNA, 1431 bp, Nitrosococcus oceani
atgagattacctcttaacaagctccatttcagtttatctgatgagtctcttttgtcatacaaggggcgtatcgacgccgcgacgcaggagattaagcagctagcacgcgggtcgggaacaggaagcgctgcgtttaagcaagcgtatgaacgtgtgctgaaagctttacgcgaagatcgaaacttgagcgatgttttgcggacgccgactgacttgcgggcttttgcagtgtcttttaatacagagttggcgtccaaaatcaggctaacagagcccgtgctacaaaaaatcaaccaaatccgtcaaaagcccacggctttattggtcgatgccatttatgctcactatttgactgtttacgacacccttccagacatggtagctgtagaaaactggctgcgtgttgctaagggaagaaggggaaaactgagcgaagaggttccagcgattctaggtggtaatggcccaaagtggttggcggaagatgcccaccggcaaggcgtggactttgatgagcaggtggggcgcgttgggcttgatcgttttcgctcgggtcgatttatgacggttgcgaagaatatttattatctggacgtactgcgcaagcttgagcccaatcaggatcacccgttgctggatgagatgcaaaagcggccagtttataactcccggtacgacgagcggcatcttttgggccatcaaatacttggcatactgattgagaaggcccctgtcaacgctgtgggggaggcttggttgaatgcagtcctggcgattgggggagatccgagggtgcctccttgccaccctaatcaccagaaatggtggtctcagctcgatcctcaactgaaaaataaggcacaaggttggctctcgaaactagatcttcgactttttctggagagcttggaagatttctcatgccagccaggcaaggaagacttaaaacgaatgtatccagcgcgtaagcatttcatggaaggcttgctaaacaagcaactgataacgggtacgcgtttgtatttgtcgccaagcgccgaatcgtatttgaaaaaggcgtatagagcagagcatctaccccattattctcttgtcatggatggtggtaaggctttgattcatattcaactagggggtgttcacttggttgaaggcagccacaattgtcaattatggatttatgagaccctcgatccctccgctatcgtgttcaatgactctaaaacccgggttacctaccattccttgacccaaggacttagtctcataatgcggaaaaagggactgccgcccaaggccaacattactcatcatcctggctggcaatatagggcgattgttgctctgaaagagattggggtgccgattgaggcgaaagacgtccttacaccaaaagattatcacagatacaagcggttgtatggagcgtag
